United States Patent Application Publication US 2014/0057251 A1 - sequence listing, part 100

SEQ ID NO: 185490 - DNA, 3623 bp, Cannabis indica
ctcccacacagataggggtggcaatttagatcaccacaacacgatacaaattgattgggtcaggtttggattagggtcaaacatgaattaacctgtttgaatggagtatatgattaaagttactaacttatagttgaattattacttttttttattgaagtaacaaagaaatttacttacaatatagtataacttatttacacttataattacttgatattaagaattttgtttattttgtgagaagtaatctacttcatcaattttatttatttgaaactttatttattttatttagtgcattattcaatgtcaaacaaattgatacaatcaaaaaatgtaaggaaaaaaaaaattcaaatatgtgatatttgtcatgttgatcaacaggtaatataggaaatttaatcaacacaggacgagtctgcttaaggtttagatttttccacatgaaatataaatgggttagattagaattgaccaattagacatgccaacccgcatgacaaaaacacaaatatgacacaatgacatgagtttccacccctacacaacattaaagtagaaacaggaaagaaaacacaattaccctaataagaaactttaggctgagttatgctgttctttaatcttaatggcgtctgtttttccttgccagcttgattctcttgcacaacaaccaccaaagtcagagcagcttgagaagctgaaattatttaggaacacgttggaacgtgctattcaattcttacaggttccaaaaggtaacgtgattcctgggtataaggagaaactggctcactatgagaaacaaataataagttttattaatacaaataggccgaggaagcctgtttctcaattgcaacaagggcacccctcttctcatatgcagtccactcagcagccacagtctcaaattaatcaagtccaatctcatgaaaaccaaatgaattctcaattgcaatcaatgaatgtgcaaagttctgtgggaacaatgcagcagaacaattatacgagcttacaacaaaacactctgtctcctttgtccggagtttcaacaactcagcaaaatgtgatgaacccattgcagtccagttctaacgtggattcaggacaaggaaatgctatgaactcattgcagcaggtttcttcgaattctctgcagcaaattcctgtgagtgctccccaacatgcaaaacattaatgccatgtcatcccagaatgggatcaatgtgctgcagccaaatgtcaataaccttcagtcgaattccaatatgcttcagaaccagcaacatatgaagcaacaacacgagcagcaaatgttacagtcccaacaattcaagcaacaatatcagcagcgacagatgcagcagcacttaatgcagaagcagcaattattgcagcagcaacaacaacatcaacagcagcagcagcaacaacaattacagcagcaagcaaaacaacaacttcctgctcagttgcacgcgcaccaaaatcaaatgcagcatcatcaaattaatgatgtaaatgatttgaagactagaccaagtatggtcatgaagtcaggagtctttcagcaacatcatcccgctggtcaacgtgctgcttatccccatcaacagttgaaatctagctcttcctttgcgatgtcctcaaatcaactcctccaggcctcatcacctcaaattttgcaacattcttctccacaagtggagcagcagaacctgctgccacctcttaccaaaactggaacaccattacaatctgctagctcaccttttgttgatccatctccatcaactcctttggttccatccccaatgcccagcgattctgaaaaaccccttccaggtgtttcctcacttgtaaatgctgggaatgttggacaaaaacaaactagtgttgttactccagctcaatcccttgccatcggcaccccaggaatatcagcctctcctttgcttgcagagtttagtggtcctgatggcactcacggaaacacttcggtatctgtttctggcaaatcaagcattacagagcagccactagatcgtttaattaaagcggttagcaatgatgatatcttccatgttgattttagtgttagatgccttctcctttcacttgaaaacactattgaacgttttccatattcatttttggtagttctctcatattagtgaatgatatgtaatactgatatgtggtttccaggtaaagtcgatgtcacctaaggcattgagtgcttctgtcagtgacattgggtctgttgtcagtatgattgataggattgcaggatcagctccaggcaatggatctagagctgcagttggtgaggatttagttgctatgacaaactgtcgtttacaagtaaggaatttcatgggccacgacggaactaatgggactaggaaaatgaagcgttacacaagtgccatgcccttaaatgttgtatcatcagccagtagcattaatgatagttttaaacagcttattagtttagaaacttctgaactagagtcaactgcaacatctggtatcaagaggcctaagatagaggtatttgtctttactggaatgtatatctgtatgagtacaaaagttattttaaacatggtctgaacttctgagaaccctgttttatgttcagctcaaacttggatcattagtttgttgaggtattggagagattctagcgatacacataaagataagcttatgagtgtgctatgctgtgagggtgtatttggttagggtaatgaaatggaattgaaatgaatcaatttttattctatttctgtttatgcatatttatttaattattttcattctattcctgttcttatgtttttcatttctcccaactatggatcctgagcacattttatcattcattttgagagttgtccctttgaaatgactggtgttcttcttgcaggttaatcatgctcttatacaagaaattagggaaataaatcagcgacttattgacacagttgttgatattagcaatgaagatgttgatccaagtgtagcagctgctactgttgaagggggtaaagggactattgtcaagtgttctttcagtgctgtagcactcagcgcgaacttgaaatcacagtatgcttcagcacgaatggtgagttctcaagaattatgaagggatttattatcctatgcagcattcttgttaattattttgatatgttttgcagtctccaatacagccattgaggttgcttgttcccacaaattatcccaactgttcccctgtactgttggacaaaattccagtggaagtcaggtgagggaaaaattctacttctcttttttgttcaaaataatgtctaaaagaaaaattatttgtgacatgaactttcaggctaatttatctaaacagaagtgaaattttcgaagctcaactctatgcaagataatgtcacgtaactttttttaaaagacaacattagttttcacttaattattttaaattgcatgattagtcaaatgtgaatcccccttcgtcttgtccatctaaagtaggatcaaattaaagcgtcagtgttaatatattttgtagtcattctatctaaatttactacgagactttgtatatgcac

SEQ ID NO: 185491 - DNA, 2026 bp, Cannabis indica
ataatccttatatgacactaatttgactcaattcaataacaaaagataaagattggatacaatatccatatacccaattcaattgccaacataataaagggaaaaacaagcaccattataatacaaatcaacaaaacaaccagaaacaataccccacatcccatccacacacaaatgatcatgttaggctttctgaatttgctatagatatatggatatcctccgcaatatccttgggcttattattagtctccaccggtatggccatggccacagcagcagaagaagttcctcctctccgccgccgcttgaagatgagccaaaccccctatggccgccatgatcatgaccgtctaataccgccctaatctcctcagcccgattcaaatactccgtgaatttttgttgaatagctatcctaattttagggttctgttcgtacttcaaatgggtcctaaagtactctaatgcattcatatataaaggaaaagcctttgcataattcccagcattgtcttcatgcacagcttctttcacgtactctattgcttgctccttaaaattgctatacatatttggcaacccaatattacaactaaaaacaattccaaacctaaatttatcaaaggtgtctagctctctataaataatataaattgtgtattaatattctcaaaggtgaggtgtcgtatattatataggtttcgaagacttttttaaatcaattcctataaatgctggcaggcggcccctttaaatattgacactttgactttaatttttattttaattctcctttagaaaaattatttatagaccaaaattaactaataatgacatgtacaaatagtgacttattacaaatttaatcttagaaattaatattatttattatcaatgtataattatatagcgaggttaaggtccatagatatggggatatatatagttaagtatatataatcttgtattatacatgagttcaattataaactacatatatatagtttaaggttcatacttacaataattaggtcaagtagtagcgaccacatttaaaagaatcttgcacgtttgttaattatcactatttatatatattgtctttggtatattgccttaataaatgggtgtatattataaatttataaaacatgcaatttagaactttatgagtaattgaataatgtagaagacacaacactaacctaatgagataattgctttatgagataatattgagaaatgatgaatatgggtagtacaacactaacctactattggtcacacaacctactaatatgtttgagattttggtaagaaagaaaaaaaaatgggaaaatgtaaggaaaaaaaaactagaaaataaaaaacaataaattctcaatagtataaaagaaaaagttgtataaaaaaatacttaattcaacaaaaaatttcatagcaaattaacttaacaattgatgttttttttctctacacatttttttccttatattttggctaccaatcaaacttctaaacatagcctaaaaaaacactattgatcaagaagtagtacaccaaggcaatggaaagttatcattaattaattttgcagatttacatactatttcaaggctacaacacacagcactacacttagttgctctttattaatatttcacttacattgcttaattctagagtagcaacaaataattaattaagtcaaacattatacataggtctagttgaaaactcaaacaacataatatgattataaggcttttcaggagtaacaatagtagatgggaaattggggtgattcacagcatcagggaatccttgagtctccaaacaagagcagcacgaggttggtacacaaatccacctttacccttcacatctttcaaaaattacttgtataaaattgcacaccaggggcatttgttgacaacttcatagaccttccagatttcttatcataaactacagccactcttttcaatgccccataaggagttccatcaagaacatagttgat

SEQ ID NO: 185492 - DNA, 1803 bp, Cannabis indica
gaaattatagtccaaaaaaggccaaatacaaaataacatagactacatattaaagacaaacaaaacaaacaaaaacacaaaacaaaaatcaccacaccagaggaaaatcaaaaggcagaggtaacaacaaagaagaattaagcaaatcaggtcgaaaaaaaccaaatcttctaagaacttgattatctgcaaaattcaaagccctctgcatcccattccaacaagcttcccaagtataagtaggattaaattccccactacatggctcacaacctgtaaaatgtacaacaaaaggtcttctctttactattccattaacatactcttctctcaacaaaccataatactcactcactttctcagcatgtcttctcctcaaaatctcaactttttgttcaatctcaatataactcttactaatatcatcaagatcatcaactaaacttaaccaatacccttcaaagttataatcactctcaagaaaaatcttctcaccccatttctctttctctttcaaaagaagataaatcaaagcagattgatcatctgattcaggatacaacttatctttcagtaatgatttctgggtttttccccatttttcataatctgggctcttaggtcccatactagtccacctctccataatctccattgaccattgacaatttcttatcaagaaaacgccggcgtttaaactggtccagcttttgttgtcgtagaccaaatttgaccacccatgaacgacaagattgaatctttcgtatttctccaaaggtaatttgaactccatatctgtaaaaacggcatcggaatcgacccaccaaacccattcaacttccgggtgagctaacatggctgatcggattaatgggtacttagcccaaaacccaagcatttgaggatgaaacagagcattgttgtagaagatttcatggccatgaatacgactgtaatcgactttgttcttaaacaaccgaagatgtaagtgatcgccggtggggttccggcaaacggaaggttgagaacctgtaacgatcaaaactcgattgtttgaactttcggcgaagtgggtatggtgtttgagccattgttttcgtttttggtcccagtttttgactggtcggtcaatggagtagcttaattctgggtcatcgtagaatgttgactcaggtgagtcaacgccggagtaaactgtgtttaagctgggaacgacgtcgtttgaggttggttgagtagtggtgaaaatggtttcgaataatgggtttggattaatggaagtgagaagtgcccatatcaatgaaatggctaatgaagctccgccgacgaagagaaagccgtcggcgatgagtgaagctgttttgtataaaacgctgcgttttggtgaggtttggtatcgagaaaattcaggcaaaaccatttttgaagagaatacttttggttacgtttctttcttctataactaaagaaagaacaatataagagagtgagttagtgagtgagtgactcactaaagtttgtaactttattttgtttttttgtttttttcttgaatattatattgagatttatataaagaaccgatttttatgtacatgcaaagcaaggaaagaataaaagaagagtcttttcttgcatgaatgaactttgatattttagggtttttttgtagtgtcggtttctctcactttttttttttggttcgtaagtttagtaagatacctattattgttatagtgatgtatgatacaatctaggcattttcaattatggttagttggtagagaagagagtccaataata

SEQ ID NO: 185493 - DNA, 3349 bp, Cannabis indica
gcctctgctgaggttggtaatgacaatggcgatttctctgagatccaacaacaaatgggacctggcctcacctttgtaattcaggcacaaccttacctgaacgccatcccaatacctctgggcttggaagctgtctgcctgaaggcatgcacccactatcccactctgttcgaccatttccaaagggaactccgtgatgttcttcaagatcttcaacgaaaatcgttggtatcagactggcgtgaaactcgctcgtggaagatgctcaaggagctggctggctctacgcagcacagggcagtggctcgaaaggcagcagggcaaccaccaaagaagagtggccagagcgtgttggggatggatatggagaaagccaaggccattcaggacaggattgacgagttctccaaccgcatgtctgagcttcttcgcatagagagagattctgagttagagttcacgcaggaggagttggatgcagttcctacaccggatgtcacctctgattccacccgaccaattgagttcttggtcagccatggacaagctcagcaagaactctgtgatacaatttgcaacctgaatgcggtcagcacatccattggacttggtggaatgcatttggtgctgttcaaggctgaaggaaatcacaagttaccgcccacaactctgtctcccggtgacatggtctgcgtgagaagctgtgatagtaggggcgcaggtgcaacctcttgcatgcaaggttttgtcaacaaccttggggaagatggctgtaccattagtattgctctcgaatctcgtcatggagatcctaccttttccaaactctttgggaagaacgttcgcattgatcgcattcctggcttggctgatgtgctcacatacgaggtgtgactcttactattaaattttgccgaccattttatatttgattcttcttttcacgagtgatgagtgtgcctttgctgttttcatttacagcgcaattgtgaagcccttatgctgcttcagaagaatggtctaagaaagaaaaatccttcacttgcagttatagctacactatttggagacaaagaagatatggcatggttggaggaaaatcaagttgtggattggggtgaacaagaattgagtgaagaatcgataaatgggactcttgatgaggctcaacgaagagcacttggcttaggtttaaataagaagcgacctgtattggtaatccaagggcctcccggtactggaaagacagttttgctgaaggaattgatagcacttgcagttcaacaaggtgaaagagtgcttgttacagcacctacaaatgcagctgttgacaacatggttgataaactttcacgtatcggtttgaatattgtccgggttggcaatccagctcgtatatctccaactgtagcatcaaagtctctggcagaaattgtcaattctaagctcgccgattttcgagatgagtttgacaggaaaagggcggatcttagaaaagacctgaggcagtgtttgaaggatgactcattagccgctggcattcgccaacttctaaagcagcttgcgaaaacgttgaaaaagaaggaaaaagaagctgttagggaagtactatccagtgctcaagtcgttcttgccactaacacaggagcagccgaccctttggttcgaaagctagatacctttgatcttgttgttatagacgaagcagggcaagcaatcgaacctgcttgctggattccaatacagcaaggaaagcgttgcattcttgctggtgaccagtgtcagcttgctcctgtcattctatctagaaaagcattagaaagcggcctaggagtatctctactggagagagctgctagtttacacggaggccttcttaccaccatgctaacgacacaacatcggatgaatgatgcaatagccagttgggcgtccaaagaaatgtatgaaggtttgctcaagtcctctccagctgtctcttctcatcttttggtagattctgcatttgtcaaggtatcacagcagcccagcccactcgttatttctctgttcattttccatttctttcagaaactgtggtttatgagttcactcatactgactgtttttgaattcactgtttaagcctacttgggtaacactatgcccacttctcttgctggacacgagaatgccatatggaagtttatcaatgggctgcgaggagcatttagacccagcaggcacaggctcattgtacaaccaaggggaagcagacattgttgtgcaacatgtcttttctttgatatattctggttagtttaaccactttatctaccacattagtgatatttttatgcagtcacttataatatggtattggttaccatacaggtgttaggccatcagctattgcagtgcaatctccttatgttgctcaagtgcagctcttgcgggacaggctagaggaacatcccgaggctgcaggagttgaagttgccaccattgatagcttccaaggtcgggaagctgatgccgtcataatatcaatggtatattccagtcctaaaaagaaatgctatatgctatgaatgaaccataacatgtggtatttattacttgctgattttgctgctataacttaaaaggtacgatcgaacactctaggagctgttggatttcttggagatagtaggagaatgaatgttgccataacaagggcccgaaaacatgtagcggttgtgtgcgatagctcaacgatttgccacaacaccttccttgctaggcttctgcgtcatatccgttattttgggagggtgaagcatgctgagcctggcagttttgggggctctggactcggcatgaatccaatgttgccttccatcagctaagacagtttcggtttttgctccaaaggaccatctcatctcctctccatccttgttactgtacaggtctttttgttttactaccaaagtagtgattatagtaatacatggttatcaattagtttactgtatatacaacgatccaattcattgatcaagaacttgttttgaattcgtctataccagtggagaacgaatgcaatttatatttcttcaccactctcaaaaaaaattaaatatatatatgcatatttactcctctccctctatataaatatataaatatatatatttatatgtatgtatttaaaataaatgatttagacttgatgcacccaaactaagaaatcagattgcctaattgtgtttgtattagaatcatacctatgtgatttgtttccataaagtctggagttcgaagccctccttggatagttataggaatggcaaaagaggcggggtctgccccggcccgctactga

SEQ ID NO: 185494 - DNA, 3575 bp, Cannabis indica
ttattttttttttacttttttttgcccttatgtaaaaatttctcttattaaagtggggcacatttataagtttttgaagtggaaataaaactcccattcttataaactgaggccctttcaaatagaagaatgaaaaaaaaggataagtgaatatgataattatataaattactatttttctttgtaaaatttttacgttcaaagattttattcttttgttatgtttttacgatattttataaaaacaacacgaaaataaaaaagaaaattatataaaaataacattcaaacaacattaaaaaaaataaaaataaataacatacaaataataaaaaatcaacaacaaattaataagagtacaatataaaaatatatcaaaatactatatttttttgtaaataaaattattaaaattgtaaatatttaaaattccatacaatatttttgtgttgttttgttgtatttgtaaaataatccccaagtaaatactaaatagagccaactacagtaatgggctttttactcagtacaggccaagcccaacaagagtttccatagaatcggatctaattcgggtttcgaacagacgtagccgccccacccaagacgaggttttattcaggtttgtttcttcttcttcttcctctttccctttttccctctcagacaatctggggcttcaaggtctgcaagaagaagtgacccactgccctaaaaccctagccttcttcaacactgtaacatagattcgaactgggtttgtacgaagaggaagaagaggaaaagcggaagaggagaatgccagggcccacgctggacatggagccggtggagccgcaatcccttaagaaactcagtttcaagtcgctcaagcgagcccttgatcttttctccccagtccaaggtcgtatagctcccccagatctcgaaaggtataaattccggatttttccttaattctttgattttttcttttttccctttaatttaattccatggaagtttaaacttagggtttacttcagttggttaagaaacttgcattgtgagtgagactaatgtgggttttctttaaaattggtttttttgcagtaaaaagatacgtattaatcacaaggttagtcagttcaattgttttgctatgatatctcaaatgttttctttttcttctttaatttaaatcagagtgattggctatgtctgtactgatttcactaaaacactttaatttactctttagataaatatagagtatggaggaaccaaaaataccagtagccaacccaatcgtcaggagggtcgtcctcaacctacagttccttccaatgtgcttgcacttccaggtacagtttattctgttccagttagattgcatacagtccaattgtggtgcaatgcaagcagtatactattagctctagttgtcagttatatatgaaatttattatttaatatcttaatttcattaggattttacttgtttcctgttctagcttaagattaccaattaggcttcatattcttgttagttgtaagaagattttagtgctcttcaaaaacacaattcgctgcaaggctgtacaataaatgttgttagacttcaagctcagtatgaagctatttgtatattagttaatttggcgtgctctagtttctaattggatgaagtttttgagattgtataggtcctgagggttctagtgattcacaaagaggaggctctcaaaatgctttggttgttggtccgtctgtgcctagaacaccgtaagtacattctctactgttttgtttattcaggaaaatctagacagcagtaggtgttttattattttcattatttgggcatgtattggccgtacacattacagaaaacaagcatattgatgcatgattttaggataagtaagggaatctaatctacctaggattatagttagataacaatcctgctatgtcgagaattctaattttttgtttctgtcataaacagatcagtttcttatcatatatgcattgaaaagagtgatactagggacacttgaaacttacacccaaagtttgcacgcaataacgtgacataaattgagatattacgacatatcccaagggttattctgctgtgtttacactaaacttcaccctttttctcctatcttcttctacctcatatttgctccaagatttagtggcttttattgttgtactggataagatatttaggattctaatatctagtgtgtagtttttctgaactcacgctaatctgggtattgattttacatatattttcttaatgtagtactattactaaatataattaagaaaaaaaagtacatcctactcatattacatccaagaccctttccttttgaaatgttgtaaggaacagactgttgatgaaatgttagtttagtacaaacttatagtgtgtaaaaagatccgtcatatacttatatagaatgcttagagttgttgagttttcatttcaagaggaggtcttttgctggctgtgaaaccttcttacatctatttttttttacttcgtttcaggaatgatacaggagtttcgggcaggagcactgatatcatatcaacttcaggcttgcctgaaaggtttttgttttattcttgtctggtcataccatgtcttattcagtgctaaagtagaaatttgaatgttatttgttaggtgctctttccctctccctatctctaattgaagctgttataattgttatttgttacaggaatttttcaacttctgctttaatggagagaattcctagcagatggccccgccctgtatggcgtgctccttggaagaactacagggtgagaattgagaatcactatattacataaatgtggtaccgaagctttgttttgctataattttttttgtttctattatcagtcgtacagtaacaagttacataaattttaggttcccttttggatcttctacttctagaacatttagtaatagattaagagatcatgtgtcatcgcatgatgagtgttttttcttttgtttctttttctctgataatatagcggtgcattgatattgatattattaatattattatcactttttatgtactggactgacttccaaattgatgattttctagtcctagtttgaaggtttttgcatttggtatcatttatacgtttttttttgttggcctagtaaaatttgctacttaagcagactatttattatttatcaactaaattgtgcaggtgattagtggccacttagggtgggtgagatctgtcgcatttgatcctagtaatacatggttttgtactggctctgctgatagaacaatcaaggtattaagcttaaggttcaactgttcaatactatgatttggtttttggtgacattatgttaaattgatcatgtgatgaattttgggttctgagggtttaccttgcattttttgtttactgatttggaaagtttggacatttgactatatatattatttgcatgtttgtatggttactatatgttttttgaattttctagctattgtgacttctagattttttgaatttgctaacta

SEQ ID NO: 185495 - DNA, 5237 bp, Cannabis indica
agtattttttttttctatgtataatgctgcatatttttctaaaaaaaaatactgtatataaattctgagtgttaattaaaaaataaaaaattctttacaagttacaactttgtttagttagtaacaaaaggggcttccacgtttaatattttgttgtataaacaaacacccacccacccacaaagtaagatcaaattcaaataatttctctttcttcttcttttcactcaattttccaagcatgaagaaaaagacaaaactcactggtattggagttactaatggtggaataatacaagcttccgttttcactcccatgcccactatcttccatctcactctcctcaatctctgcaatccctggtttgaagatgaacaacccatgtccattcccaggactcccaaacaaccaatcatgcacatcccaaaacacctgaaccgtctgactattcccattcccacccaccaccactgtctgattccctcgaaacttccattgaaggttcttcacatggattaccacgatcccatccacgctgatccacatctccggatctttcggccccgccgttgaactctccactacgatctcgtgagccttctttctctcgtcgaatttcgctcgcgtcgagaaagttctcttcgcgaacacgttctccttcttgtagaacagaaccgcgtcgattagcgctggccgcgatttcgtccttttgtatgctttcttcttgatatcgccgattaagagcaccacctcatcgtcgcagatcaatgctacgtagaaatcggtgcagggttccggtccggcagagaatttcgctgatcggagatcccagtatacgtcgatggagttattggattcgatctcgaacgatttgaaacctttcttactccagaaatgccaaggtttgaggtcgattttgcaggtatggcaatggaaatcgccgtctatgctctggatggcgatgttgaagaaatggctcatcaggtttttgcaccaggtcaccgttaccttccgccagtagccagagatattggccatgtaaacgcaggtcaccgtgctctgtgccgttctcgaggtaatcggttcatctgtgattttctctgctaatggtggcgcctggttcaacgagtgatgacctcgtaatgaccgactaaacgacatcgttttatgttcatacagatttccttatgctatctgctctgaaatttacaacaagaaaaaaaaaaaaaagaaaaggaaagaaaaactgaaaggcttgatgattttttctttaaatatttgtattaactcctcataaaatctctttattgaagaagaacctgataagatttggaacctagaagaacaatgagagactcagaaagaagatttttgacctttgatgttgaaacttggaaaatgaaattttattttttctctttttctttttcttttagtttttgtgtcataaaaatatgaagttagttatttagagggaaaattctatattgaggttgtaaataaataggactccgaaacagaagggagtagaaaattttatatttatatttatattttaattaatattgatttattgtattttgtacacagctgtttgattttctactcttgaatatgaaactgttttttttgtatgccattttgggttaaatatcagtggttgccatacgtatttgaattaaataaaataactgaatacttatctcattttattcctaaattgatataaaatcaagtcattttatttagactttagaattgttttattgataatgatgattcagtggtgcaatcccaatttatcatattaaaaatatatacgttcatgagagataaaagaaggaatcaaattcaatatttgacttggttggtttattcttatccatattatctaaaactcaatttaatatcaatttatcattctcaaaagatgtaaatccaaatttaaattaaactcttgattgagataattccattttacgaaagaaaacaaaaagcagacgtaatataaactgtggaggttgtttcttgttttactgttcctgtttagacctgaagaaatagggttgttatgattagttattgttgagttggtcaagtaggtatttcagttaagattctccttggcatacgagacttgtaattgtataaaaaaatacccacgcccagagaagggagcactgcaaaaatggctgtggagagagaaaaatgctcctgttggaatcgatttctggtggttcaccaggtgttcttttatctttgttgattgttttagtttttcacaacatttcttataaattttcttcaatctctatatccccataattttcaatgtacatgtctcagaaagaaagaaagaaacaaggaaagagtggtaacatttcgattacaaggctaaaattctgaacccaagttttcatgttcaatctcagagacccgaaactggacgtcctgttcttttcaaacaaacggcaaatggaaatggtattccttagcaacacgaaggtcattcttcatcaaactatatctacattgttgttcttgtactcagttgcactgttttgagtttggtctctcagaattaagctcccgtttccatttttgggttcgaagatgactcccatgtggttggctgatgcactatcttgaagtgcttccaaatataacaacttcactagattcctaaatctgcgcctgaatgtcggtatgcgagaaattgacccaacaagaccctgcagtctggtaaaaaaaaatatgcatgttttaagcttatagagaataaggacttacaataccagcaatccaaactcctgagctaattaagaagtggctaaccttgacttaccttctaattatagcttgtaattgagctcttttaacgttatcagtggaagggaagcaagttctgtcccactcctcaggtttatcatttttgcctctcataagcaattctttcagacagttttcttcattctcatgcaactggagagcctttatttgctctttcatgatcaacaggggtccaatgaaccactcaaacaccttgtctttgggtccatttctcctcgtcagctccacatcatcagcttgtgattcgattaaacataaataagtaaatcatgatctgaacagaaatcaacattaatgagcaacggacaagttaaagtaaggtacatacagatcattaacccagatgagtggcactttgctgatctaagcagacattgtaatatagaccaagcaggcagtttcacgcttaacttcttacaatcacccgttaaaatgcattctccgatgtccttgagacttaccaaaccatcgcgaataagtatcctgccattcacctcacaagatttaaatagccagtcccacacctgacattaaaaaatcagaagtattattttcacatgtacacagaaaaaaaaatattgattttctgtatcttggagtgtccttgcctgcattggtttatactgttgaattgcccatttcaatgttcttgaaccttctgaaacaagttttgaagtgagtgagccctctctctctagttttgaggtgattgaatcatcctttccattttttgcttctttgttgcggttgtcatctagcttgtctccgaccgaaccagagttaacgtctctactgtacttaggcctggctgtcacaagcaaatcttattagtaaaatccaaaaacagaataataggcattctattgtgagatgtacaaattgtttattagatcattcttcatctcaacaggagttgtaaccaaaaattgacaacacacaataataatacaaccgtgtacctcgggaggcaggatccctctttcaagtagagcaaatcatttacatattcatcaaacaaggagaccaccgatatgacaaatgcaagtcccagacaaagtgagtcttcctggaaaatttgtctaacttttaagataaattttcatacgaatactgacagaacctaacaacataacaataacattcaaaactaagataattaactctataaatagacaacaaaagatgcttcttagcagacctgatgaacaacaactccactgtatagccccagaaagaagctagagacaatagcacccatcactgctccaacaacagccagaggccataagataatggcaaggccagcaaatggtacacacaccgtctctaagaaaggcccttctctgccaatcaaatcttctaaaagcctcttccaacctttaaacaacatgtatggacttttccacaaagcaacggctgtaatcaaagggacatctactgcgacaccaatcaagcagactaacaaacagcttggcaattttgagacactatcatagaacaaataacatatctagaggttttacttccacgtttcaagttcttgtaaacaaatcaaatgaaatgaaataaaatagaatttcttacttgatctccattggcttttcatcctcaggtatttgagcaattaattcatccatgtaggagaaataagagtggaagcaaaaatctattaaatctagaaccacaatgcagcttcccttgatagtagaccaacaaccatcctggtagaaaagagagctcatgattgtgcttctaaaaagccttattatgatcatctggcatgaattcgcttaataatacaagattagaagcaactattcaacttttgctgatgatggtgggatggccaagcaaaatgaaaatctacacttttactacttatgttatgtataaatcctactatagaccatccaaagccataacagagaaacttacaactaaatacaatttgtgtaagacccttaaactaatcacattatatctcagtaaccataggttgtcagtcaaatgtcaatttgtatagtgttagcttcggtaaccaaactatacttctagcaaagaaagaaagaacatagtattaaaaaaaagaaaaagaaacatacagcaaagcagtggaagaatttttcactgaagttatgacccttagcctcaaatgtagcaataagaggagcaaaaacaccatacccaactccacccaaaacacttgcaacaatcccaatacatggccagaggactgaagggactggcagtaataccaaagcaagaaccttcagaaccatcccaagtctcttgctcctgaaattattaggacaacgtcacaaacaactttgcgactctcatactaacattaacataaacatttaaaatgatgaaaaaaaaaaagaaa

SEQ ID NO: 185496 - DNA, 6437 bp, Cannabis indica
tggaacttagagaagggctatgtgcaggccagtggccaaattcttcctcaaaagagctttcgtcggatcctccatcatcttactctgaattcaattcacatcaaggccaacagaagtggccaaactcttcaattttagattacggcgtcagaattgaaccatctttcagaggatttgatcagtcttctgaagttcatgctgtaattcctcttgaccttagtaataaaagtaaagtcttgggtcctgaagatgttcatatgcaggatacagaggaagccaataatatccctgattgggatccaagtgcaatgctgaacaatctttctttcctggaacaaaaaattcaccaactgcagaatttagtacagttgattgctggtgggggaggccaagttcttggtagaccaactgaggttgctcagcagcatcaactcattactgctgatcttacttcaatcattgctcagctgatctctactgctggtagccttctaccatctgcgcagaacacctttaccactgacctgccgtctatgggacagcttgcgcagcctggtgaggtccttggtgtgagtgctggtgttcagccacaaaacaatggccgaagcaaaatctctgaagagtccaatcaaatagataagaatgctaatcatggggttgagcataacaaccacatggatgaacatgattttaaagatgaggaggatgctgatgatggtgagaaccttccacctggtacctatgagatcttacaactagagaaagaagaaatcctggcacctcatacgcacttctgtgccatttgtggaaagggattcaagagggatgcgaatttgagaatgcacatgagaggtcatggtgacgagtataaaaccccagcagcgcttgctaagccacacaaagaattgggatctgaacctgtggttatcaagaggtattcctgcccttatgctggctgcaagaggaacaaagatcacaagaagttccagcctctgaagactattctatgtgttaaaaatcactataagagaacccattgtgacaagagttatacttgcagcagatgcaacataaagaaattctcagtaattgcagatctcaaaactcatgagaagcattgtggcaaggacaaatggctttgctcttgtggaacaaccttctcaaggaaagacaagctttttgggcacattgcgctgttccaaggccatactcctgccataccaattgatgaaacaagaggaaatggtggtggcccagctgatcattcaactgggattgaagtaacaaataagggttctgtaaattctgtaaccttcaattttggccccagtactcctggtgaaactgttgttcacaacataatggatgagaaaggaaaccttgacgatcctactgcatgtttctcaccacttaacttcgacacatgtaactttggtgggtttcatgagttccctcgacctccttttgaagactcagagagctcgttctcatttcttttgtcagggtcttgtagttaccctccaaagatcggagctgagtccagttctaataataatctttagtaatattgatgggtttattttcagcacacattaggggcacgaaatccctagttttctgttaccataaaaggtgaggtgaccccattacctgtaatttgaagttaaataaattattctactttcttataactctttttccattagtcttccctattattatgtcctgctaatctcacaagaaatttatagcagtgaaattgtctacaaacagtgacagatcgaagcaatatttagtgtagtttggaacttagtacaaagcatatcacatgcgacaaatcctctgccatttttataccaattaagagatgttctaatttcgagaaaaagatggtgaaaaagcattcacacattataacaatggcaaaagaaacttaaactcccatacaataatttcaaccaaaatgctttttttttctaatcttgcctgtgttgctaacattgaaacaatatagctaacattttctcgtccataatgagaattgtggagcagaatgagcttcaaacccttagcactttttaatcctgcctgtgttgctaacattgaaacgatatagctaatattttctctgtccataatgagaattgtggagcagaatgagctttaaacccttagcactttctcctttggaagacttcttcgagggatatcgattgtacttctccctcaaaactacatcatctaagacagaccaagtttgccctctgggagaactgtcagcccacaaaaacctttcagaaaatggattcatcagactctctcggaactcttggaccgtctcgcagatgaaaccctgaaaagatcataaaaaggaaaatgactaacattccaaaatttggtagcatgcaactgtgataatgtatttgttgaaataaaaatttagtcaacaattgcaatcgatgatgcaatgataaaaagaaaaaaaaaatgaggccaaggttttggtgtaacttttgcgttctcaacatgactttctatatttcacacgttacctctgccatcgcttggatctttagagtaagatcgtcactaaggaggacatgctgttcatcaggtctcatttcctacacagtagagcacactctaagatatggtcttctgttgttggggaaagaatttccattaaagtccacggtaaaagcgagtttgttccacggtaaaagcccccacttccctggctaaatggagatctaggagtggcggggggagtagaagcagtcagccttccatcttccactgaggtctggacatgaatccaccatgttgtttctgtcatacatttctcaatccattctaacgccaggcaagcctcaggctttcttctgaatagactgccttgccgcttcaagcaatccaattcccttataactgataacaaagacacatttagttagcatataatttaatgcaacaacagcaagtgaagttatatgtatatttaattttttcattacccattcttggaatgattaaccgagtcccctttagaccttgcaaaagctgcagtgccttcctggaatccttgttcagaagagtagttgtgtccacaactatggtccatcccctcttatcccctcggacggagatgttctgaaatgaacttcaattactgatttatacttgttcagacaagttaaaacaaaaacaatatgaagttggacacaacttacagagaatggatgagtaaccttgtcaacagtatgagtgtaatttactgaagagctgcatcttgtaggagaactagggcgcaacatttctgatctgctgttctctacagtgtctacaacttgtgattgaaatggaactcgtttcatttccggtcttcttttgttcaagaccaattctttttcaacctccaactgattttctacagcgtctacaactagtggttgaaatggaactcgtttcatctccagtcttcttttgttaaagaccaattctttttcaaactccacctgattttctagagtgtctacaagtagggattgaaatggaactcgtttcatttccagtcttctattgttaaagacaagttctttttcaacctccacctgattttcagagctagtttgtttcacaaatttccgttcttgtaaaactctcaatgaatgattctcctcatttgaaaaggaatttaagtttccttcagggtgcattttggggctagaagtaatctttgaggagggtcttctgcatgatatagaatgcttcacttcttctagcgtgcccttcttttttatggacttgagtagaagggtattcggggtacaattttccttgtctggagtataaatctcttcttcttccccatcaacgtgagagaaaagttcctttgaaattgatttatctgcagcaccccatttggttccggatctgcaattagttgttccaagctgggtaacaccagaaggtgtacctttctttcttgaggacttctgttgtaaaagagttgggatgaaattttccttatctggagtaaagagctcttcctccctgttcaagcaagtgaacatttcctttgttatagatttttcttcagtactctcctgattatgctgcacagctttagaatcagacccaccttgcacagcttttaatctattcctaccggttcgaagggaaataacactagcagctttacccctcctagaccaaatgcttccaaagcttggactcttatctgatcttaatggagaattccttgttttttctgattgaggtagacctcctccagcaaagagagattgtggggtctggttttctttgtcatctgcaatttcctggacaacttcccaagctggcagagatgagtttacagattctgccatacaaggttcacaatccttctgttcattacctttcatgtatagcctttggtcctcagtttcttcaattctttcagaagctgaaggaatgccatcagagcaagcagatatatagtcaaccaatgagtttgatttttgttcacttgtataattttcattcattcctcgaagagatagttctacatcagaaagagcttctggggttaagctttctatgtcagtttgttgagtttcagtcttagcaaagactgatccaagcaacaaagatggttcatctttctgctcatagtctttcctggccaggctttcgttcgcagtttcctcaaagagagacggcggggtttggttttctttgtcatctgtaatttcctggacatccttccaagctggaaacaactttacaaattcacccatacaaggttcacaataatctactgaaacatccttctcttcagcttcttcaattctttcagaagctacaggaatgccatcagagaatgcagaaataaagtcaaccaatgagtttgaatttcgttctgttgtgtaattttcaagcttaccttgaagagatagtgattccacatctggagtttctggggtaaggttttctatgtcaatgcgttgaatttcagtttcctcaaatggttgagaggcaagttcaaccttctcttcattatcaatggaaaatgaggaatgacggcctacaaattgattaaattcttcctctagtcttataggagacctctcttgcattactatctcacaaacatctttaacagaagatgaatggcaatctgaacccaaagttaaaatttctgagtcggttccaaaaagcctattacaaaggattgggatttcattatgttcagtgacatcttttagtgggctttcagcaagttcatcattttcatccagaattacaaaaactggattttcaggtataggaggtgctgatggaatctcccttttcacagttataatcgaactctcatcagaaaataatgaactcatatcctcaacaaccaaatccagggattgcatgtctttatttactactgataaatgattgttatcctacaaaagtcaaaataaacaaacaaaacctaattttaaaagacaaaaaggaaaaagagaaaagtaaaattttgctacaatatactaaatgattttaaatcatgtaattctcacctcacaattttcttcgtttgctttgggttccactgtcatcgagttattttcttcttcaataggtttattctcgatcatcatagagttctcatcctaacagaaatgcacaaacgtattcaagaacgactcacttcattttctttggcaaattttcaaaaggggaagagggaagtaatttcatacccggtctaatcccatttcaatttcttcttgtggattaggaacatcgggtacggatacatgcgtggtttctaaatcataagcttggctgaaaggaatccagtacaacctatagactcggctcgaaccgccgattctcagagagtctccctccttcagctcaactcgaacacatggatcaatcttcttctccgcaacccaagtcccatgaactaaaaagcaaaacccattctatcaagaaccataagagccctaaatacgaaaagagagaagaaattaaagatccttaccggacgataaatcgattacagagagcttctgtaaggatgggttggaaagaatctggaggtggaatctgctgatactgggatgagtcaacatgatgttgcaatcagggtgtcgtccgacgattagtatttcatcgtgttcttgggtcgggatttggggaatgttattgttgacgatgaagatgttctttagaatgactccgttcttcaagacagtgaagactgggatttttggctcttgattatggcttagtttgcattcgttcgtggcagccattgtaagctttgcacaaacagaaagaaagaaaggtttgggagtgtccagtaaccgggggttctcaatatatattttatatatatatatatatatatatatagagagagagagagagaggta

SEQ ID NO: 185497 - DNA, 5088 bp, Cannabis indica
ctacggattcacatttgtagttagagtttttgtccgatgagatttgcttttgttattttctacttattagctaagtagttataatagattatatatttttgtcaggtacgtcataattctggtaaagctgggccttcattgcccactccaaatgttcctaagcagccattacctaggaggatcatgtttctgttgatcaactcaatacgtatgaggcgcatccattgcccaaggttaaaaaggatgtgcaagtctctccagcacctcctgcaagtcaaacgcacaagccgtctggtcttcaatgactggcatttctatgccaactccattccatccaccccacgtttccatgcaatttggtggacccaaccaacagattcaatctcaggttgtgccatccaatcctcttcaaatgccattgcctttgccattacaaatgggaagtgctcctccagtgcaggcaccacctatgtttgtacctggtctacaaggacacccaatgcaacatcagggaatgatgcatcaagcacagaacatgagtttcacatctcaaatggctccgatgcaacaacagttgagcaacatgggcatcattgctccacaatactctcctcagtctggggggaaatatagtgctcctcgtaaaactactgttaagattactaacccaaagacacatgaagaggttaggtttgacaaacgttcggatggttatttagatggtggatcatctggtctgaggtctcatcctaatgttccacctcaatctcagccagttcaaccttttccaggctcccataatcataccatcaattattactcatcttcctataattattttccaactagtggccaaatcccacctagttctcaggcaccaagatttaactatccaggaagccaggctccccagagtgtaacgattatgactccatcagcactgcctgttaataaatctggtacccatatgcatggaatttcggaaccatcaaacctagaacatacacgtgatgcacacagtttaatctcgtccgtgccaccaggaacgacacatgtgacagttaaacccagtgctggatcttttggagagaaggtactggtagagacagtatcaagtaattcaaccatagttgagaaatctgaaatgcccaaacctttaagggtgtcagctgaagtgagcatttctcagtctcctagaaattctgagatttctacagataggtctttacatcaaccaaaatctggcagtgacgttattgtatcaaaagtggcagtggtgactgattcatctactgctatgcctgctgctgtcactgttgaatgcaaggatgacgatgctgcatcagttaatcatgatactactgctgtagaaagggctgactccagcagcaaagaaactcttagcaggtcgaattcaattaaagatgagcagaagaaagaattgagagaaggattttctcagggccaggtatagttgtcagatatttgttttatttatatgatccactttccttctctatatgtatctctttcgcttctattttccactcacaagaattatgtatatatttgttttataattctaaattggggtctgttgtattttcttggcatggatttactcttaaataataggttagtgggcaatctctttctgtgtcaagcttgccttctcagacttcagaacgcaatctatcattggaaagtggtgcatcagaaattatcgagtctaatcaaactcttacttctctggtgaataataacgatgtttcagaagcaactgaggaatcactattaactcctagggttgacactactgatccttctgtaacaaaggccgagattatagaaagcagttcaagtatttcagctgaaatttctggtacggagactgctgttgataaatcaggttctgttataattgaggaagaaaaagcagaaacaactttgcctgtggagtcagctaaacaagttaggcaggaattggacccagaagaaacttgtaaaagcattgatatatcaccattagaaagttctggagttttgatggatagatcagggggtattagtgttgaagttgtcgaaagttctgctgagatttcaactagtgttgataccacttctagtagaggtgatagcatcagtaatgaagtttctttacaaaattctggagtggagcagtcccaagctcaggctattgagtctgcaaaacctgaaggtggaagtatggagagtgtttgtgcgggaagtgtggaaaaccttgttggtgctgaggtttcagttttaggagcttctaaggataggtccacttcagaattgagtaggacaaagagtactattgcaagagggaagaagaaacggaaagagttacttcagaaggcagatgctgctgggacaacatctgatctttataatgcgtacaagggccctgaagaaaagaaggaaagtgttgtggattctgaaggcacttctagcagcacaaattttaaccaggttactgttgatgaacctgctgaaaatgttgctcttgttgaaaaagatgcaggggctaaatctgagcctgatgactgggaagatgctgctgatatttccaaaccaaagctggaaactgtggataatggcgaacatgcacagcctgacaaagatgaaaacaagaatacagtaaaaaagtattccagagattttctcttaaaatatgctgaccagtttactgatgttccaaaggattttaaaattgcagctgatatatcagatttgctactgagtaatgtcgcatctcatcttgagcgcaattcgcattctagtccaggaagaattgttgataggcctggtgcacctcgactggaacgccgtggcagtggaattatggaggatgaccgatggaataaagtgccaagtccttatggggctggacgtgatttgcgcttggacatgggttttgttcataatgctggttttcgtccagtaacaggtcaggtagcgaattttggtgttttgaggaatccaagaggtggacaggcacctgttcagtttgcaccaattggagggatcctttctggtcctatgcagtcattagggcctcagggggcaatgcaaagaaacagtcctgattctgaacggtggcagcgatccaccaatttccatcagaggggtttaattccttctccacaaactcagttagtgacaatgcataaaactgagaagaagtatgaagtgggcaaggttacagatgaagaacaggccaagcaaaggcagttgaagggtatattgaacaagctaactccccagaattttgaaaaactgtttgagcaagtaaaagctgttaatattgataatgctggcacacttcgcggtgttattgcacagatctttgacaaagctcttatggagcctactttctgtgagatgtatgccaacttttgtgctcacctttctggagagttgcctgattttagtgaagatgatgagaagattacttttaagagattacttctgaataagtgccaggaggaatttgagaggggagaaagagagcaagaggaagccaacaaagctgatgaggagggcgaggaaaaaatatctgacgaggaaagagaagagaagaggatcaaggcaaggagacggatgttaggtaatatcaggttgattggggagctgtacaagaagaaaatgttgactgaaagaataatgcatgagtgcattaaaaaactgttgggacaacaagagactcctgatgaagaagatcttgaagctttatgtaagctgatgagcacaattggggagatcattgaccatccaaaagccaaggagcatatggatgcatattttgattggatgaaaactttatcaaataatatgaaactatcatctagggttagattcatgctgaaggatgcaattgatcttagaaagaataaatggcagcagaggaggaaagttgaagggccaaagaagattgaggaagtgcacagagatgctgctcaagaacgacatgcacaaacgagtaggctcagccgtggtccaagcattaatacaccaagaagggggccttctatggactatggttcaagagggccatctatgctgtcttctccaagttctcagctaggtagcttccgcgcaatgccaggcccggttcgtggtttcggcaatagtcaggatgttcgagctgatgagagaccgtcttttgaggccagggccctgtcagttcccttgactcagagaactattagtgatgaagctattaccttgggccctcaaggtggtctagctagaggaatgtctattagaggaacacctttgtcatctgcatcaatggctgatgttgcacccaacagtggggactctagaagagtggcagctggtataaatggttatggttctgtctcagaccggggttacggtcctattagtgaccacatcccaagatttatgcctgataggttttcaggacaatctgcttatgatcagtcaagcgcgcaagagcgaaatattaattatagtggtagagatatcagaaatacagatgcttttgacaggtctattccaaattcaccacctacacgtgggcaggcaacaactcccgcccagagtaatcccgcagagaagacattgcctgaagaacatctgcgcgagaagtcaaggacagctattaaagaattttacaggtttgcctatctgctgtgcgtgctttttttttatttatttatttttattttattattattattatcattttctgcgtttcagtacaatcatcagctattttttttttttgataacataatcatcagctaattgaatgtgctaacagatcattttttgtgtactcttgtaacttcttttttgggtactagctcattgtgactatcattaggtagaatggcctctgccagctgtttgataataatgaaaactagttttgaaaacatgcaaattgataagcctatattaactggtgtggtactgaaactaatgctattgcccaatttgagtgttctcatctttttgtatggtacacctaaagcagcattttattaatagttaactctacttgggtcatatttattttctcagttaatattttga

SEQ ID NO: 185498 - DNA, 2287 bp, Cannabis indica
cagtttaaaaaacaagtgaagaaatataaacagaagcaaaaactcatttgacttgccagtttggtaagctactcctcatcactcactcactcccctcccctcactcactcactcacctcgtcactccaattttatttatttattaaataaaggcaactcaaaatcttaaaataataataataaataacatttaatatgtctaattatacataaaaatttcatacaattacaaacaacaccccaattaaaaaatcactacttttcaaaccacccacttcccctaaaaaaattgtttcttttttttttttctatttggttttttaaatttaattttcaatgggtcatgtattttgactggtacccacaaattatggggaatttggggtataacacaccaaatcattactcttacttacttttgtctcacaaaagctaagacgaccctcttctcttttcttctttctcatttcttcttttgggttttttttttcttttctttcaattaagcttatgacttggtttgtaatatctcattttctttaatgaaaaattaaatagaaaatattcttccctttttggcttgcattccctcttaagaaatatcattagggttttcttctgaacttgtaattgagatcaaatcaaatcaatgctgggttttttcttttgtagtttaaagtttgaaaagtagaggaattttggaaaatggggttgagagaagaaatgggtcaatgagagttggtgttgtggctgtttggttggtgagaaaatggggtgtgtgtttgggaaaacggcgaaaccggtagggggagttggaggaggagagagggagagaagaaagcaggaaagtgatgaagttaaagttgaggttgaggaggttgaaacgagtcatcaagtggtgggagtgagtcagaacggtagtgggaatcgccaagagaatgagaggaaagaggagacgagtgtgaaacccaagggtgagaaaaggcgttcatcgaggccgaatccgaggttgagtaatcctcctaagcacgttcatggtgaacaggtcgccgccgggtggccctcttggctctccgccgtcgccggtgaagctatcaatggctggactcctcgacgagctgacacttttgagaagctcgataaggtaactgacccttgttcggaaaacgtgttcaggttgatggggtttttcttaatttggtatgtttcttttttgtttactgtgtttttcttttgtttggtagctgagacaatgtaatgggaaagaaaaaggattttccagaatcagaatcagaaaaatggaatctgggattttgttttctatttcaggctctttagtaaccatgaactaaatttagaaagatggtttttagggtcatttagaaattgactttaggagctgaaattaaaactatgtacatatttttgttattttgccttttattttagatttttccttttggaatttgaatggcttagttctttttttttttttattttcttaatcagattgggcaaggtacttacagcaatgtttacaaagccagggatacattgacaggaaaagttgttgctcttaagaaagttaggtttgataatttggagcccgagagtgtaaaatttatggccagggagattctcattttgcgtcgattggatcatcccaatgtggtaaaattggaaggcttagtgacatcgagaatgtcgtgtagtttgtatcttgtttttcagtacatggagcatgatttggcaggacttgctgcaagtccaggaatcaagttcacagagtcacaggtattgcagcagttaccgttcttgcttttaatgtgtgaaactgagagttagacactaactaccttgagttagttttcgtctgatgataaagctggctctggctatcattttctcagtcttttgtaatatatatggtttcacaggtcaaatgctatatgcaccagctattatcaggacttgagcattgtcacaatcgtcatgtgttgcatcgtgatattaaagggtcgaatcttcttattgacaatggtggagtcttgaagattgctgattttggattggcttcattttttgatcctaataacaagcagcccatgactagtcgggttgttactctgtggtatagacctccagagcttcttctcggtgccactgattacagtgtaggtgtggacctatggagtgctggctgtattttggctgaattattggcaggaaagcctatcatgcctggtcgaacagaagtaagttttgatttttcaaaagatttagtatg

SEQ ID NO: 185499 - DNA, 21526 bp, Cannabis indica
aaaataatttccaacacttggtatcatcgttggcttttgccacatgcattaatcagttatatttggacaaatgggcccatggtccatcctgacttcgtataactccatttgtgacattttgaatttttttagtaacggagcctctatgatccgtctaacatagggttctggatcttcctcctccaagttagagatggcgttgctttttttccttacaagcatggtaagggcagttattttcccttccaaacgcttggtatcactatctgggagctcacgcctgcaaatctcgtctttaatatggttctaaagatcatttttgtgaggcctcgctctttggcctcaggctttttctcgttttgtgtttaggcagttacggagatctatagtggaccaactatcttcaggagaaattacctctattccctcgtcttggtttatagaactgctagggcggtctttccatcgttgaacgacaggccttggtaccagaccaccacgcctaacgttatggtcaaccttgactcgtgaattagaatggcgtcttagccttaaggcaggggtggccttcttttttttgcagaggttggttgactgcattttggttagtcctaagaatagtgggagtagtctttttttggggttcacctgtaacacctttccctttgtcctttgcaggagaagaaggttcgacatcaactgggtttaccttttttgtggggttattttccttaggggcaggccttctggagtgctctcctcaaaaatttcctcatgggccttgaatctagcctgtagccacgtgacgagagatcctcttgtgctactaatttttgctgaattattgcaagtttttcagccatttgatatacatcaggatctttcacataataatgtttatcatacccatctttaatctcttcatcgtctctgttgtcatcatcatcatcgttttttcctcagggtctttttctcggtcattcgtcttgtcttcgtcgatggagttctcatcgacaaatttctcctgatgttgggctttcttgcctcgatagccaccaacttttaacgtttccttgtctctcacagtgctcagctaggcgtgcattggggcaggtggattaacatcctccatgacggtgtcaaggccatgagtggtaggcttagtgacaacattttcggtagtcaccattattacagatatattttggcttaaagtatttccttaactctcaatgaaagtaccaaaatatttactgagattttcaaaaactcaatatattaacgagaactaagaaaatgaatcaaatagatgaaaaaagaaaatggagatttttatgtggttcgagtgttaatgaatcctagtccacgagtcagttgtattaggttgaaaagccttgaagtattacaatggtattttttacaaacttaaaaccctaggtttttgctatagtatttgagtaataaatttctccccctttgcatgaatgtatcatgtagtatttataggctaagatctagttatgaatatacccgcgaccttataaggtttgcgtgcaacatgacctattaatggggtaaatacataaaatacactgatattggccccacggactgaggcctagcccaggggcagttatgctccatataacagaggaccacttgaggtcgatagatgtcgtgtgtgcaccgcctttacatattgtagtgtcataatagtggtcgtagtacaaaagagatgtttcttttggtggtacgcgcactctcacggtctgacatagaggacaactccctaattttgtgggattcagtgtcagaggattgtcgcgtcagcttcagcctggctttcggggcgtctcttggggaacccttctggatgtatcccatacgctcatcaggagggtcttgactgcttctttttaagtggggcgaggcacccttctggatctaaagacatatctggttctgggcgtatatttcctgtatctcggatggttgagagactcatctttccgtatatatagtcctagtctattatcttgttgggcttttgagtgggtcttaatcaattaattttgtattaaaaataccacatattttcaatccagaatcatgaataatagatacatttaagtaatttatttttatttaaaacagaccattgttctaggtttattattccaatatttaaaattatcatactatttggtattatatttttcacgtgttactatatatacttttaatgttaaatttgtgcctctttttgagtgaaaccatgacaaattattgagtaattttagagggtgaattattaactaatcagaattggttacatataacaatatagtatatgattttgggtatattatttttgtactaacaaatatgttattatttttatatatataggtgtagcaataatatccttatctgccttgcaaaacatttctataaacaccatatatatgtcccctaaaaaaacactaatcagatattttaaaataatattttaccttgaaatatccgttctcaaatgcattgtaggtatttattttggaagcaaaaagaatgttgataattttgtaataatttccaaataataataataataatactagacatatacttaaatatgtattttgtagtaattgcacgaatcaaaggagattaaatgaaccctatccaatttttttaaaaaaattcttttatacccactttaaaatgacaattaactaaataaccccataataaatttactatgacttttcctgaaaaaaaaaatcaggtttttacatgatctttacaaataaaaaaatgttaagggacgaagtgatatatcgctattggttcaattcaatatcgagttctacacattttaatttaataaataatataaaaaactgttaatcactcacaacacgctatatcggtatagtattaaaaccttaagatgctcaataacaatactttgagtttaattagctgctgtttaatatgacctcctttattatttttatcatattcttgttatgcattgggaaaaatcaaccaacacataattacatacatatatttctctagtctacaaaaaattgaagagcttgttcatgttcaataatacattaaaaattgctaagaaacaccttaaagtactaaacaccatacaagatgacatattgttattagttcactttaatattgaatttcatacattttaatttaataaattatataaaaaactgctaaccaattatacagtgtcatgtcaatatgatattgagcactttaaggtataaaatgtaatgctcattacaataatatcactacaaaatggtaatatcttctctttgaattgttgatggtactacaggtggcttcatagggttgtttataataactatgtctttaaccattggactctgcaaacagccttcttccccaacaagaatggaagggctagaaatgcttaattgaatcgctctgtcatcgccatcttgtaaaggcgagacagcagcacgctggcggaacttattgtccaccatgtcataatgattcgcagttcgaaattcttgagcaagagaacaccaacaacagaaaagccactgagcacaatctgtaactgcagggttaccacaacacaagcgattcgacggtaagttaaatttcttcctcatttggattctccagaaaccgccatagagtaaaccaaacacgcacagcacaataccggttacaccaagagcttcccttattgtgacattatcaaagtgagtggcagccaagccgaagatcaacaatggagctgtgcagaagaggaaaaaagttgcaatatgaacatacatgttaccaaatccaagtctttccatgttatatccaaacacacaaaaaccgcataacaaatagagatgtgtcattgaaacaccatcattggttaaatcaagtaacccccctttccattcaggctcattctctaaagggattaggcttgagctctttaactgaggagcaccattggtgagtttttgatcctgtgcttcttcatcgaattcgaaattatactcctttccaagaggacttacaatacagtaaacacctgcaattgcttgggctgccattgctataacaaggcagataacaacacctatattaggcctttcaaattttttgtatcctaagttgagaccacataaggcatattgagcaaagcaattcacatgaagtagtacaataacaaccagcatatgagccctttcatgaggcttataagtaccatttttgctgtaaatctttctgagcattgatacatcctttggtttccacctacacagaagaacaaggtggtggaaacgctttgggtgttggtacaaactcatgagagtaaaaagagcattgatgatttgattactgacctcgaaccaagcatctctttcggatttcttagtcaggacattgtttaacattcctgtcattacgagaaaaagaattgctcctgagatagcaacacaggtaatccataaaagaagggccatattcagagggttcttgatccatattttgctgcatttcttcaaagtttcccaatcaactttatgagaagcaatccgattgaaatgtcctctaaaacccgagatttcttctctttcatctgcaattttcaggaacttgggtgatggagaaactagactatctggaactgttgtcaagtcacccccattcatggttgaagtaactgaatcagtacttcaaattgcaataaattttaagcccaaaaagctcaaaaccactgcagttttcttaatagggcttcttaatattgacagctttactatcattcaagaaaaaaatccaaaagccctatccaattgacaatttctccagaccttcaaaacctgccaaatttaaggaataaaaacttaatattttagagtctcacctcatcttttgctgataaccatgtgaagctactctttaatctcaacacgaattacaaggaacttctcatgcaataatctaaaaatataatgatcaaacacaatactcattcataaatagaattcttttttgacaattcagagcaaacaaccaaataaaagccaagactataatattaagaaaggaaaatgcttttcaattacccagagaaaaaaagtattacccatcttatgtttaatccaaattatacattaaattaacagttaaaggcaagttagaaagaagaaaaaaaacccagaaagtggaagtgtcataaaaatggagagaagaattacctacgtcaggggttagagccatggttgcttggcatggcataagggacagaagaaataataattaataatattaataaaagttggccgtgcctttcaaagtttgaagctttcgtttttgtatcatctatgtagaagaacgtttgaagatttttttttttacttgtaaaaaagaaaagtaataataataaaatataatagacgttggaatagtaaagacaccttttcaagactttgtcgtttgttgtgttttgaaaagatgtaccgttaataagagactattcccatttcttttgttctggaatcacacccttattctttgatttgagagttgagaccccacttccaaattttcaaatagttcaatttcaagaattgagaagtgctcctttcaactttggctttctttctaaataaaataatagacagaatgtcaatgaaattggttacatgaactttacataaaaaacaaaatgctaatagaaaaaattattatttagtaaacttaatagtttggtaaaaagttccaaacaaacctgaggaatgattatggtggataataatccttgctctccataatctgctcatcttctttgctggtaatttttcgagtccctttcgttttggtcttgtgctgttggggtggttcttgcatttggttccttttttccaaataaaagtaaaaacatgtcacgtacgtgacaaatttaatgtaagagtactgtgactaaaaagaaaaggaaagtaagcatattaaatataatcacacataacctgagaaacaaaagaaattacagcttttgtttccaccacaagaagcatcagcaatgtctcttttattatactaaacatattccaagtgccccttgttttgtttctaaaaggggtcactttcattccaaagaaagacacagaatcaaatttgagccattacataagaaaaactttaaaatattgagtacaaaatatgaatgactgcttttcttcttaacataatttaatggtaacaacggacataacaacatatgaacaattttttttccaactagagggtaaaatattgttgttgttattatttgaaactataattacataacagagaatacaaaagaaaaaacaaatggtaactgataaattcagaagaatacagatagaaaagcatcctggagaagcaatagcggaactggtacgtttacaattacaaagacctctttgaacccaaatcaagtagtgtacgaaagaatttgtgaggatacattggaggttcctccgataatgcctgaaatacaacaaaacataatatgttcaagcaattagaactgacaatagtttttgtaatgtttctgcagcatttggatggattttcacccgaagtccatttgaattatcaaacaatcacccccacaaaatagaagcctaaaaatgcaagagatccgaattgtacctgatgaatcagaacagtagaaggagtcattccaggaacagtattgacttctataatcaacacctgcataaaatgaaattggaaaagagtgaagtgcaaattaacttggcggtgttagatatattgtttgaccttgtgtgaatttggtatctcatacactaccaaatgaaccaacaagagagatttattaaggtggatgttaatgcacagactaatttgtgcatatattagttttataggagacaaagcaattctttagccccaaagtgaggactttaagaaagaaagaaattaagaaaacaaaaacaaaaaatctgctaactcttgtctataggaaatatttaaatgtaagaggaaagtatacctctccactgtctgcatttacaaatgcatcgattcgtgaaaatccttctagttgcagtgtgtttgcaattagttcaatacgctgtttacatctcgttaatgcctcatcgctaattcatggaggaaaaggagcagaagattacaaaatgaggagagaaatgtaccacacatttgaaggaagaaaagattaaggacaaataaataaaacccactgcggtagtagtttttagatgagaataaccaatacttcaaccgaacatatagacatcttacctcaaaacaaattagtccaaaaacacagatgagaatgagctctaaatcacagcttcaatacaatgttaatgcatgcatatatgtttctaaaatgtatttgaaaaaatcatctctattgcttccctccctccccaagaaaagaaaaggaagggaaaagcatctaatcatcaatccacttaacaattattcatagaaatatattactattaaatatataaaaaaaaacatatgtatatatgtttcctagggaatagggatttcataaacctgataatggataacggaggtggagtcagattgatgccagttccacctgtaaaaaagcataatttgaagttctcatttaaaagtttaatacacaagggattattacaacaatggtccctattcttttaactgatgaaatggacttcagaacttaggacctagctatagtaaagggtaaaaaataataataagaaaaaaatcattgcagtaacatttttcgtatataatgcttacaaagtggaagattggaagacctattcactttttgtggtttagccaaatattatatcatcacagaaatacttttttttttcttttattagtatcacagaaatacttatgtacaagagatgtttgcttaaaactagaatatctagacaaagcaagctggtaatcattgctaataacatttagccttgaacgagaatatccttaaaattgaaaatcaattacgattaaaatttaccttgaaatttctcctccagtgataaaatatcaccactttccttaacagtgatactaggactcagagaacgcatagatccacattttcctataacaccaacagttacttccacccatctactctgtcctttccacttgagtcggtgtggatattcatcagtagatttagatgaaatgattatctcatcagtctcaataaaaggttcaaagatcaagagttctggaggaggatttggcatctcaatcgtcccgtgagcctgtaaatttatcatataagaaacagcataaattgaaagaatgagcaggtgagttacatagtccaaataacatttactatagcctttcaaagataattgaggaaaccaattcattatgctatgagatggtgaatgatttttaactctggtatcaaaagctataaattacgctaaagtcagcaagttatataaacatatctatacctttgacaaactatttggaggaatccttaaaaggctctccctcaatacatctatatacactgctaggtcttctgcacagctgcagtaacaaaacattagttgaggagggtccaaacaaattaattatagtcaaacctttttatgagatgaacacagctgagtttacctgaattcctaccatcactagaaacaataaactgttttaaaatatgaataaggacctaccataaccttgcaacccctgtcgagcatccatctcttgctggtttaacacatagtgttttgcaatgaagctttgtggtcaaatcatgccacatttctagcctagggcttctcagaagttcctcttttcttcgtacctctttatttatggtaagaactccagactttgaaagctggttatgacaaaagattacaatgcttcaatttgtagaaaaatatgcaagctatgtctagaacaaagtatgcatctgtgtgcaacattatatgtcttgatatacaagaaaagaaaaattatcatacatggctaagagaaagagatgttgcaactttatccatacaagtctttgaagctatcactcccggaccttcatttaggaaggaaaaaacatagtgaaattagatcagaaatattcaaaaccaaggcaatgaccaagttttgcaaagattatacctgtataaggaaccccctcatcctccagcaatgattgaagcctaccatcttcaccaatgcctccatgcactgcataatttgattttatttaaggaaaagtagaaacttcatgactttgtaacttaaactgagattttaatcaaatgaggaagtcctgtagtcctaaaaaaagttatgaaaaaactacacaactacaactggtacttgtgtctgaagctaggctcgtatgtatcatgtgtgtgtatttttcttttaaatctattcattgcattatttgttgttccatgcttggaaggagggaaaacctgcaatgaacactgtagcctgaacttccttggcatgtttgatccactgctccaaagaaaatctcactggaggttcatcactaatatcaaaccctttaaaccagctatgagccttaagaccttccataagatctttcatcactttgttacgtaggtgagatgtcaatgcagcccgggctggttcaattgcttctatgcatgcaccaagaacttcctctgttgtgtgtcttagaacgagagagtaactgtacacaaaaacaaaagtcataatgagagatgaagctattgcatcctttcgtatctcagaagtttatttcatgatgccccattatcagctttacatatttttacatgtcgacattcttttcatatgataaaagataagtatttgaatcactgaatctacaaagaaaatgaccaagcaatcaataaacaacaatgctgaaatatattgtcatgtaaagatgcatgcaacaacaatggaaaatcactaacgtatctatttcaagaaattaatcagttttactttgctcaatacaagtcctttttggtggagtctagtacgagaattcaaatgaaaaaattattgaaaagggacaaacacaaacaataaacatcattcaaacagataacattatataactagtaatttttatgatttttttatttatctattcaagagaaagaggaacatacggaagtgaccaaactgtcctggatcttacttcagcatccttttcgtttgaatctacaatagctgaatatccagaagtaggagctagcaaacacggaatcacttcaagctacagccaaatgacagattgacgatattctacatttagatatcaaaattgatagaataaacaacttcaattatctataaggtaccaaaaactgatgtgcaatgtatttaaaagaacttgattatcagcaaccaaaaaaaaagaatattttgtctaaatatctgaaatggcgaattcctaaaatgcttgaccatttgctttatgaccgttcttctacagcaaggaatgataaaatccatcacaggtacatcttcccagattcaatatcaatgtttttaaaataatgaagaattgcaacaaaaaaaaacaaaattaaactgcagaaaatatcatggattggcagtcccaaaacatcaactaaaagaagaatctctgaaaaaatatatttgagtactgcacatccagaatgaaacttcgcaacttcatgaaatacaaataaatactttctttactttccctgtttttctatttcctactgagtcagcgagatatattacttacatcatcaaaagcttgcaaattgagccaaacatttgtaccactcataagagatacttgtcgctctgatgtgtctcctccaaaaatgacaaatactttgcgagcaccttcacgttttggaagcggctcgctaagcagggatggttttgttcttttaggcaaaagatgagatgatacacttttgaatgatgcaagttcaagaaaccgtgagcaggcacggtaaatgatgccccgaagaatgtttgaatgggaaaacccaacctgaatacagaagagtttttcaaatgcaaattcataggcacaaaatacatggagttacaaggataaaaagtacagaaagcctttcaagcaaacagctatgtgatataagaacttcataatatttccaattgagattcatatcaaggattaacaacctaagtccttttcagtcttccatacaaagaaaaaaatgacatttttaagtaccttggaagcttgttgaaataaaaagctggtctgctccattccactaatctgaagcacataaaaaaataaagaagaaagtatttaaaggaaatcttctgagagaaaaaatgaaaccagctataataactaacaactatcttaccaggtttatgtcagtaaatactattgtaccgaatttagtcctcccaaaattactctctgaaaatgatgatacgttaacagaattaggcaaaaaccacccatcaattcgtgcaaaatcacgtaaacctagttgttggaacaaaagagatgctccctctctaatagtttcaataacatcaataggaaaacgaggtggcgtatgataagcaacctgtttgatatacaagaatgagatttattcactgcaaaaatatatagctgacaacatgtgcagcctttaatagatagactacaaccatgatgttattattatgcagtctacgcaggtaagagtgtagaaatgcatgcctatatgtgactaaaaaattaaagatattttgctctacctgctgtgttgggagatacttcctcctatagttgaaaattgcatccttctctctcacatcaacttcaccatgaaattgaagctcgaccttcaaattgagaacatattacagaaatataaatcatatgaagctaaaacgtaattgtttttgccaagtttccacttttcttcaataagagagaggagattgagaaagagagagattatggtatcgtttgtatactgttttttcgtaagcatcgaagatttagttttagtaataaaattgagcacacatacctcagttggcagaagtacaacaggttggcaatctaaaccagacccaacatcaagaacaattgctgtaaattcactccctccttcaagaaatacttcaattaggactttattatcaattccctgccaaaaatgatcaaattttgatataaataaattttctcttaaaattttgctatcacatccattgcatacaatcattctgcaatttcattaacaatatttaaagtttttatagaaaacaccagaaaagtaactgttatgaaatgagagtacctctgatataattgcctcagccttcttaagagaatcatccacaccatatgcaactttaacaccaaggcttgaacctgctcgtgctggttttacctggaataaaaccatagagatggccaaatctgaacatgttaaacagttatatcattggtgctacctttcaatcacaacagtaaaatgtgcattaccacaacttttcctgaattagcgtccagctgatttcttgcaaaccactctgacagttcatattcatttgcttcattgttctgcattgtatgcaaaattgtaacaaatcaactaagtagagaataaattaagctcaagaagtacagcataaatatcacaaaattgttataattattgaaatactattcagttgagatggtacctgcactaaatagctaggtactgtgacgaagccttgtctgctgagttccaatgaggcattgtactgcaataggttgatacaagaaatgttacaaattatggtacaagtatcagtagagtacaatcaagggagttcttgtaggtaacacaaattgtatctgagactctttatgttagaaagaccaaaggctcgtgccaacaaattgacaaatttaacattgcaaaagtatatttataaggtatatcagtacactagctatcgaatatattatgaaatgttgatatattcagtgtcattccagggtaatggtagagtacaatcagctcacagaaattacaggtaaagtacggcttggtgctaatcattttgaacaaacgaggaaggtagcatgcacccaaattaagcatactagtaattgactcaaaatgtaccttagtaggacatagtataatatatatttgtcaaaaattttagtgtagccttctagtagatagcagaaatatcaaaacatggttcgtatttataaatatactatctcaatggagctataaggaacttaaacacgctaagataaaatccacttaaatacaagaaaatcacatgttataacttgtaaggaaactaagtttaattataatatcaaagtcaatcttactttatcaaatgcctgacgacactcactcgaacctgtgccaacaaaaggaatattatatttttccagcaactcctggaacaaataagtcaaagcaataaaaacatatcctattaatttaaagttgtttcaaaagaatacaagagaaattttagacaaatataaaagaaaaaatgcgtatacttgaagatatatattgtaataaaaaataaatcaaatcaaaaaattatgctaagcaacacctgaatgccaccatcttcaccaaattgaccgtgtataacagggaacactatgtccacagaggcagctagatgttcagcaaaatcagacaaagactggaaaccctgggcaaggctgtggatgaaacaaattagcaaccttaaaatttctggttgtaaaaagattaaactttatagtcaagaaaacccatccatacctttcaagtttaaagtcaaaatctgatggagtgtttgagtatacctgaaatcaatacagaacaaaaataaaagaaacgctcaaatatcacaagaagaaattttcacaggtaaggtattgtcctacaaacacaaaaagataacttgagagcaacaaatgacaatctgtcaacctaatcgaattccaacaaagcccgagcaccggacacaaaacagattttaaactttcactagtcctactataggtaaaagttcaacaagcatagcatatatttagccgaaacaaaaactgatttttaaagcactaactgaaaagtatcaagaaaaggaaagccaaatgttcactgactgaattaggcaacagtacaatttcatctagaaggacaagaagtttcaacaaacagctaaacgccacaaattaaagctcaaagtctctagaatgtagtacatactaagtgtgaaccaaggacttagctagtaagctaaaaaagacaacataaaagagaagtactgaatgttcaatcaaatcaaacctgagcagatgatattgcatacgcattataatcacaatcaatgtagtagcaactgacatgcaaatcatcaccctgttacagaaaaaaacaaccaagaaacttcatattagtccaaatatgttttctcctctactttctttaaagccaaacaatactataaagacatggcatcattttcaaattcttaacaaacaactttccaagtaactttttctcttctctggtgtaaaactgtactaaagattatattcaacacgacataatattcaacttttaaattacaattaaagaaaaaagaaaaaacagagcaacacgaagattacctgtatgtgatcaataactgatctagctgaattaagagaaatccctcgctcagcagaaggaccaccgcaaacaactccaactctaagaactcctcctttctctttccattccccgtttctctccgccacttgatcatcaaccaccaccgaggaggcgcgtggaactcggacactaaccctagctatcggaaaagaaacatgtctgaattgagagtgatgagaggccaatctcaacaaaaccaagtcgtgaggaacatggtttccggagcgaggaagtacagcgaggccggaagagagtggtgcgatgatggaggagaaggacatggctgatcaaagaagaagaagaaaggtaaggaatgagattcagaggtttgtgtgagcttttctctctctcattttgtttttttgaaataaataataataagtaattaaataggcggacggcagagtgaggagtgggagttggaggagacaaaattttggagggagaatagaatagaatattagtgcgtgcgtcgttctggttggcggttggtcttttgtcttatcccttttatatgtaaaataataaataataaataatagagcattgctattggccaccagtggtgcctagcaccttctaaatgtgtcgacttgcaattggctagcgatactctataaaaattattatattaaactatatggtacccgatacttaattgcaccaatagcgatattaacacgtaggagggtgctaggcaccagtggtgccctttagcatttatctaaataataatatgatgatgctattgatttaacgtacgacgactcctacttttccttaaaataaataaataaatattattttagacattgtattttgtaaaagttgttaattagattttttgttttgttaaatggtaaaatgcatcatgtattttttaaaatagtacaaataagattttaaactgattttttgtcaaaataaaatttaataataattcgatctaaagttgttatgacaaaaatatttatattttctgtatctgttcgagttagttatattaaaaaaagttatcaaaaattaagctcaaggtcctatttttacaattttagaaaatagaggatctattttatcatttaacaaataaaaagtccaatcaatattttttgcaaaacacatggtttaaaatagtatttacccaaaaaaaaatatttgtaattgttactactctaataaaatataatggcggaaaaaatattttattttatgattctatttaactaaaaaaatattttaatattttacaccataccacacgatatgaatttaatctcaccctaaatttggtcgtgatcttagtctcgcacttggccccagatccagacctagttccgaaaaccaaactcaaatcttaaacccaaacccaggctcgaaacttaaaaaattacactaatttaactttattctatcaaggaaaaaaaagatgcacgacccaaaaaagtacattgacgtatctcttattatttcgatatttaagcaaaaaaaaaatgtagtctaacttttgttatgattatgtatatatatgttataattatataaaatatattataaaattttaaaaaattaaaataatttataatatataaaatagtctaattcacacatcatgacaaactatttaaacttagcaatttaaaaaatttaaatttttaaaattttataataaaaaatcttaaataattataatatattctcatgccaaaacaaaacaaataaataagtatcgaattttcctaactttattatttttttttgtttttaaaataattaaaaattcaattaattgtcattgtcacttagaaaatgatgtcatgttcatgtttacaaatttagttttgttctatttgtcctttttcggttttagtgtgtttattttatttgtattttgtggttgaccggtttagaatgtaagcaaatgaaatgaaaacaaacacatttatcttctaccaaaacaaacactcttctctgattggcctctcttaatcttaattacaaaatggaccaaactagttttattttaggatgaattaatttaactaataaacaatattattatgactatgacgtaagagcatcaaaatcgaggctagctcaagtagccataggaaggtgcatgtgtgttggagatcctgagttatgtattgtaatatataaacactttaaaaaaaaaaaaaacatcaaaattattggtctttaaaatgtgcgaatgaaaataatcttaaatcgttataactaattttacttattgttaaattcttcattaaaaaaaagccttgtcatcaaattgttctctctctcagctggagtgttgtaggtgttcttgtgtgctccgattgtgctttggctgagaaatttttctttgtggaggtctattgatctatggaggcgagcgagttgctctttctccagatcaataccttcacttttcgatatgaaagttattgtggcctagatgaggtgtgagctggcctcttagctctttttgagttttcagtattcactttgataaactctcaaacttatgttaaagttataattattgaaatgaaattagtgaagcattgccattggtaacactttgcaagaatgtgtgttatgtcaacaacaaaaactggattggtggaggattttactagactcaagtgaatcgaaccgacaatttgtactccttcccaaaatgatcgcgaccggaggtgctccggttgaaaaataccaaagaacccttttattcacattcaaaaccaaagctttacacacaataatcatttcaaggttatgaaacattgcagatgtataaagcattagcatataataccaagttaataatagtgtgatgtttatcaaaagaataaccaataggggcatcaatgaactaaatggctactacttaacattttttactattagtatgtacaaacccttgagcagcactcccaatctaagagagagtaattctaattcagaccaagtcatcttcttccatttctttggctttgagagcttcctttaccctcagcagaagcgtagtcttccacggatcctgcataagatctcagagtatttgcgattagagcaaccccggtaaactaaatgtggaaagggaaaactaaagaactctttcagcttcaagaagagatctcatttagtttttgttcacaatgaacttaagaacaccgagaactagcataaaagtaagaattgattttaagttttagtaagtaaaaacaaaaaataaatagctccctaagacaaatgtaagatatccttagccaacgagagaaggaaatcaacttccttgtgtttcttatacataaaacatcatttgagtttgactttaattagaaaaataatgatgtgatttcactaaaataaggttgcaaaggtaagagttcagaacagaaagatatgtaccagtggggtaatgctatcaaattccttgacagctgcagtgaaattttcaacattttcctcatcaattgcagaagctaaatcctgagatgtagaacaaaaaaaatgtatagctattattatacacaaggcaatgatcataagttggagtgaaacctttgcatagtataatgtatccactcagagagagagtttcatatatcttctacagaaaactttatagcccacatttagagtaaatgttactcgtaaatacttacagctaagagtttgtactcccgagttctagagaaagtgagatccaaatcctgcacagccaattcaggatctgttatgatataactctgacttgaatgttcaatcatacttacaaacaatgactaattagtaagtgcctgatatcgctccaatgcattcgttatggcaacaatgtcccctttacatagctggcaaagtcctgcattaagaagatgtcctctaacaccatacttcagcaagttattgttaagtgatgttttagctacctcttcatatatctggattgccttcggatacctgatgatgaaaataagaaatctcttagctctgactaaacacacttagcggaggactcttgtcttctaggacctcatgttttggagttttaagctgatattggaccacaccagaccagattgctatgcaagtaaaatcccttacaagttacaacaacaagtgccctttgtgtatgaaaacctaaccacctcttgagcttttggtcttttagccacagagagtataattttaacaaaccatcttactcttagcccaaaatccaaattaatatagagtataactatgtcttgtatgttctcttttaaaaaaataaaaaactatcttgtatttcaaatgtacaggcacatcatattctattaaataattattaatgttttacatgaattactaaataagagagtagtataggaggtcacaacatactgttcaacttgtgcagaaaactgtgctactttcaacttgcattggtttgcagtagttgctcctcctcccatttcgaaaaaatcggcagcccgttcaaaatataacattgccttttcattgtcttgctcaagctcatacatctcaccaatctcctaaaattccaagaaaaagaactatgtcagttgagagaatacaaagatatcatatactagaagcttgagtaattcatgaaagataaaacatatcaaaattgatatgtaactaaaaggaagagaaatgaaacaaaggaattaccttgcaatatctagcagccatactatctttgccattgtccatgaaaatgtttactgctttatccaagcatgagatagcagctgcaacatcccattaccaatgtgaagtgtgagcaacaaaccttaaatatctaaaaacttttgagtcaaagtgaaaatggtgaactgacacccctttgttttaaagacaacctactcttatacccaacaaaagtcattattttattttcaccaaaagggctaactttcaaatacaaatagaaatcctaatacattactcagattgacaaacacccaagtaaccaaatatcctttttcatattaataaaaactaagttattagtccaaaaattttgtcaaacaaaagcttaagtagctcctggggtactattatagtagtaattattttttaagtacttttaggtctttttcagtacacggataattttctaactttcgtttatgtgatataatataattacaagaacctccaaatttttagaaaattttgaataatttaaaataccgaaactagagaccatcatggctcgattgtggaggcttttactaagtgcgtggagggccgagtctcaccagaggtggtggggatcaaagaggagttaagctgaaacaaggtagaggtagagtcagattggctggttgctgtttaggccattaggagctctatttctatgacttccagttttggtctactggttaataattgatagtaaaatgttattagctgagacgatagatgataagataagataaattgtaatcttcgagtcagtacttaactccaaaataaaccaaaattctatttctcattccatatgcattaatctctaaccaattacatatttataggctctacatactacttacaaattactaataaacctctactgtaacactctccaatccttcaaaaacaccttctccttacgtactactcttagtgaaagcaccaaatgataggataaattgtactcttcaagtccgtacccaactccaaaataaatcaaaattctatttctcattccatatccattaatctctgaacaattatatatttataggatctaaatactacttccaaactaataaattataaacccctagtgtaaagagatcaacaaatagattggctcatgaatttgcaaggccctcctattcttacacattttattctaaaaaaaactatagatataatgattaaaaacaatcaccacataacaattctttcataaacaaatatatatttatatatatataaatatatatatatatatatataaatatgttcatgtagaaaggaagtaaagagttacctgtagttgaagtcttcttatagcattttgaagcctctataaaagcattggcagcctcatgtttgctatctacctaaaaattacataaaaattctacaaaatcaaaatcaatcaatagcataacatagctcaatcataattgatatattaaaaagagaaacaaaaattcaccttcaaataacaatcagacaatttgataaatactgaaccagctctatcccctgttttttgtgtcaatcaatacaatcaaatatgtatatataatacataaacagtagtaaaagatacatacaagacttggcgagcttgaagtgattagctgatttagcgtagagttcggcagcgtcttcgtacttggatgaggcgaataaaccccaggcgttgatcttcttctgggctttcttgagaaattcgtctcctttggctatgtgatctgccatttttccaaagctaaaagataatagaaaattcagacaaaagggaaaagaagaaccaaagaaagaaagtaagtaacgaactaaagatcttttcaatatggctttggatgattttcctctacatgcaaaaaccaaaagaaaaagggctttttagaaaatttattgggttaaagaaaaatatcatttttttattgggttaatgagaaatatcttctttttttaaaaaaaaaaaaaatacaaaataaataaacaagataaagtttaaccatggtcgttacatgtaatgttgtctgatataagtgtagataacataaataaaaatatctttaaattaggaa

SEQ ID NO: 185500 - DNA, 2881 bp, Cannabis indica
tttttttttgtattttattttttcataaaagattatgggatggcattaattttcttcaatttagaaaatgaaatcatctgtctttttctgtggtctataatttatataattaattatatgtctgttactgaatcagattccattccaagtagggttccttctttccttatataataatattacaaaagctatatatgtaagatttcaatgtagccctttcatttatggtctattcttcttaaatagaaactaagttaataataataataatgaattttgaaccctcatttttaactctttactatgattttgaaactgaaaagaataaaagaaacataattatggacaaaagaacaagccagacaaaacactctgttaggttatcattgtaaatggaaaagtggaggtgccaacaacaaaaaaatcacattatttattttcttcttattgtggaaagtttttatttttggaacttgtattaaaaatgtcttttttgtaaaaaggcatttgggaaattggtaatattgcaagagaaattgtttttagactgaaaacgacagcaacattcagtctgtcacacttgaaaacgacaaagaactcgatacccaaaaggggaatagtgccattcccataacagaacgtgtctagaagagaacttgccacaacaggtgaataattctgtaaaatagggcccctactgaagaagaaaaagaaaaaagaaaaaaagaaaaaagaaaagagaaaagtgggaatgtgactattatcaatacataatataatttgagtagaagaaagaaagaagagctatattgtcctattgctttttatccaaaacagttttatactactcccaagtcactcattgttctgaaaattggaattttactgtcatttttcacttttcttttttactttctcaccttgcttatagagttcatgcttgaattaaaatggtcaattttagttagtgttatgataggataggatagcatagcataggctggagctccattattggaatttggaagagactaaagaatggttcaaattgattggttaaaaaaaatttactgtgcttttttggtttttactgttatgactagttttggatgaggagggtaagtaaatggggtagtagtagtagtagtagtagtagccaagatagatgggacttatgcatggcataaatgaacctgatctgttccttggaattttaccctaaccccaccccacaaattttacttctattggttaggaaaaatggtaactagctttatagctaggttttactaattagtgttttttctccaaactattggtattttatttactattagatatattgaggtacttaataccacactcacactgatgctgttaacaattttttatataatttattaaattataatatatgacactccatatttaaataaaataataatagtatgtcacttttaaggcgcccctttagcatttttttttttttgcttatagttacattttgttttcctaataatatttgttaagttaaaatttttattttgtaagagtttattcatcataaaaaaaatatttgaacatatattataattactcctattaaatttatttattgtgtggtggcttttttattattttagtttatataattaaattaaaaaatatatatttaaataaattaaaaaatatatatttaattttttttaagtatcatattttgttttttttttttttgataaaaagtataatattttgtttagtggagctatagttcccataaagcaatgaatgagtttgtcctatgtaaaactcagtgatagtagtatgacatctcatatattgatactttttattaatttatttttttgtcactttagtgttttttttttttggtctattgttcataaaatttgtatatgtataggggtccttattgatagtttgaatgttggtttttagtagggtatccctcctacatttcttccattaaatttatctttctttcactttttcaataattgccatactagaacaatatacttttttgtttcatggaacacccttgtgacataattttctatgacaagtggaaaaaggagaattcaatcatatataagccattgcatggtttacatttatatatacataaaaaaattagttgaaatatatatttataaataaaatatttcagtgcattattgtaggagtttgtggactaattaaagtaatgttatcatgcaatatgtacttatttttattttattttcttcttcttttggggacatgaatggactattatatcattattcccttaattacatgattacatatagtcaacataaacccaccaaatattaagttgacttcttggcttgttgatttgtcattttgagtatatatgtatattaagatgtgtatttgcatgaattaattcaatgtagtatttagttattggggtgtgttcataagtttgaaaggaattgacaaattaaaactatttttatttatgataaagtgggcaaagaattgggtagtcaaagtattaggcgataatatctatttttgaagtcatataaataaatgtctaagactaagaaaataagtatcaacacattgaaaaaaagaggaaacaacacatgtagaaaataaatgtactcaccaacattttatcttctgaatgaaagttttttgaggtattacagccaaaaaaaaaatctcactaaaacgacatttaagaaaaacaaatgattttcatgaaaataacattgcgtttttatgcggaattctatttataaattgttattgcaattagcgctgcaacttaaattgtaacaaaaaatcaatcgtacaaaaatctcctattgtaactagtgctgca

SEQ ID NO: 185501 - DNA, 7360 bp, Cannabis indica
tttcaaatttcaacggcatgattttgagacatatgataaatagcaataaaactgaatacaatgtaaaagataataatagtatctaaaaaggtaaatggtaagatttcattctgagaacttaatcaaactaaagaaacgactacatctcacaaatgataatagtaatacctaacacactgtgggtaatttctaaaattatatcatttcaccaaaaatataataatcaaagcttaaaagacaaaaaaatctaatgatttacaaaccacaatcctactagagttcagtaaaaaaaatcagctatccaaatatcaactcagcatcaagtattttccaatcttctgttctcttaactctttctcaagtaaccggaagatcagcttcctcctgaacaccaccattgtttactgaagaaaaaatgttatatagaacaaggaaatcaacaccattgatcctccatccacatgcttcagttgctgtagaatgagccatattcaacaaggctattacaaagtccaaatcagaccaatctcacgttgtctcccgatgttaaaacaatcagattcaggttccggtaagctttgatatggttccattttcttcacaactgaaaatattaggtcctgatgctggagccatattgaaaccgttactcttaatagaaccagtagagctttcattcgagaatttagtaactgtttcttcagaaaaaacctcctgttgtagcatttttatttgtcttgaagatggcacatcacctttacagtacctgcgccacatatccctgtatgttgattcaaggccacgagcaaagttcggtccatcacacacaggagacttcgacataagatctcgtagactcatcctcaaatttgatagtgctgtaacatctgaagccagctgcagtgctaactgtacgtattcatcctcatttttggcaattaaatgttccagccctgaaatacaaatatacctaatcagaaaatgtatagagaacaatgctacttaaaaatgtataaaaagttgagcatgactacaatgatgggccaacactgaacaaaaacacaaaaactaaaaacatgtccccaggccattgtctaaattccacttcaccggctcaattggttaaatcattttgggaaaggctgaaaaatgccccaatataaaaaggcagcaacttcgcaccacatcagttaactaattcctaccataactggacctgaacataatgaatattgagcataataatctgttcatctggtcccaagatattggaggcttgtagaaaaaaatacaagacctttgagactttcctatattacaataggataaaaattaagaattcaatagattggagaactgctcaccaactttgctgagaagactcacgccaacattgtgagcatgtactgaaccagccattgtaacacatggaactcccatgtataaagactcgcatgttgtagttgttccagcatatggaaaagtatccagactatattgatgagaaataacaaaacaggagaatgagttagaacctctataggaaagccaagaaagagcatagaaacacaacctccccatttaataacaagaaacatttcagtccaaatagtttacatatttattgctacctctccaattatcaacacacactaatcatacggcacttaggctgaaactacaatcttaaaaatcaacaatatatttctacgaaatctcaaataatgtactgatagcataaaggtaatagtgaccatagtcatatgtaagaaagtaatttaaacttttacctgatgtccatcagagagtaggcttgcatatgatcgtggttgagtaaaattaaaggcaggagatcaatacgcaatgattccaaacccagctgctcaagtgtcgaaataaatctctgtctcacactatcgcagcaaaaaggcttacatttcaccacaaggcgagaattcggtaccgcacataatatccttgcccaaacttgtaatactttaggtgtaatctgattgagggaagaccattgaataaaaacttaataaaatacacataattttagaatacatatacttctaccagtacagaagatataagttctaaataaacacatccaatacctttgctaggttattaaagctaccaaatgtaatgaatccattggaaagagcaggagctggagatacagaaccagcttcaggagagggcatataacaaagaaagcaatccggtaatcgaactaactcctcaacatgcctgccatttataagagtattgtatttaagtacgataaatcatcaataaaccttctctagatcattaactatgctcaaattatgatacaatagcaacgaaaaaatcccttacttctgctttgtctcaggaggatctgcttgtgaatcagttattctgtaatcaattgttggcaaaccagtagtgtttgggtaaccaatccaagtaacctgaaaaacaggtaatagcaggtaaatattctctaacatacaatatgtgtgtgtttgtgtagtccaacagatcagctgtttaccataattgcatcatgtagaactaatgtaacatttacactctacaagagtgtagcaactcaaacataataattacgcagcataattccatataatccataaaataataatattcaaaccaagtcttaacataatttcataatgccttttatcctggttcctctttgacgggaacaagaggggagagagagagtattaaagtaacaaacaaggccttcaacataaagaataccaatatgtaaactaagtctaacttcattccataataccttttaaccttgttcttatttgactgaaacaaaaggagagaggaacaatagtgaaaggaataaacaaggcattccgattgacatacctgaagtggtgcaggacgacatgccattgttcccaacttattattagctgtatgaccagtaagttcaaccaagatatcgattttatcttctctgaccatgcttgcaacctttttctcatcaaccccatatatatccttccaaattcctcccttctttaagaccttttccctaaacctgatagtttttgcatctccctgtggcatatagaagtcaattctatagtaaaaatgaaacaaatataatgcaataataacattagcttctgaaaccacaatgtcttggaaacaaaagcttattgtttcaatttgtttgggtattgatcttctattttgtagtagtttgttgggaacacctagtcccccaattttgtacttcatttgctaatagagtaacagtttttcacatttatattgttatcaatcaattaacaaaggtagaaaaaagtacaagtacagattaattaaaactgtcaatagcaaacagcaaaataattttatatactagtgagtcaaaggaaaagttattttattttttctcaaaacttcctatagtaaagaagatgtctttaaacttataaatacaaccaacaaataagtgaaaatacaggtcgcgaaaatcacataagaaacacggggaacatagataagacgtattgaacatgataaataccttcacaactgctgaataaaccacaaccttgtagtttgcataattatgatgtgcaaggggagcttcaataaaatatgatacagaatgtgtgaaataatcaggagatatatatccaatcacaaggggccgttctggatcctttgggttgtcccatgaagtgtactgttgatacaatctcataaagcgcctaccccattccctgcaggataattttcaaagccaaacacctcaaacttctagtcactgtttaaaagtacattaacgacatatgctaccgtaaacctctaaagaagcatatgcccaccatattttgaagccccaatttgcaacgaaattcccagaacacatccacacacatatatatatatatatatatatataactttaatacatataagtagggacataatacacaaaacaaagaacaaaacctgtagatggaggcctatcacctatctagtttttatcttataaatatacacacataaattccaaataccttgtgaaaattattaaagatgtaatgaaatctaaaaggagctaaggtaaaaacctgtgagcatcatagagcttatcatcagttccttcatttatgtagttcaaggcaagcaaccgattctgcaagaagcaggttaataaatttaattatataagaaaacctatccagtaatggcagcttttagtattaaattaccgcactcaaatggaaagagtaaatcaacaataaagttcaacttttatagcactgaacaaatttgcagaagatgataccactttacaaaccatccagatgtttcagaaatcttaatagttaaacctaattcctaatgaattgtatgtgcacaatccaatacaatacagagtaaagatgcagcatgagatcccataaggtcctagagacctagacagatgacaagaccgcaccagtttccaggcaaggaagtgttcaatagggaaccacaacatattgaagtgcaataagttcaaatttgcaagaataaatcaacagaaaccaatacctggcctgcattacgagaatctggatcaatgctgaggcatcgttcataagcttcaacagccatagaaatattgcctgcatctctgtagagaacacctatagatgaagaaatagaaaataaaataaaatttatagcaaagaaagaaactgggcaggaagaagaaaactgaaacccatgttactattaccatgaattagcttccacacaacaagatataatctcaatcaagaagtgcaattaagtgtcaatgatgtattcctaattaaatccaaaagagcaatagggccctctcaccaaatctagagtgtctcaaattacctataggtatgataccacaacctcgacttacattaattcttatattcaaccagccaaaatatacttaatcaaggtccaaacttatagcacagtatggagagaaatgtaacaggaaataagtgaaaattcggaaaggcaaggaaaagatgaagacccaagttattatatgcttctgcataagaaggatttgcaacaatggctttctcaatcatgcttgcagcagcatccattttcccctgccaatagcaactaagtttatcagctaatggtgtcagatggtcatttagagtaacatcacaaaaaggatcgattacacaacctgaacagtgtagacaacaccgagattgttcagcgactgagaaaaatttggcttgattgacaaagccatctataagaaaaatttaaacatgtcagccactcaaattccagcaagagaaagaaaaaaactaaaactgcataaatgaataattgcctgataacactctactgctttgtcaaggttgtctctgtctttgtatatcactcctaaattgttacatgcctcaacacaatgaggattaaagtggaaagcaagctcatagaacacaacagcctgcagagaaaataattacagcacattttttacttacagaacttgacccatagaataagacagccaaaaatttagtcgataagttacttaccatgtcaaacttgagcatttcaccatatgcaacacccagattgtacatagcatccgcataatgccaattaaaggtcaaagctttcttgtagtagtttataccttgatcaatatctccctctaatttaacctaaacagtcatataactgaatccaaactcagatatacaaaagaaaaataattgcatatgacaataaaaggaaaaactaacaaggtcgtgtataggacatgaaccattataaagataaatcataagaataaatattagtgttatgaggctaaaaatataggagccatatgctttcaaactatcattcttgtaatgataaacaatcaacaggataaaatattaccttcgtacccaagtcagtcaaggctatagccatgttattttttgcaatctcaaagtttggtgacacagctaaacacctgataaagcataagaataagcaatcaataacaacatgtgcaagtgtagaccactcgatagggatactcagaaaaatagtaggttatacagcgttgcagcctacctatcataacatgcaatagctgtctccaactcgccgcgattcttataaattacccccatattgcaatatgcttcagcatacataggcctcactgaagcagccttctcatagtaagttagagcaacgtcaaattgcatcatttcagagtagacaacaccaagattgtaataagcaggctgcacttgtcacaaatttgaaacttttaaccaaagtataattaagatttgacagagtgatgtagaaagcaatcttaaaaattgaaatggggagtatgaaattacagcataatgaggatcaattttcaatgcttcaaagtatttctgaattccctcctgtgtatttccagcaagctttaagctggttccaagatctgtcaatacaatggctaggcattcagcagctggtttgtatgaaggatctgctgtcagagccttttgatatgactgttccaaagcaaaattaatttgtaaatgtttaaaagaattacaaacaaccaatcaactacttagaacacatatgcatcaactgctaagaacgtatacaaacatcttacaggtgacaacccagcttagttagagtgcttgacatgggacaactacgaccacaagattttattttgccttgtatatttagtaaaacaacatttgtgtttcttatccaaaaaaagtcttcaaaacaaatttaataacctcatacataccagtgaattctaatagtgttaaaaaaaatcactagacagaaaagacggtgcctccaggagagaaaaagaacagtaatttaaacaatcctaaggaagcatgtgctaaataggattgcatacctcagcagcatccactaggcggccctcatctttgaataaaataccacaatgcgttagtgcacaagcattctggggatctaacttaatagcttctgtaaaactgtcaaaggcaagccttcccatattctgcatctgtaggcaaatcccctttccaatatgagcttctacattcccagcatcttcctccaagacattctcataaagggcaagagcatcagcaaacttgtttcttgaccgaagaatattggcataagaaagagcatctttcccttcgaacctactctgaaccgtactcagactcgtatttgaaccacttgtactaggagaaggttgtgggcctttcaagaagccattttcaccaagtgggctcctctctctcccgttgccaacatcggcctctatccgcaccatctggataca

SEQ ID NO: 185502 - DNA, 883 bp, Cannabis indica
gaatatcttaatctcttcttgcaaatggggtcaaatgaagttctggttgtggggattgcaggccaaaacaaaatggggaagacaattatagctaaatcagtttatgatggaatttttgaggcctttgatggccgcagctttctccgcggcgtgggacaaaaatcgagaaaaccaaatggtctagttcacttgcaagaaaaacttctttctgatcttctgttgggagagaagataaacataactagtgtaacaagaggtgtagatgttctacagaaaagactcagttgtaagaaggttctaattgttcttgatgatattgataatttagaccaattatacgctctagttggaagccgaaaatggtttggtacgggtagcaaaatcatcataacaacaagaatattatcactacttcatttctataaagtggaccaagtatttgtggctggaggccttcctctaccagttgatatccaagtacaattcttgtctaagtgtagttattataaatttctttcaattggcaaacatctccattttctcatgttaatattatcagtttctatatctatcacacatttgtccaaatttattataaccataataatgtatgattgaaccatctactgtaggaaatttgggaaccatatcaacaaagttgtcaccggattgcaggacttaaagcatatatacagagcttgtgttacatggtaagcagcagaaacatctcattacaatttggtatttaactaaatcatatttcaactaactctattgttgtttagaccaatgacagggtgaaaatgctcgaagatcagttgcgtagagggtgtaatacaaatgcaattcaggtgtcttttctttgttagaattattattgtgg

SEQ ID NO: 185503 - DNA, 740 bp, Cannabis indica
tttggagttctaatccacatggcactgacaaatttcacaaaaatatttggcccaagtaagcagctctacggcagccactatcatcatcatcttgcttctttcagttgatctatttcttatttttaatttacattcactgctcaaagccatggcaacctacctcagggttgactctcacctattgctaatattctactatttcgaagaaccagggctcactccctgagaagacaagagaagagaagaggacatattcaatggccaaatcacctctctctcttcaattaaccatcatcttctctctatctatgtcagccgcttactccttctcatcgctatcgtcaccgctctctcctcttaaaccattttcgacatcctcttcaccttcaaaaacacccaaagccactacttcggacctacttactctgctcagcgatagacgcagttcctcaacgctcaatcctcttgtatctcgcgaactcaattcttgcctcaaatttctcgtaccctttacccccaatgggattaaaatggtccctataagttgttcgcatcgaaagagcttgaactcgaacagaaatggagttctggtacgtagagaggaggatgagcttatatggtggcctccacaatcagtgttggatttggctcgtcttgctttcgattctcgtggagattccgcagcgatccaccgagcccttgaccccactgtgatccctgttagttctttctatttattt

SEQ ID NO: 185504 - DNA, 1194 bp, Cannabis indica
tttatttatttttttcactttttattgacatcttcattgattcagttggtaatgacattttgtcttagctagttaatccagcatattctgtttgtgaattctttgtaaatataatcactccaatccacacattgagtttttgtgctgaatttaatttaagtaaagccgattaatgtttgttaatacacattggtagtgcttgacattgttaatctttatgacattgctaactaaaggatatgttttgttctttatttattttcttttttaaaagaaaaagaagaagaaaaaggatgttttgttcttaataaggaaagaaatcactgaaggaggcttcattttgtaatgtaataggtacctgatgttgaaggatcgaatgaagaccgttgtcaactaactcgaactccatatgggtttcgatttattagtgaggtttgcatctatggaacaaaatgtatttcactctaccaaaatcatgcactgttgaatgagtggtgtgttttcattgccaaattgcaggaattgaatttgtaccttaaatttttgtttgaacttattgttgctcgagctcctgctgttgggttgaatgcatcattgaatagatatgacttttttcatggtcatatttttctcgccacagacagtggcaggcttggtatattgtaagtggcatcattgtggtcaatttcctttatgttcttggtacttataaggtttgcgttgcaggttccatgccaaagagtacccagcatttgacaaaaaagtgttcccttacaatatgggttattgccaaaaaggtaaacttcagtatataacatcctctatctaaatttaggggtttactcaactctgtccttcccttttaattttcaactttctaattttctagagattactttatttaggcaaggtttagatgactatgtctttttttctttatcaaagggatttggaaactagaaaaatacaatgataaaacaagctgaaaattgatttctttatgtcattcatgtttcgcagttccattttctttcaggatcaaatgtatcatacgataattcaatgaacttgcgaaatattctttggctggcaccattgcctagtgattcaaccggagacacatgggcagcaccaggtacttttccagttatggattttcttcataagtcatcaggtcacccccctaaagagctt

SEQ ID NO: 185505 - DNA, 5571 bp, Cannabis indica
cagttggtaaaacatattcagtcatcattattatttttattttcattttaatgatgatcattgcttgttataacactatgaaaagcatgcagaggcctacgtagagacttttaacatcatatttaaccttttgaaacagccgaaatcctaagaaggtgatgcctttcaaaacttttcatttctacttcttgtctttattttcgaccttgagtttccttcttagaatcaaccctattgtttgtttatctttaattcattagcgagtcagctgtcttttgaattagatgattaggtatcactacctaaaattaaaaaaatatatatcattagaaatagacatttaactttatgttttgttacctatttaaatttgattattacgacatgcacggattggctaactgtcttcataaaacttgctactttatcctctcttatttgtatttagccaaccgtaaggagtggtctagtgttaaaggagtgttggtaggcatttgtaccaaggtttgaaccctatagactcaaaatccttgaggtctcttagtcgaactgccagggccaaaaatgttcttttagaaaatgttttcttataattaatcaaactttagttcctaaaccttttttctaacgagaggggagtgcccaattaagctcataatatagatttgaatgtatttttctttcccaacctacttagagattggcacatttggatgtaatcctagatgacctattattatttttggggtaatcaccttttttttaacccatctctcctataacaatattgcttacttggggtgttcagtagaggacttgtgggagaaagttaagttttggacagctacttgggtttttaaaaccaagtttttcgaggacctgtctttcttagatttatgtagagattggaatgcattcttgtaaaggaaatccattactattttcgctgcaaccttggtgtgctaaaatcctatgtatctctctgtaatatagttttcccgccataagcgaggcttattaatatatttcgggagggtcctgtctaaaacttgcggacccttcccttttcaaaaaaaaaatataataataataacaacaataatatatcctccttttacgttcatggcagcccatcttcaaaccagcttgagggagagatttggttgtgatattcagagatcaaacaagattaacaagttttttttttttttgaacaagattaacaagatttaattagatgtaaatatgcagatttgagcaacaagataaaatatgaaggttaatatgttgattttcttcctgattctttcttgtttcccagttcttctactatgcaaatctttgtctccatagcaggaaccatgtacagcttgtgtttgtgagttaacactaaacacattgaaattagtcaattcctaaagctatacagactttatatgtagatttcgatttcttccatataagattaatatattcataaacaaatacaactgcacgtacaatcactttcaaatgaatattgggtcaataagttaattgacattgtacatgatactgcatacctgcttcaaaacaagcaatcgtcgatcagcaagtgctgatggaattatatcaccacagactcgctttgcttcctctgcagagaactctatgaaactagctccataattgatctgtagtagaaggtatgagactatcacgtacgattttgaagagttacagagaactcagcattgaatgtcaagaataatagcgtcaaaaagatagttgcttatcaaaaaacataagcgtatattcaacaatatggaagcagaagtagctgctacttgaaaaagagtaaaagggttgagtggctatagggagttttaacactaaggatttaaaaattttcctttttccatgctactcaacgattagtcattttggttgtaattcaatgctaagctatttttttcttaattaggtgttaaatggcctttaggttgcaattcagacaatatgtcaattaacttcaacctgtagacttattcccacaaaataacagtaataaatacgtcaatacctcaccaagagcttcttttagaggtttcccttgctccaaggttatgagtttaccaagttcttctttgtgggcaattagtagatcataccttgatatatgggacaggacataagtacaattatagtgaaagtgacatctgagcccagcattttttttatataagaaacaaaaatattattcaatactaaaagagattcaaatgcaaagagtacaaagtttgcacaggtacaagaaacctttcataaatcaatgactcaatgcataaaaaacaaaaatctgactaatctaacaattctcaaatcctcaataaatcagaaaaacaaaagtgcataaaatccttgaacacaattcaatagaagagccccataattaaattttgttttctctcagatctccacagatgcaaaacttagaaacttcttcgatttctgtcaccccaaacaaccaaatctgaactaagcattctaaagggggtcttataaaccagagctccatatcatcaaccatataaagactaaaaggattgcattttaagaatattatgtatggatattaaggtgcaagtgcagaagttttgcttaaatttagagctctgtaatctttcaacaaaccaagtagttcattttagctcaaaaaagagaaattatatagatattgtcatatatatagttgaaactgatctacacttgcatagagagaaatagtcttggaccagaaaaatttatacttcatatttcaatggtccaaaagtaaggggtgaattttttttaaaagacataactgatggtaaaacagattagtacaatgataagtgtaaagaaacaaagcatactcgaaaaaggatcatgaggtgtccagaagatatgtatgataaaagttgagaagcaaaaatacatacaaatcaaataaaagatctaaattttggatcctacacatagagaaggcaacataagcattcactcagctatctaaaactctttactttgtaacaccttgatcaccaaaatatgatttttatgactgacataacagctaaaatcccagccagtacaatatttacttaaaaaattcaaatataaaaatgggaacttatgtaccatatatattttccattagataaagcaacagtgtgaaaaaaaaaagtcaaaattaaactctaggaaagaatgaacggaagagacaatgaagtgtggagcagcaacaataccatttccttaaatatttgcttctttcagaggcagtaagtttgctccaagctacatggaagataatgagaaaatttaaattaacaaacatacttagcaacctcctgctaagttaaatacaattaaatgttggtaaaataataattgacaaaagtataaatatcagataattcatccaaaaaaaaaagtatatatcagatacaatgtaaaattttgcaaaggatactgatcttgttcacagtagtttcttattttaatattttagctacaagactcaggatgagatgtccccacaaagttagctcattgtggtattttcccttaaaattacaaaaaggaaaagaaataataatatttatatttttcacaaactacacctggaaaataaagtttatttattcaaatatcaatgatgttccttttccgaaactgagctagaatgaacattattttgctgatatgaaaccaaataaaaggtttaataatccttttaaaacttgttatgcaagctcatgacatgattaatattgcccgtgtatattttattttatttttttgaaactactctcgtgacctaaccctacaatatttagcaaacaaaaaactatagcaattgttatagggaagtctataatacaatttattttccctgatttgtatttttttatttctgtacaaattttgtacaggaatttcttggtgttggtttttgtagccacggtttttctcctccatatgtgtgggctctcaacatactttagaggaagtcatggacgtgatatttatctctcagaagaaaaaagaaaagaaccaaaataaaaagttgaatctcagatcttgtaggagcaaaccaagtgcctaactttcttttcattttactttttaaacaacacatccctaactatttgagctacccttagtaataacataaaaaagagctgaactagcaagtaatataatgttagtggacaagtctctggtgcaaccactaaggagggatacaccaatgcatccctttctatttttagcattggaaaggttataactccacttttattgtatgatggtattcatcgtagttattatggcctttatgtccctttttaaatattgtgagttccagtacaatactgagacaaaaagctaatgccatagtagtccaatatttgaatcaataaaatttcttgtctaaagaaaacttgttttaggataaagaacaatcatatcacactaatgagaaaaaaaatagtatacttaagaattaagaaggcttgtagcctataggaatctagatgagcacaaaatgtatgctaaagcagtacaaatgctttagcatacattatgtgatatgctatagagaagttaaaaaataaaaataataaaaagtcaatcaacattctcatacacgtatatgcgtcataggctgaagatatcgcgtcatttgtttccctctgacccatgcatggaacatctgctataacttcaccagttgatggattgtaaacctgccagtacctcaagacatagaattcagccagaagtagcataagggaaaaccaaatggagtaggaaacaaaaagaaaaagatcaaacattgtatatccaaaaacaacaaaatcaaaggtacagacaagagcagcacaagcactaattacaattcaaaacaagactgcaatataaagcgcttacgccataaaatgtaaactgagactcctgactacacaaaataagtcataaaagtaaaatatagttttctcaaccatttctaacccaaacatcaaaaaagcagctaaaatttaggaaatcacacagaaaatcctcaatgtacactgcgggcatcaaagttaaaagcttaatttgtctgacctttagagtttctccactatacgaatcaatccatttccctccaataaggccctgggtacgtaacagaccagaactctttagttgagaagcaacactatttgcgtccgtagtcatctggcatccaaatcacacattcaatgtcatactaacaattcaataaactgtaaaattaatcaactaaataaatgagttattgcacctgtacactgtaatatacacacatagaaaaatttcatagagatggaacatcaaaatttaacacacaaaagctaaattgaagttgtggacctttttcgttagtacgtacctatcattaccacccttgtaaaaagtagaattttccaaacttagaacttagaatgacacaaaactcgtacgccacatctaatctaattttatcaatcaaatggttatgaaggaaaaacataacgactatat

SEQ ID NO: 185506 - DNA, 5695 bp, Cannabis indica
gtggttagagaacactatttttagtttttaaaaattaaaatttttaaaaactaaaattttactttctattttgtagaattaaaaaataaaaaacaaaagtgttaccaaacggcaacctaaaaatatataagtatttgactttttttttttttttgaaggaaaatggtaactttagacttaattgtattgataacgatataacacttaagagagtaataatgccttttcatatcattaacttataagtttactaatagtaaactaaatctatatgtttctctgtcactaagaatgacaaaacaattcaaaagtacatcaatacaaacacaaaatagttttttgtgagttcgataaattagatgtaagttaaagataaatcgacatgcttggcaccgactataaaaatgtactttttccacctctctttttgttgtgaaaaatcaatacgtttcatttgaacaaataatataatgaaaagtgagtattgttcccacaagaattgttagtaattattaaattattaattttaaatttttatttagctaataaaaatttaattttaaacattaaaaaaaattgtagctaaaattaataattaaaaaataagaaaacgaattatacaatggatataacattggtatttaacttcatcatctatctattctatttctaacacaatgtctactattcttcatcttattatgatattgaatcaacatgtaatctatattcttactaggacatataataggcgttacgcaaaatatcctagagctacacaaaccgtaaagttactttcgtccaatattaaaattcacatcgatttaaccctaacatattttgctctcacttttacagattttgaattaaaatcgtaaaacatgtaaatggtgatcaaccatcacaagcattaaacaaaaattgattaattcacaatgacgaaaaagcaatcataaaaattacattaactaataataaagtatcaagattagggctggcaattcgtcttattgtgttgtgttcgtgttgacacgtttatgacacgacacgattaaagtaaatacgaacacgacacgtttattaaacgtatcaaaacctcaaacacgaatacgacacgtttattaaacatgtcgaaacctcaagcacgaacacgacaagattaattggtaggtcacacgatatgacatgataacaccattatgacacgattatcattataaatatagaaaatttgaacttttttataaaatatatgaaaattaattcatgttacctgtcaacacgattatgaaacgacacaattactaaatgagtcgactcgactaagacacgataagattaaggtaaacacgaacacaacacgattattaaacgtgtcgaaaacttaaacacgaatacgacacgattattaaacgtatcatccaaacgtattatttcgtgtcattttcgaattgtgtcatcgtatcatgacctatatttccaaacctaatcaagatactacattaaaaccctaaaaaataaaattagttcatgataactataataatatccatcaaattaatattgaaaagcattaaagaagaaaatctttgaaaaaacttccaatcttgatcatatgtagcctccaaatgcttttatgagtttctcataggtgaaaaactgatgaaaatcatactttgttatactcgctttttgagaaattaaaaaagtcagttttagactttgaccaagaagcaaagagacgaaatgaagattaaagaaatggggtaattaagtaacatttgaaggaaaacaactcgaacatgcaatcaaaggcctaacccttagtcaatggttgcatattaaaagagaaaacaaggctatattcgaccactgacacttcctagtgtcagtggttgcatatgataaggagaatagagtagccacacgagcactgacactgcctagtgtcaatggtcacccatttcaagaagattgaggaaagctcgcgacgaatgactcagtatttacataacacataaaagaagctccttaaaagatattttgggagaagagtggcaagcttatgagcactgaccaaagattgtgtcagtgctcgtatggctttagtaagaaaggttttttgggcatttttaaagcttaaaaccctaaaggtgtcaaccaacttctaagatattgtgaagacaactctaaatggctaataagaagaggttcatgagcattgatatttcttggtgtcaatgttcgtctgcaatgtgtttttcaaagggttagacttcatttagcatatttttaacatgtctcctgaagaaggaagctttcagaaagttctcaaaagctaaaccactttggcacatgaagaaagatattttattctatgcaatttatttattacttttagttgtaaatgtagaaccaaaagagattttgtaaccattctcccactatgtagggagagtgattagtctaatcctaggcctatataaggttatgatctacacctagggagagaggaccacttctttgactattgcagctactatctaaacggttgcatacttgagagaaaaacttcctaattgtttccccacaaattttaaccaccattgagataaaacaagttgagtttcattgtcgataatctttggagagtacatttagagatagacccaaagagatctctataaagagatatcgttgttgtaatcacttaaatacattcttaaaaacataactttggtgtgtttgaacaagtggattaatccattaccattaattaagggggtgaaccactataaatattatgtgtctaattttttttactctgtaaagcaagtttataatttgacaatcgatatagaatgtctagtttgcttatttacaattttcttagatgtgttgacgaaaaaccatatcaacacacataagcatcgcgactctaatccaaacctgttgtgatgagcgatggtattgtagctataactcactcgatataactcaaaatcaaacaatttaagatattttataaagttggaagaaaaatctaaaaaatttattcacaatgtttttccagcaagtgaaggaagaatagtcaaaaagctcccaacttgatttttgatataaaatgaagcatataaagcatatcccaaaattaaaaatttccactcattatattgtacatccccaaacatgataaatccagtattcacattttttaacatgattcttctcatttgaatccatattagttacttaaccattaaaacctaaaagataaaaacatgcttaattcaaaacaaatgaacataatcaactaaaattaatctcaaagacacatcataaaatacacctaaaactagcctaaatgttaatatatgatgaattagattaacaaataatttgtattaaataacctacaaattaagaactactaaaggtgtggtatatttaagagaccattgaccaatcaactaagaacaaataatttttaaaatattaaatttggtctgaccacactacaactagataccttcatgtgttgtatagaaatgtcaaaatcatgtgctcaactaaataacgaaatgaccaaagcaaaagattataacttataactgtaactcaaaaacaccacaaagcctaaataacttggtcttcaacttaaacatttaggattatcaaaacaaactctaccccaattaaattaaatttaaacagaaaagagaaacaaaaagcacccctcctttgaataggtgagaattgagaacaggtttggtctcacttgaagcacttggcatccaaaagagcctctccctcgaagggctcttcatcttcaatcatcttattaacgagctccttctggacttcatcgttaatgtcaaccttcttccagtcatagagctccatgtcgtagcactcgtcgattatgaattgaggaacttcttggccacggaagagccacagtcccttcaccttgaatggtggttctgatccgatgataagcatctttccaaaggcatacttgcgggcaagatccatcctctgaaggaatcctcccaccttgttcaaggtcacaaacgaaacagtgttctcatcattgtatttgtattcacagaaccaaagagagtacccctcggggtcatacatgtcccagaatcctgaaattaattaaagacaaaaaatggatcatcattcaaactcaaccgaaacacaaaatgtatgaccaaattgttttccaggaaggggcatactaggctcacaaagattaaatacctttgattgcaacctctctgaagttagttttagtgttagagtagagcctcttccagtcgtccaacaccatcttgcttggtggcagcagatcaagaggattcttgggtttgggctttggtgctgcctcttcctcaactgctgcagcagcgggctttggtgcctctttcttgggctcagccttgggtttggcttcctttgctggagcgggcttctttgcagcagcagcagattgaactggtgggacagaatcagtttgcttgatctcaccaaatatcttcttaaagtttggctgattaaccatggtccagaagtacctctcaacatgagggaactctgaagtgaagctcttagtcatgagcttggtgaacccataaagcaaattgcatgtggtaatgatgtcagcaagggttacagaatgcccaaccaagtatgtgttagaagcaaggtgtgtgttcaatgcacccaatcctctcttcaaagctgcgattgcagcttcctcaacctagattagtacaaaaaacatattcatattcataccatcagatctaggcgaggaaaataattaaaggagctaaactatcaataactaaattgcaactcaccggaggaaggtatgtggcccaacccattcttagtttaaaccaagtcaaaaggttagcatcaatctccagagtagagaaatcaatccactgctcaatgtgggcctgagatgaaaataataataataacatgaattaattataacaatctttttattttcatgtacctgaatcaaaactgcataaaaaaataggcaccgaagtaagaaggaagagcaaatggaaagagaattttacataatcaatcaaagaagagccataaagagcattgtctgccttggagcgtgcaactgcataaaaataagcacccgttaagaatttcacctatgcaaactccaaaggaaaatgatagaggaaaagatttgcatgcaggcataccataacgtgcgatggcgttgctctcaaagacagggccatctggggtttcgagaacaggaacctgaaaagagaagggtctttaacataagtctgactgaaaaatacataattgtaatcgtgctaaatatcttaggtgactatgtacctttccaatagggttcatcttgataaattcatgagttttgttgggtgacacccatctcaaagtcagcagctaactcaactttaacaccagtatactcagcaacaatgagtgccttgtaagcattcttgttaaagctccatgaatgcaagacctggacaaaacgtggattgttcaattcagcgaaccaaaaacacgtatctaaaaacctaatcaactcaaaagaatctcttgatcgatcggaaaaataatacagtaacgaacttatacctagaagacgatcctagatctaaaaaataagtaatat

SEQ ID NO: 185507 - DNA, 5294 bp, Cannabis indica
tctctctctcgtctctcgtctcttgactcttgagcgtttcgctttctattgtcacgtcttgtttatttgtttccatatgatctttttgtcttttcccacaagccaactacgcatattttaatttcattttttgggtctaccacttcgcattggtctgagagcgtttcttggtttttccaccactttcttttttggaagaagataagaaaaaaaaaaaaagatatcatttcaagttaatctgtcatttttctatcgaaaataaaattaatctgctatttcaaaattcgaacaatacaagtagtaatttaaaggtgtggaaaactagtataatgacatatgagctgaagcttaagtgaagagaaccccatagtccatggtcgaccaattaagattgagacaacagttagaaatatataactttacaaatgaatgaaggcctacttatgttgcgtttgactatgaaacaaggagttgtattgattaagggaataagattgaacagaatacatagtgaaagaaggtaacaatctttcaatgcttccaaacaatatgacattgacataagagaaagaaattctgctcatgaagcttctcctactcctactccctccctttacattttctaggggccccactctaaacacaacaacaccaaagaaagcttgtttctccgttgctttttcagttgttcaagaacaaatgcttcttaacaaaagatacatctataccgaggaagggggagaaaaagaaacgaatgctgaggaggatggtgaagagaaacagagagacggtttttttccaactcaaccttatgccttgccattaggttttggtgattgatgtggatactgatgatgaaatggagaagcatgggaaccatgtggaatggagagactcctttgctgatgcccatttcttgacatcaatcctccttgtgttctgacaccatttcttgcgtttgggctggaggcaacacggtctgcattcattgtctgaaaatagtatgaagagcttgccatgtccttcaaatttggtagtggtttcaagacttccacaacttcgctcattaaaggtctggattttggatctcgactaaggcaatgcgaggctaattgtgcagctttttgagcacccttgattgaaaaatggccttcaagtcgagggtctatcaatttgtagaactttcttctctctcctagatgcggccgagcccactccactagattatgttcaccattaggtctgtttttgtccattgatcttctgccagtcaacatttcaagtaacaccacaccaaaactatagacatcactccgtgacgtaagatgtcctgcaatacatctagttcgtcaaacccatagagcagtactagcgtgaaagagactttagagcataaaagtatgcatcaaaatcatggctagattaaatataaagacaaagttaggacagtacaaattttcagattcacttaaacttgatgattcgaggctcaggaacacaattatacaacatcttccaaaagtgaacattagcattaagtcatacactctaggccagcttaactagagacatggagcagcaagaaggcctataactaacacaaaccaatcatgtagcaagaaatattaagaacacctaatttatttaaaaaaatctaaataacttgttattccttaacatattttatggctacacaacaaaagtaagaaactaaaaagaagagaaaaaggaaaagcctagcaagaatgctagtgttcttttactcattcatctattcacatagaaacacaatccaggactggaccttaaaaggcagaatgactttttctacacttaccggtcattacatattctggagctgcataaccataagttcccatcacacgggttgacacatgggttttatcaccttcgggaccatctttggcaagtccaaaatcagaaagtttagcattgtaatcctgaaatatcacttgttagagagatgaacaatacaatagagaatccctagttttatcagagtcagagaagatgtaacttactgcatccaataagatatttgaagttttaaaatcacgatatataacaggcctttctgcttcctcgtgaagaaaggcaagacccttcgcagcacctaaagcaattttcatcctgatagaccatggaagaggcaaagaccctgcacataacatattttgagcaaagaagattaggaagcaatacaatctacaatagttctgagattttagggcagttttcatgtcagaaaagcttgtgattgtaaattttctacaaatatgccagctcagaaacactacacaattctttttcattccacaatatatgttgatatttacttctgtcaaaaccttgccatagtccaaaaaggcaaccaaacaaggatttgaaaggaactattgaaatctttttagtatcatatgtcacaaaatcctgaaaaacttgaaacaaattttaaagaagaatcatactcctaaagaggtggttctccaagcttccacggggcataaactcatagactagcagcctttgatcatcttcaatacagtatcctataagtttaactaagttaggatgaacaaggtcaccaaggaaattcacttcagcctgtcacatttaacgaataaaaaaattaaaatccaaagcaaatgaaattttaaaaaatagaaaacaaaacaataacaaataataatttaaatgctgaaaaaacctaacaggaaatgatacagacaagcaaagatcattaccagccattctttatgtccctgaagtccatcatggttgagagttttcacagcaacagtaagccctgttcctggttttactggagcagttccattttcttcaatccaccctttgaacacacaaccaaaaccaccttcaccaagaagactttcaggtctaaagtttcgagttgccatcttaagatcattaaatgtaaattttcgcagccgagaagcaactttaagttcctcttcaagttttgaagtagaagaattactctcagcattactagtggtagtagatgagacaactgcagctgtgggatggtctctgcttgtttcatttgttgatttagattctgaaaattcaaacaaagaacaaagattataaataaatgtgtcagtatgagcctctaagtacactttagctttaagcaaacaaggatatctgagtaaacaaaatcattctagataaatatacttatgaccctgaactaattagttgaagagatacttgccatcatctaagcgtatatcacaactacaagagaaatcatatacagcaatattacgtaaaggagaaaaaataactacatcccatagtacaatgggcatctaatggaaattagtgaactctttactatagctgaaacaaaaacatatccataggcatttgttatgcaaaagatagaacagtccacatttatattaaacttttaaccaacacccaatttcagagcctctataagattgagatggacctaacacatccactgttatatgcctaaaaatgagcaccaacgaccaacttgtaaacagtttaaaaaccatcagtttagataaagaacgcccaaaacaaggaagtaaatttcaattgacgttcctaaatatcaagtctataaattcaccacttcgtgtcagctagttcaattagtttcccaatactgctcacaaatatacaacagaacaaatagatcaaactttaagttgaactcccaaactggtgtgtatacattctttttctttcaaaacaataaaattggtaacttatatacatgattacacagtcaacaattatgcgtgaagttgtgtattcatattttgttgcaagtgatgtttataaacatagtaagcatgctccagaagaaatgggttgcacttaacaagtcaaatctcaaatatatgagacattaacaggaaaataaaagttcaaaatgatacgaggacgtattaggtgaaaaactgtccgtaactctatatttaaaaatgaaattttattaattcacacatgatcaccctacactgaaaatattattccacgagaaatgtgcattggaacttggaagaatccagctttgatggttcaactttcagaaaacaaatttaatcagaataatctccttaagaccttagagggtctaaatttatgattttcttcccttctgctataaaagatcaataaaaactgacccttaaagctttccgtaaatataatttgcagggaactgaagcttccgtataaattcatcacaagtggagcttccttaatcaaccatagttatcaagacaaacacaaaaaaattcataaccaaatttacttctcaaccataatcacaggtctcgaaacatgcactaactatacaagaaaagaactttaacacagcaaccccttataagaaagaagaaaaaaaaatactgtacagagagcaaataaaaatttaccatagtgagtgcttgttccactaattgagctatcaactttggatcttgaagaaatgcagctaccaataaacctcagcctaacccagcacccagtttcctcctcttcatcagcatcatcaacttttttcttcttcctcacctttgatttatacacatcccaagactctaccttaccattctcagcaccaatacccatctcagaaaaaccctaataattaaacccagagaccatcaaacgtctcacaaaatcccagataccaacttcccacctgaactagtcaaggcaactataaacaccccagatgcaaaagtaactatatgactcagaaattcaaagactttctttcaaaaagatcagcttcaaagaagtagaaacccaaaaaagtaaaactcagttcagagaactagatcacgcaaagtagatcacacctgaacccctatcccctagaaaaatcaatctgaaaattgaaagcccaaaaaaggaagaagcgtggatttacaaatgcaccaaaatttcagttggagccagaaatgtctgtccagagatacagaaaatctcagaaatggactcttcacaagctgaccagtttaaagataggtaaacgataataataataattataataacaataatttctcgaaaataataataataataatttggagagagaaggggaaaaaaattatatatccaaaaaaatccgaatcatcagttttctctcattgtttttatttgtttttatttttattttttaaaaaacaattggaatcgaagactacggaaaagcaaatcgaactgcccgaagaaaacgggcaggaaggaatgaggtg

SEQ ID NO: 185508 - DNA, 3662 bp, Cannabis indica
tgcaactctgctttgtacgacaatttaatagctctatacgaaatcagattacttggcactttgtttgggcttcattacagtgcgtgtctgttttattatgttgtggaaacagtagcttttaacttgctaatattatgtgtcattctacttcatttacatccctaaattaaaggaaagtgaaaatagttgagccaagttttagtttccttcgctttgtcattctacttcgttgaatatgtagagataaacttgaagttcttgttgaattggtataaatttcttttgaagttggtttcatgttttttcttttgtttaaatgttacacatttggaaattttgttttccagtttctacccaaaaacctacctggtgttgtgacatgggaaaagcttcgagggataagagggtattttttttattcttttatttatatcattcaagttttagttctcttattattgtttttccgggattttaagtaattggctgaatcaattgaaggatatctattatcgaaaagcaaaagaagaaggttggcgtgctcgaagtgcctttaagcttcttcagatagatgaggaattcaacttatttgaaggtaagcaatttgaatttctcaaacttagttttccagaattcctatatttatttgttggaaaaaaaaaatcgtagtaaagagatagtaggagactaatgatcttaccattttcatacggaaattaagatacaatttagaaaacagtaggaaatattaatttcactagaaagaaaatatttgttataatctgtactgtttttgttattgacattgtttgtgaggtctaatggtacttttttttataaatgtcaaggacttgctaattcttaggacagataaaaataattgtaataataatagatgacgataatgatgatgatctaccatttgtgttttaaaataataagaccttcaagcagtttatttattatatatttttctggttgcccacagcaatgcagtataaatttacttaagctatctggtaagtatgttttataattattagtaatacaaatttgaggagttcggaaagtgctggtagatatttgttccaaggttcaaattcccagactcaaaataataaaataaaattacaaatttgattattgtttgtccccaggagtgaagcgtgtggtagatctttgtgctgcccctggtagctggagtcaggtataatactctataatagatagatttaaatattccttttctttcttctttgtttatttatttattcattttaactctcccctctttctactgagtgttcattgaaaaacctactcctcttgattcatgttctcatcttcatcacaattttgcatttgaaacaatcttctgtattttttcacacaaaaggtgatggacgtgatatatgcgaaggctcattaactgacatcacaccttttatatattttctcatgcataggttctgagcagaaaactatatctcccagcagcactttcttccgattctacgtaagttggcaaagtaatagagatgcataaaaacttgaacataatgagaagagtttttttttccccttcttttgctggatacatgatgaaaagtttaattgcctatgttggtgactgctacgtggagttttgatgtatgaatttttatactatttgtttattttttgtcaagctaatgaatttactatggaaaatattgaaatgtattctttgggtgtctaatctgaatgtgaaagccttgttccaagcattaacacttattttccttctgtttgaacaaacttgctcatctgctgttaacttgcatatcattatgttttttcattgtaacaagatttttatattttacacaacggtgtagataatttataatatcagtcaccttcaagtgactagctttgtgagaggactataaattcctacaatgatatgcagggatggcgatcttcctcttattgtagctattgatctacaacccatggctccaatcgaaggtgtaattcaagtgcagggtgatataacaaatgcccgaacaattgaaggggtaggaaacaattgatttctcatattcattgtgcatttttatagaatcattttatctcagtgccttcattctcaattggtcactcgttttcctgtcctggcatgtataactttattcataaatttgtcttataataaggacaacatcagaggattggaacgtttatacaaataattagattttctgctaaaacattaatggttataaatgttacctttttgaacttctctccttccactctttaacaggtgatcagacattttgatggctgcaaggcagatctagttgtgtgtgatggtgctcctgatggtatgcaacagtaattgtcgcagtatatcagtttctctagtagtagtaatctttgcttacattatgttgttttcattcctatctacagttaccggccttcatgacatggatgaattcgttcaatcccaacttatactagcagtaagttttcccttttcacgtgcatgatcaattatgagtggcttttttcaatttttctcacctttcaggttctttagcaggatcttcccctttatttggggttttttcattttgtttcaattgttttgcagcaagtgtttccgtatttgctttctccttgttcatttcactttgtttactagtagaaatggttagactcacatagtgtgaaatgaatttaaggtccaatcatcatgattaactaagacatggtgggatccattaggaaatatttaagtgcttggtcttgcattatttttaaggataagacctttttattttaatttgactttaacttaatgccatttaccctttgttcctttcctcattgaatttcatttttcttgtgtgcatacctatatatatatatcttttcctcttgttcttgtttgtataactagcaaagcttgtggactaagacttgtcaacaatgttttgaatattcttcaagctgtattagattgataaaatttggcggattttaaatgcagggtttaacagtcgttactcatgtattaagagaaggtggtaaatttattgctaaaatattccggggaaaagatacaagtcttatgtactgtcaggtaaattaagttgttaccgaagctccaagcatgggtttaatttttatttacttgtttgcttgatgctttgcatgtagatgaactgctgctcttcctgttgaagactattaaatatattctatttagggttcaaaaaagcatacagataagaattcatttatttctggctgtaaatagacatttttagttgttttatgtcacttaaacatgcgtgctcatgtgaatatgtaaagacaatggctaaagaatatgttagccaatgagcctctgaattgatctttactgcttcatcccctttaaagtttctgtttcaataagttccattgaacaaatattcagtttcattgaaaatgaaatctgcagtttatgcctccgaaggggtggttagattttccttaagactctcaccaagggaaaggtctatggttcaagcccctacagttctggggctgaaatttccacaacatttttattgttatgaaaactgatgacagcaaattgtttctacttgtcaatttttatgttgaaa

SEQ ID NO: 185509 - DNA, 1558 bp, Cannabis indica
aaattattagagcaatagtaaattaaaaaaaaaacatagtatataaagtaatttctttaaattattttaatttatttttgaaaataaatagaatatgtgcttaattataatgaattgtgccttacaaatgtattatatgatcattcaaacaattttttttctttatagatttaattacaaatatagtatatatacaatttcagtcacattgcacaaaacatacacaaatcattcaaacaattttattacaaataaagaaaaactacacttcaaatattaaacttttttccttcaaaaaaaaaaaaattagtagttttagacaatatagctggcatttgttttgtaaagaaaataaatacaaataataaattcctccaataattgtaataataatatatcataataaattatttaggttgggtggatctgatctgatcagacggccttgattgcatcagaagtagaggaagaaacggcagcgttttggtctccggtactaacattttcaagatcgggattgggattgggattaagaggagcacgaaggtcggcgttgttttcgtcttcatcgtcgggatcgtaatcgggattgagagagcgatcaatggcttggcgacctttatcgaggcaaggtttgcaggccatttctatggtgatccatccaagaaccactcctgctattgctatcaatgctgttgttattgcccccatttcttcttcttcttcttcttggagctcagttcagtctggtcttctttcttcgtcactggaaattcgttgaagagaggaggagacttgtacgaacacccaccccaatctattggattggtccacataacacaccttactttcttattgggcctcaaccccttttcaactgcaactttctttactgggccttttatggcccacactatcgaatatttatttacacgagatatttttgttgaaaaaagatttttttaagggaaaaataataaagaatatgatattgttaattgaattataaaaattatataaaaaatattaatatatacaattttttaagggaaattatttcatatataatttttaattttttttatatttacggtttgggttgttccggtagtttctcagtagtttatatataggttattacgtgaattttgattacaatttaagttactccgttagttgctataagaatttctatgtaaaattttgtaaaaattaaaaaaaaaaactgttttgaagtataaaaataaaaaagtccttatattaaatttatgatagtaaaacatttatttaagaataaaaatattaaatttaaatttgagcaagttatatataaaaataacctctaattagttatacattgtctaagtattatattaaaaaaatatatctctatataagaataattttatcttaataaaatatatacatatagtttattaatttatttatgtacaattaataattttattccaacttaatacatgtataaatattatatttatttaaaaataattttattataatatattattaagaattttttattgttattattatt

SEQ ID NO: 185510 - DNA, 2298 bp, Cannabis indica
acaagtaacctgttgtaactcgtttcctttgtccacccgaaatccctctcttcatttcatccccaaccaatgtgtccttgcatatatcgagtcccaacagctatagtagatgcaaaaaaatatattattagtgtaacatattataccaaaaaaattagcggagtgagattgttacagtcaaccttttattccaactcataaaatatatggccaaagaaaaacttgtttttagcttgataaattattcaaaagaaattaaattgcaatcaacacttctcaggacataataatcttctagctatatgtcttaagtttctacttaattagcatttattaccttgagaatgtaatcagtttttagactgctcttggctccctctactgctgttgcctgcaacataattttatttttatttagtaataaataaatatatacgggtcttgttcttggtttggaaaaaaatagttaccttcatgaaaagatctacttctgcatctggcaagagtccagtatttttctctttcctagtaagctcacttaacaaatctgcaattaaaatatgatacgttaagagtttgttactttgttttttatcgtttttagccaactgaaacatatataacttgtacgactgaagtaattgagtatcataccaaagcgatgaccgattccttggaatcttgctgagtaatcaagagtttctttgacagttagatctcctagatgaacatcattttggctaatgtatgccgaagttttcctagccacaaactcatcaaccctataaccattgtaactcacttgtccttgaacctaacaattattaacaagaatttgttcaattattaattcttgaatttgaaaagagttgatagtactcaaataattaaactcacttgaagatttgagtctaactttcctgctagagccaacaaaagggtggtcttccctgatgatggaggacctaacaaaagggtcattctacaacatatggtgattagtaataaacccttagattatattaattaatttttgatcaggttaattttttacctggatggctttatgatcccagaaacatttctgagtattgtaaggtttgttgtcttagccaatgtgatgccacacaaaccaagagctgattcagcaatatttcttgaagcatttagaagagtgggaagggctctatggccaacataacaatttgcttctattcttaattgttcaaatcgtacttcaacctttggaatttgaatttgaaccctgcggcatgcagagtactgcaatgataaatattacaacaactacaataataggacccatcttaattaattattgacataattatttggaactagaaaaatgcctgtaattaataaaatggtgtacctttcaatgcgttgtctcaattttttcaagaatctctcattatcttcatcgaagaccttgaaagtggtgtccatgaacttttgtctgtcgtttggattaagcttccggacatcaacttctttctggactacgttgctggtcgcatgatgaagatcattattatcgttttggacaacagaagccaatatacttgttctcaagcgattataggtgggaagcttttcaatggctgcccatcttagagcttcttcgtcttcattatcttgtcttcttgaccccgaagaagagttttgaaacaagttctcaatatccatatctatcttcctcttccttccaaaaatgatattactctgctttctttgaaactctgtttttctttaatgccttataaatattgtcgacaccaatccataagtaagattttacacataatatacatacattaatttgttttatacattttgaggttaattttaacacatatacagatatatctgtagttatgaacattttgagacgtttatgatgaggtagagtgataaacttaatgtacatgagagaagaatacgtacgggacatgcattttaattacttcctccaataataatcaatccactttcaccgtcgaactatttttaattgagagagcctttgcatatataagtggttgaacatctgcaagctagtcgaacaggtaaaaatggctataatccgagctgtattgctctgcctctgatcagtgccgatatttttctccacagaaatcgtgatttcaaatgtattatatcccaaagaataggtatacatacattacgaggaaaagctcgttaaagatcttcacttttttcgcacttttttcactataaatatggtcttataaggtttaaaaaaaaagaaaaaataaataa

SEQ ID NO: 185511 - DNA, 3259 bp, Cannabis indica
aatcaccttaaaatgcctgatcataagcctagggaggagcaaaatgcaccaacccggtgataccgacaaatataaatttatattcaaaaagttagaaattttctatacagtaaaagcatgataatagttcaggaatcgcagtccttaaaatattcaacgttaacataactatgtagaaaagcacagtgagaaaagcttagtgaaaattttcaagttgatacattcgcctgcagtgagattttacaatccaccatttgtttcgatccagctactgccagcaaccttctttaacccaatttcagtcattcttttcctgatattatcagattcatcaggtctcccggcttgtgcatataaatttgccatcataatatagtttgcagtattttcaggctcaatttcaaacaaacgaccaaacacaaacttccctaattcaacatctccggatactgaggcaccattgagcaatgcaccccagacttttgcacttggctcaactggcattttcgaaataaactctactgcttcggaaagcttccctgctcggctaagaacacttaccatgcaagcataatgctctactgagggttggatgtcatattttggcaacatggatccaagtatcttccaagcttcatctactactccagaatgagcacaggatgttaatactgctgtaaatgttacttcatctggatgaattccattattcaccatctcattaaaaagacgaagagatgtatcggcgtctccatgtgcagcatatgctgagattatcgatgtccaaatgatcaaactcttacttttcgatctattaaaaaccctttgagccccttgaagaaaccctgactttgcataagtatcaataatagcagttgcaacataaatattctgatcaagaccatttctaacagcataggcatgtatttctttacctcctttcagatatgataaatatgaaactgttgggagaatacttgaaagtgttacagtgtttggtcttaatccattcccctgcattgcttggaatatatccaaggctctttcatgctgattgttctgaaccaaacctgatatcactgcattccatgtgcttaatcccagattttccattttgctttggaaaagatccaatgcatcgtcaacaaacccgtgaatcatataccctgaaatcattgagccataagtgacttcatcttttaggctcatcccttcaaataaatctcgagcataatccaagctaccacattttcgcataaaacccagaagtgcattaccaagcgaaatatccacgtccatttgagtctcattcgcatagcgatgaacctccattccaaaaataagatctctggactgcccacatgcctgcaagacactaaccaatgtcactgcattaggcttcaattcaaccgaacctaacatctccttaaacagttccttacactcatcataaaatccaccctgagaatatcctgcaatcatcgaattccacgacactatatccctcaaagacattctgtcgaacaagactcttgctaaaccaagctcatcatatctagagtagcatgtaatcaaagcattcacaacaaacatatctgaatcaaacccatgtcgtaaaacaaaacaatggacttccttagccaatctcacatcaaaaggtaaagatgccagcgccttcaaaacacacgtaactgaaaaattatcaggtttcacatcagttgaacaagatgacactagtgaagtaaacagatttaacatgtcattatgcatattatgaaatgaataagcaatgagcatagcattccaagagaaagtgtttctgtgaggaattcgatcaaacacattgcgggcttcatttaaacattgagattttgagtacaaagcaatgagctttgatgctaggaagttatcagggacaacagagaaaaggacaaggcgggcatgaagctgtctggcttggcggaccaaacgacgatcggtgcagacctgaatgaggcggccatagaagccacagtcgagcccattggctccgtgcagagcttgtatgattctcattcatgtgctttcattaatgatggtagcagattctcagggtatctcaaaaaccccagttgaataagaatctatctcttgcttttccatttttccattatctgtatgagagtgaaattaagcaatataaacttgaaccaaagatcaattaattaattatttttttaataaaataaaataattttaaatgtttaaatttaatttaaaagtattaataaaattaaataattattttttatatataaatttaaatttaaatttaaattatatttcaattcaattaatttaaattgttggttatatattgtttaataaataaatatatgatcgtattgagtggaaatttcttcagggaatcctgttaaaatttcttcagggaatcctgttaaaaatggggttctacctttacttattaaggttggttatgagtagtgttacacctattagatattggattacacatggaggacaaaggttggagccgattgctcctacttgtgtgattctctctctctttatttatttattttgtgtgctgaaggattttctgctttaactaggaagttcgaaatgaataagtggttgcatgagtgtaaggttgctaggagggccccggtagtttctcacatgttgtttgttgatgataattttttgtattgacgtgcgaatgaagaagcagcagctagattatggagcttttagtgacttttgaacaagcttctggtcaacagatgaatattgctaaatcttccatcttttttagcactaatgtttttgagtttaatcgtgctacattgcaagcaattctcagaatgcaagtgaccattgattagagtttatatatacttgggtcttcctaatgctatgggacgggagaagaatgctataggttttcttaataagatgtgaaaacaagtagaaagttggggtggtaatgactttcatttcaagattaggaaaggaagtcttattgaaatctattgcccaagctctttccacctatgatataagtgttttcttgcttccattaaaattgtgtttagagatgaagcaaattatgtgtaaggattggtggcggtctaaagttaatggttcgggaatttattagatgtcgtgggtttcaaagtcttcatgattttaactttggtatacttggaaaacaagggtggcacctcttaactcaaaaggactcgcttgttagtcgcat

SEQ ID NO: 185512 - DNA, 3162 bp, Cannabis indica
gtgccaatctcagttgcaatccctttatgctgaaggaattgagggatgccacgatggagtttgctgacatacaacttactatgtgttatcatgcactctagtaacaacacgagatctttgattcatctatgtcaaggtcagttatgatttgaggaaattttcgttagtctatttaccatccttctactatgttgaaactcttgtaatgaccttcaatattgttgtagaaattgagttcagattatcaagggaagcaaaaagggataatgctgtaaagcatgctcttgcagttcgtgcagctgttacttctggaaactatgttatgttcttcaggctctttaaaacagctccaaatttgaacacttgtgtaatgggtgagttttagccaagttgctatctccattttaatgaaaaatatgttaaaagaatgatcatattatataacacagtattaaaatttctgcagatctatatgttgaaaagatgcggtttaaggcagtgagctgcatatctcgatcttatcggcctacattacctgtttcttacatctctcaggttctgggcttctctagtgtgtcttctgaaaatgatgaaaaagattcagatggattagaggaatgtattgagtggttgaaggcacacggcgcatgtcttattgcggataacaatggagaggtgcagcttgatgcgaaggtatgtgtaaccccacacttgtttttccttttttttcaggggcatgtctacctagttgagtatactgacattgtatcttacttaatagttcccttacaaaaacacaaatgtaacattgcttgtggacttcatattttaaattttactttttagtatttacactattttatgaaatatttgtttttctaatagtcatcttaagaatttgatttgctaaataaatggtggaagtaatgaacttttacacttgtataccagctaccactatattttaagataccctagctgtagtataaaaaactagatttatcagccgagaaacaacacccacaaacacactagagaaatcacttacttttgtgtctcaaaccctaacctcaattagagactaattcgagataccacattagaagccaatctcccatgagtgtaaaactccttattacaactgaaatccatttatttatactcttcaactaattactgctctaacagaaacataacaacctactaattaaattcccaacagaacataatataaaccactaagacaactaagccaagttaaaactactaggcttagttagttatccctcttctcacataagtgaacctcattggagatctatcattacttccccccaatttttgaaccttgtcctcaaggttaaaatctggaaactgaagccttatgccgcagactcccaagtggcttcacaatatgataagccttgccatttgattaaaacttcgacttcctttgtcgagttggttttgctaccggatcttacaccaagaagcttctcgggctgaacaattagctcccctaccggctggtccttaatctatcatttcacgttaagggggttggggctagaccaacattccaaagagtcgagagacaattccacattatctgtacatatctcctcttgccttcttgttcttcctccattgacacttctccatttttcaactcatcctcgtgaaccattatgacattcaactcctttttgcacacgaccatagtggaacttctcactacacctaaaacacacctctttaactttcttttcttggtattcagctgtcaacttcttatagccctcctttggtatcccacagatggcttgtgtttaataacttccttaatagctgctcaaccttagtattcaaactactagaagcaataaaatccccatgtcgctgattttctgtgaaaccgagaaactcaagcagttctctggtctctgcccatcgccgtcagtttgcctgttccgatgtgcaagctcgctgccgcccgccaccgtctctgccatcttctttgccggaaccttagcttgcacggtgaccttctgcatggtctggttaatagcctccttcatagatctttgtgcttttctaaactctatttttttctccaaagattctactttcttatcagccattgtaggatagatttgctttgataccaatgatacaaactcagccaaaaacccacacacacaccagaaatcttacttaaatttcttgaaaccttagcctcaattagagactaagtccaacacattaccagaatacaaagaagaacagtagctagttcgagatagctaatctcccaagagtctaaaactcactattacaagttacaaccaaaaaccatttatttatactcttcaactaacgactgctctaacagaaaacaacctactaataaagttcttaacagaacataaccaacaactatgaactacaaaaccactatgacaactaagctaagtgaaagaacttagcttgttagttatccctctcacataagtgaacctcattggagatctatcacttgtataccagttaccactatatcttaagataccctagctgtataaaactaggtatatcagtttttcttctggttaaatagtaccagcccgtttgttgtaatgtaaggattttttatgccgcctttaccaaattggtgtcaactttttgattagcgacaactaaatactcggatatttgatgtattattgctaacatttcactatgatctgatagttcctttctgcattaataattgggaatataatttgcaggcatcgacttcgactcttttcatgccagagccggatgatgcagtggctcatggagatgccagtcttgcagtaaatgattttctgacaagagcaacattgtagttaaggtgactgtccaattgtatctaaagattatattaacaggaatacaagtgaaaatcatgcttgcccacctcaatcctttttgcaacaaagtaacagagcttatttcaagaattaagttgaagacacttggagaaagctcagacatatgctagagagaatagccaatagatgtgtatctacaattggaatatgtaactaaattcccagatagttgggatggctttaggagccagcagcagggtagcatctgatgagggatttttttttt

SEQ ID NO: 185513 - DNA, 2382 bp, Cannabis indica
tttcaagaaaaaaaatcacattttatcattccatattattttttctattgaggaatgtatttcttgacaaatactgatgtacttctgacttctgtttgttttcttgattaatacaccatatttctgctgttgagatcatttgattttactctaaacaaacacttgaaaacagttttaagatggtcttacaggtttgatattgccaggcttatatgagaattaggttttactttaatgccctcaatccaagaaaatgatttatagttatgattctaaaggtattttctcatatgttaatatctatattattatgtcaacatttcttacaggccttatccaggacactgactgtggatgaactcttttatctaaaggagcagtttgcgctcttggagccaaacaaaaatggcaccatatccttagacaacattaggatggtttgtattggacagtttggtctttgatcttgaaattactctctgtttttggttgtctttctcatttttctcctggaacaggccctgatgaaaaatgcaacagatgcaatgaaggaatcccgcatccctgatcttattgcttcggtaatttcttttgccaaagttcttatctttgattcttttgatgttcattactatgttcatactgtttgattgtcccaatgacagttgagtgcacttcaataccgaagaatggattttgaagagttttgtgctgctgcattaagtgtccatcagctagaagcactagatcgttgggaacaacatgctcgctgtgcatatgaactttttgagaaggatggtaacagggctataatcattgaagaacttgcttcagtaagtcaatatcttgatatagtggaacagtttctagtcatgatctttttatttatttaattatttgcaagatagtcatttcatcattccgttactaaatgattttggaaattattaatattcatacatattaattgactctggagtaccatggaattaagtagacataacctgtgaaaaaattagcttgaatttttctatccctctatttattaaacaaatttatttgctttttacttgtggttatgaaaatacagtattttagatctttgttcaatttggtgggtcgaactgactttatgaatcttttttccttttttttttgttgtctaggaacttggtcttggtccttcaatcccacttcatgtagtactccatgactggataaggcacacagatgggaagctaagcttccttggatttgtgaaattgttgcatggtgtgtccagccggacctttgtgaaggcacaatgaatatatatatagttacaatgagctcaagaagtgcttgtttttctatcattttaggcaactgtgatatgtgctaggtgtttggattgaaacacaggtacctaaacctgtcaattcatttcctgaggactgcgatggccatcgctaaaattctattgaagcccacttcggcacagacaatgagccttcaacttcatgcaaattctaagagaaggcttttgatcaaacctctggaactgcaggttttggtctgttttgatttcctaaaggccttgaaagctattttgatgttttccagtgtaaagttgtagtcagtttttgcccaaatggggctaatgtttatgatatattcttctcacacgatagtgatgatgctttctatacatgtttcattagtgctgtctaatgttgttgccttcatttcattcatcgccagttttcttgacagattgagctgagaccaagctaaactatgtagatgtgatcccaaccatctgaaaagccaaaattagtctttgctcttgggctttttcaggttgaatcccaaaaggaaagcagaaacgtaacaagtttgaaattataatgtcttcaattgttttcacatcagagaaatgcattagtggtattagtggtgtctaatactaccataatatttaaattaaattataataattattaaaatatatgaaatctcatatttaactatactaatattattaataatatgtagttataggcatagtctaatagttctaaatttcttattacaaacctcaagtttgaaactttttctcccttaatataaaaagcgttaccaatgtatttttgcattcagcttctggatggctggtctaaagtctaaacagtgctctgcaagggtttgtaattgtttttccatttcaaattagtgtgatcttgtggttgttgtcgtcaatgaaactttcgtatgatgcaacctttagtcaaccactcagtaacccaacacgaccaaaatgaaaatcaactagaaagagaatcaccattaattttggcgacttcacttgaaaaggcgattggaatcaatcaaaacaggagttgt

SEQ ID NO: 185514 - DNA, 5366 bp, Cannabis indica
taggcttaagagaagacagttacgtacgtacaatcattaagaattgttacaaatagtaataacactttactacatacctttcaactaagtgctccatataagtttcagtatcttgattttgtgtatgggctgtgcccgttcctttcgtgcacaatgtgagaaataaagtaaaagacttttcgtatgaatagcataagcaaaactattctcaacatcacttatttttctgcgaccatcagcaagttgcaagctaacatccggcgcaagaatatttttttcaagagtatctcccggacttctgaaaactggggatgataaacattttctgataatcttccaatctatgctcagtgtattttcatagtcatggaaagttactgggagcaacaggtagaaggtctgagaacctgatttagaaaagacatttgttcccaatggaacaaattgagaaacaaattcctcgcgatcaagaatgaccttgagaaacatttcttgaaatttctctgccagaataatctgtaaaattacagaagtagaatatcttaacaagacttcagcatattaaactttatttttttcatattaaactttatctaaacataactcccaacctcatcttcataaaattctgtcacgcctgatgggatgagctttgtcattactgtcctcccacgagccaattgaagctcaagttccattgtctcagcctcgactgggagactagccttcacaaataaaccgaattttttataaatcctatcagcaggattgggggtaaactcaatatagtatgagtgcaaacaaaaaggagtctctgtgctatgccatgactcttttagcacagcaggaactagcatctcatgcaattctacttgtccactgtcatctgcaacaaacaaaaaaaaataatttggtaaaacagcagacaagagcaagaggtaacacagttttaatgttaagtgtggcttcaccctcagggctgtcagaatcagaagagtcgagcaatgactcttccaaaatagcattcttttgcattggcagaagatagtcattaattacacccattttatgcaactcttcaactgctttgagacaagcatccttcttagcagcttctcttgaggattgtggtgcgctgaaaatagcatgtattggagcattggaaggtaaaattatatgacagactgttccttccagatcatctagaaaaaagaactttggttttgggtcaaaatacctgtaagcacagacaggtggatcaaatattgtcaaataaaattttcaaaagtttttaagtactcaaaattatgacagaactaacaaaataaaaacaatgcattcagcacaagagcatactcatcatgtggaagttttgaacaatattggtgcagtaatgatatgctataactggaacttatggaagcaccagaagaatcaactctgtatactctttcttctaatccaataaacgtctcatttgatgatctgacactgatttcacagttcatatgacgctcatcttgtttgaaattttctatcagatctagctctttctgatcacccctgcaacagcaataattacaaaaattaatttaaagactttttcctaaaaaagaaaaaacaaggaaacaaaccattgtaccaagaacatatgctttgaaaaagcacctgtccaccaaaaatgcatattcagactctgccattcgtgcacgacctcttgattgtataaagctagaaacagtctctgggagatcaaatcgtatcaccaggcagcatgtctgaatatcaagtccttcttcacctactttagttgcaatcaatagattcaactgccaaaaaaatcagccatattgacatatatacatgaaaaagaaggcaaaaaaatttcaacaactacatcaaaaattagtatagcagataaaaaatgatatgttattatgtattctaattttccacttggaattgggatctagcaggtaagatcaatcatgacttcatgatagagaaagtaggccttggggaagatattcttcaagataaattagtataaaagaatctgacgttagcaagaaggcataaagaactacctctccatcccgaaacttctctagaatgatgttcatggtcttgcgagacatacccttcagtccagcattcacccctacaagaaaattacttttccaatatgccaaaaactcaaggctttgcaggatgcatgctaaggatcttgcagtgacaatcctattaacaaaaattatacatttcatatttggttgtaccctgaaaagttaagagaaaaccatattaaataaataaccacagaacattaaatatatccttctttttaataagccataatagaaagacagctagaaaaagtaaatccatccattttttttatgaatactatcaatttcagtatatcattaataatgaagagaagtcatgaataaaatgaactccagtaaacacaaatgttcctattctgacaatacttcagcctgcataaatttttggtacacattgcagacttctaagaaaaatcaactacataattctatgtcagaaaaaattcccctaaacaagctggaaacattatctcttttctgcttagaactagcagatttacctaataaatactacagaaatctagttacgaaaagatatttaaccctttattgattttgggctcaacaccaatagttccaaaaatcatgccaagcccctacttaagaggaaaaaggtcacatgtccatgagtgacctcctcccaaatatattgagagccgtcacttttggcggaggaaaaccatggttacaaacatcaaaaaagaactgtacaagagctcttgatttcaaaaaggaattttaatgtttctcttcccattttgaatgacccactatcttcaaccatctttcacagttcaccctcaataactccaaacactatctcattcttaaatattattatgttgccactttgatgagtgttggaaaatctaaatgttatggtagatcagaagtgaattgcaattgtacattttatagcttactgcttttgtatcatagctgagatatactgtttcccttttacttctagtttccttggtccgtcatgttttatttttgtttccaaagtagaaaatggtgggattaaatcgaatttagagaaagaatactgataatctttctaggttatttataactttcttcatggagtaagatttgtcagagtgatctcacttcatattaaaagaaatgtttgtgcagaacaaatacaaacctgacagaggaaagaatttcaataagttttaaaagcttgcttgagaaaaatggctctttcaatatctccaagcgagatagatcagatccaacatcatctacaataatcacaaatatcctaatcagtaagaataccaaaatacggtcccagttgttcgtatcaaattctttttccagttactaacttagagcctatgtcattcaaaagcaaatacaccaaaagtattacacactacaaaaacaaaatatacaaaataaaaccacactatattgttaaattaccatactaatagaaaaaaatctagaagtaaataacaataaactgattttaatacctctcctacagtcagaatcaaggacatttgcagccttggaaagatataaatcacatgaagaatgatcacgataattatcttctgcctctattagtgtattccgttcagattcatcgcccttcaaaagaatgcgaattgccttgaaagaagggaaaacagaaaattaagtttaaacatgccagcaaccaaagaacatacaggcaaaaataactagttcagactcaactataagagagcataatggttaatatcaaataatacttggttaatttaaacataagagagcatagtaagctgaatgctataaagactactacagaaaagagaactctaaaaaagtaaaattaataaataaatagatcccagcaacaagaacttagcttagaaatataacatagagagagaggggaatgttcttaggtaggagcatcacttttgtccctatcgtaggggcaacactcttgcccttacagtagaggcattttctgttttcaatatttgaggaagttataacccatattcttttatacgacattgtacacaatagttataataggcatgatgccaatttttgaaaaattatgaataatttatgatgccaaaaatagaatttaacaatcggctacacacgtgtttgcgagtgcaacatataattttaaattttatttttgacatcttaaattattcggaatttcttaagactagtgagtgtattataactacaatataatataaaaaatcgggatataatttctctaggtgtcgaaaacagaaaaatctcctacgataggagcaaaagtgatgcacctacctaagaagcttcatatataatatattctatttataaggagtgaatgcaatggggtacacaaaattgcgcctatggtagggtacaatctaatcgaggcacttaaaatatattttttttccaacatttttttatgatagtattcattttggttgctataggccatcttcaaattttcaagaaattttgtacaatttaccgtgcccaaatcagagttcaaatagcttgttgcatgtgtgcctttttttttttttatacgcgtggaaaacaattgtttacactctgatttagacacagtaaattgtttgaactttctaaaaaattgaagagggtctcctacgactacaatgaataccgtcacaaaaaaatggagaaatatcctagaatttcttcaattagaccatgcccatcataggtatcttttgtgtaccctatttaatcactccctatatttatattaggaagaagagcataccctaatttaacttttataagaaaatattaagagaacaaagagattttagtggattataagtgcttgcctgtaatgctccccaaacgccaagacttctcaaggagaatatgatattatcatgtagtctatttagcagtttctttgtgctcttcagactttcaaaattgtctttaattttactaccaagtgttgatatgcactgtattacatcaaaagaaaatgcaaaaagatgtgaagacatttgcaaacactattcctttctaaagataggcatagtgtgagaataacatacctcacgtttcacgctttcaagtttactattataagccatgtaagggttggataacccattggtaggaccataatgatatactttaacttttgcagatgccacaaaactatccaggtcttttttatctttaactgaatatacctttacaataaggttgaaaaggagatgttagatt

SEQ ID NO: 185515 - DNA, 1981 bp, Cannabis indica
acacaaccaaacaagctcttagtttccttgactttttaacttttgtttatgagcaagaccgaatggtgttagacttaacttaatgggaaacactaaccaagtgacattttatattttatttatgctattttctcaacccaatggtgttagacttggcttggatgccaaccattcaatctggcttttaaatttttaatccaataggttttgccactttttagaaaatagcataaatataatatcagaacagcgagtcgttaagaaaatatcactaccaaggcaatgaattaaaccagggccttattccataattgtgccacataaattgaatcagagtggggacaaattagatctatatccactcaaaaattatgagtaatatttctgtacggtaatatactaggaatatgaagtagaaactcaaaccagagaaatttcatatggcatcaattttgggtgccataatctctagaagtcccttgggattgtccacatgaacccagtggcctgactttggaagtacatgagctgtgacttttccctctgacggacctctttctagagctgaaagagcttcgagtcgcttaatggtatcctggtcccagctatcactttcctcggcacgcacaatatctatctccatacctttcggagggtgctctaacagagtccaatatgacttctccctacaaaatttgccatgactcatcgtactgtatgctatacaaactcctaaaactaccatttcaactatctatttacttcatcatctattaaaatgattttgtaagtatgtcaagaccaagggttacctgtaagaccgtagcatcccagctgcgccatcaagattaaatgcccatgtcatgttgtctccagatttcttgaggttggtgcctatccattctgatagtgactttgagaacccaagtccaataaggtgatttacaagccacctgaagcaatcaaaaacaagaaaagttatgagaaaggcatatcgtgaagaaacaataaatttaaaccaaagcaacaattgagatgttattgaataaagtatttacccatgtcaaattactttcaatgaaatatagtaagtaccagtaactatcctcaaagtgatggaacagaacagaagtcagttataggactttggcaatatgaattggcatatatgcggcaacaaaccaaatcaatgggaaattgagcttcccaaaactaaatttgaatccaatagcatgtaaattggtcaactaatgaggtccaagattttgttggaagaaaaactacacgattgcaggggatcaccacaagcatgtgaagatattctcagggcagtgatttgatgacaatacattttcaaaggggaaattgaaccattttggattataaaaattaacaaaaattcctatgctataaattttccttctgatatgggttttcctacaatcttcaagaaagcaggcatatatcactatctgtcagctaagttttatttgtctcttccaagtatgagttttattttctcccaaggaggattgactgatgtaggaatttcgtagattagccgtgtgtcatcggtattatattggatttcttagtcttttagtagtactttttctgtaaaggcccattatacattgagtttcaacccatttctcgtcaaaagtaataagtatatgtcacatttcttaaatattccaacttctagaaagagtcttaaattgctatcactctgatgcacccaatgggcactttcctacatcataagttaaattaaacattaaaatttacagcccatacactaagataatagtggtactatatcttatgagaaagatgtgacaaccaactcaatgagcttataattttgacttgagttgtagtttaacttccttagactctagtgctcacactcatataaactttcttacaaccatcagatgataaataaccaaaaagctctcgcccgtataacagagtttaa

SEQ ID NO: 185516 - DNA, 5657 bp, Cannabis indica
ataaaaaaaaatcaaaacaaatgggaaagtgcaaaccaagacctaaaaacctcaagtgttctcaagacaggaaaatatagtagatccttattgttatagaatagtggatatcttattagtaggtgttttgacttatctttcccggtctatgcagtgggctgtacacatcttgaagaaaccaattgttacagtggattggttgtatcagtgctggaatgagcatcgaattgttccccaggaatcatttagactcctccctttttctggattgaatatttgtgtcaccgggattccaggaggtatttaaactatgctttctggtcagtgtgtcgtgttgcagtgtgtatgtgtgtgtgctgctaagtgggtgtacctaacctttttagatttgtgtagagaatggaaaactattgtataggggttgtagatggttgtacctaacctttttttctgaggcaaagtgggtgtactttggcctagaagtcatgttttgttaataattgtaaccatggttttctcccaccacaagggaggcttctaatatttatcgggatggatcctgtcaatgacaaaaggatcctctctttttcaaaaaaaatgtgtgtgtgctgctaagttgtattgttttttcagatgaaaggaagaaaatggaaaaagttattatacaacagggtgggaaatattctgctgaacttaccaagaagtgcacgcacctaatttgtgatatatccttttgttgctccctttgagaagtggttttaaatacatgcaaattttctaaatctgttatgatttaatgtacacccaattgtatgtgatttaactatgggctgcacagatctgttttctgtttgtttctgtatgttttcttttttagattattattcaagtaaccgacaaagtgcaataagattctcgtcaaattttgtatttctgtacgatgacttgtgtgattattattattattattaatattattctacaaagtagttatgaaatctaatcctggcgctcttacttgatgtcatgtttgctcatcttgtaattgtgttttcttcattattactttatgatcacttctctttagcacctattttctctttgagctatctcttatgaatatattcaagcatacatggatttgtactcttgactgtttgtaagctcctgaaggcgacaaatataaggtggcccggagatggggccacattcatgttattactcggaagtggtttgatcagtctgtagtcagaagaggtaatccttgctatatattttgatagaatttgaattcacatgttttggataattaatctatgtacttatttttacgagattttattatttgcatctgacgttagatatgttttctttctcctggtgattagcacgtctaaatgaggagtcctatcctgttcagggtgtttctgtatcttcaaataaaggtataagaggtgtaaaagtgcagcttagccatagcaaggatattagcaatttgcaatctgcaccatcatcagtggctacggactccaattcgtcagtgattcttagtgctgggtttatggatccagatgtagaagctaccctctcacaaaggatgtgctctaaattccctgttgctccagtcaatgtaaaacagagtgacagtgaacaacctagtttgcattctcaaataagtgaaataaatacgataaaccttgatgattgtgtagccaatgattctcaatctgatgacagtgagctctacttgtctgagtgtagaatattacttgttggttttgaagcttcagaaatgcgcaaactagtatatgattcgaagaggagggggctcacgatatgctatattcgatgataaattgacacatgtagtggttggattcccttcggagatgtaagttttcttatgctacctttctgtgtgtttgtcttgttgggcgctatttcctttggtgctagtacaagaacatagcatatcgtgaaggtttgtgtaacttatttattttttaattatccttacaagcttatgcaatttcccagtgaaaagaaggaggcaaggagtcttgcagcttttggtaccattcaggtggttaggaccacctggctcgaagattgtgatcgtaagaaaaaagaggtccatgttgagcaaagacatattgcacacgatttactttttcctaaaggtttgttaattattttgtaaaagtccttcctcttgtattgctggtttgtgaagttttgtagactgctattggtgttggggtttcaatgatcagtatgctcgttctgatatgtctattatgcttgtttctctattctctaattacagtccccggttttatggctcttaaattttcttgaaggagcaattacaggattgaccagtctaaatcaagctagagtctctgctgttcatccgatcatgccatctaatcctttatctggtagcataagaggtggaattggaatgccattaccattgggcggaagcaaaggaaaaaaaccagaaatcaacacgactgatgtcaacattatggcaactgcagcaaaatcatcgcagcagagtaacgttactgctgtcaataaaaaaagtaagggtcgagtaagtgataagaataaagctccaaagagagtgcaacttggttcaagcactcaaaacggaaaaacttcaaatgtattttctggtaaaatattcggattctcaagttcctttcctgaagagcgggtaagtgttttacattcatatgtatcatatgggacaatgtttggggttttgttttaaataatatctaccaagtgattctggaattttctttccagaaaggtgaaattgttcaatggataaaacaaggaggaggtgaggtagttgatgcttttctgaagcagagtgtaaacttcacagttgagtgtcatggtgtgataccaaagttagtttatgcttcccaaactacatgtgtatcaagccactggatccgctcgtgtttagaggtgtgatgcataattttaaatatgcctttttactaaaatctactgctggttcaatctgtttttctggggataatatcttgatgaaggtggtctttgggtctttatatgttactctttgaatgcaatggagagaggatatttgcttcatgtttgtaaaagttgtcacctgagcactgacttgtatctggtgtattattattttttatcttttttttatgacaaacaagcttgctgttttttttgttagattatttagtaagatatgattggcaagtggatggattgtgggttgtgatagtcgtagttcatgtttaaccaattacgatgctttattttgtcgggcagtgagtatgacaaaagtaggaatgaagaggacaaccacattgattgtacaggccatttttctcaactaattgttaatatggtatcgcacaaatatttgtttcaaaatcaaacaagactttagtgctactttttatcccaataaaattatttctaaatatgactttgaccagtattgatggtctaccatctaatccaagggcttaattctttaaattagcagtacatgccattttatgttgtcatttagggtcttcttattgtccctaatcacacttggctgagaaaataatgtaatctagtaagtgttttgttcagtttttttagcttacacttttgttgtctttgtggagatactttatcctcctttttttggattccgttctctatttaataaaatgtttaagaaattggattagtttgttattagtgaatatcaacgggcaatccaatctttacatttatcattctgataatctgaattgttttatgatatatatttggaagctgattgtgtgaaaatgttgcttttgaaggatgggtgcttgcttaatgttaatgatcacattctatattctccacttccctgctggattcctttccctggatttgaaaattttcggttttgtgtttcacaatatgaagagaaagatcggctgcttttgagaaatttatgctttgttcttggaaccaaattagtagagagattgacaaataaggtcactcatctcatttgcaagtttgcaagtggaccaaagtatgaggctgcttgtaaatgggggatacatacaattacctctgattggatttatgattgtgtcaagcaggtattgtttcgtactatggatacatacaattacctctgattggatttgtgattgtgtcaagcagacattcttttgtttttgttgacatactgaaataattatgcttaagtctgcactttttgacagaacaaactggttcctcttaatcaattttctccaaaagaaattaccgctgaagaccaagaggctggattgtgcactgtgagccagtttcctacacaagctgttcgaatgatttctggagacattccatccccgtttccaagtcaattggaagagactaaaacatcattaactggaattattggtagtagaaccaaaagttttagagaaggagctaaacatacaagtgcattgtataaaaaggcaaggcttttggaagatgatggtcaaagggatctgctttcttctgcggtacatccaagtgtttccatcacgaatgctaattccatcagagatgatgtgtccaaggataccgatgaagtgtctcatgttgttcctgatgtagcttctgcaattgaggacttgttagagcagactagtaaggtaagtacactggctattccttaattgcttttctgaaacgagtttatttgtcttctgatttatgtccatcttttcttttgcacagattcatgatcagaagtcaccagggagtactggttgcgatgaaagtgtattcttgtgtcctttttttgctacctttttctattttctatttattattgttttccacattagctgtattccttgattatataacagcttttaccatccaattgctcaactctcggtcaagaccattcagatacacattccatcgttggcttatctaaacactggttaaacaggtggttgcatcttatttacgtttgctacatgtgttacctttataggatgattaaggaagataaagaggtagaatgttttacttggtgttgaattgtctaattagatggatattctgttcctttaaggaaaactgcagatctacttaaaaagtgtcaataatcaaatcactctcccacccagttcacctatttatgtacagatatacgtctacatacatgtacataaataaatatttttagcaaccacaaaggcaattgttttgtagctaaagtaactgcatatataattttagttatcactcgaacttgttttttctttttttgaggtagaagatttttcatcaaccacagatgggtgatttactgaacttctgtatagccttatgctgtgtggattgcatataaatgaatttgcaaaatttaccttatttggctaagatgtttgagatcatttataggagtaaagatgacaaccacaattctttggagatggaaacatgggcatgcatgatggatttagtgaaacacagaccgattcccaggtttaatccttactcattgcaattttttggctgtttgcactgaactacagatttgtagtgtttaatctgtatatgtacgtcggattgcaatttcttgcctatttgttcgc

SEQ ID NO: 185517 - DNA, 2964 bp, Cannabis indica
taaataaataaataaataagacatatgattcggtgtattacattcctttaagtcatgtgattgttttgtaactcaaaatcatttcaaacacacaaaaaaaaaaggtcaaacatttgaccgtatcaaagaataatgatataatatttttgtccacagtaatatatgtatatatatggtcgcgaatattgtatgtctaatatatacgtgtattttttttttgatagtagatacatacgcgtattttaataaatgataatctatgaatagttaatatattcctctagaagatcccatgacttcgacaatttcgatttaataaacatagccagtaagagaaaatgacctattgtctgtgaattagaatgggaaattattcgttttcaaaaattattcatagattatcaggttgtacttgccacaaaaaaattatatttaattgtattgaggtatgctgacactaacacttagaatgggggcagaaatcgaaccacagagcaaactaaaaagctcattagctaaaaaaaaaacttgagctaaaattaagatcttaaaacccaaccgaaagatagctagccaccccgatcttaaaaaaaaaaaaaatcattagttgacatctttattctttattgctgttattggcatttatcaattaaaatatcatgttaataattttgtattattcatttaatttttattccaaagtactaattaatgaaacaaaaatttacccaaggcatacgtatttattaaatggatgatggtatgtatcatatttatcatgaaagattgagaaaatgtacattaattaactccacacactgaaacctatccaaatttacttttcatcaataaaaacagtaagtataaaatatatctcactacatatcagataggtcatccgaaacagtggtagcagtaacaatcggccggttcctccgccgggactggcggcggtggcttcctccaaacttcaaccgaccagtctccttgaacagccgcttctcggaggggacaatgacgcactctggcggcggcacagggtacctcaacgtgtcatagcagtaagagtagtacatataacgctgccggaacttgcgcattgcggagcgtcgttcgggcgtgatggtggcgtagtcttctctctcaagtgcggcactcttctcggcgcaagccacggtggtctgaacttcttgaattgggtttaccgggcagccttctagaactaagtctttgaattctgccacaaaaggtgcatatttgtagttcactttgtattttccaccattggtggcccaactacttgcgtcccatattgttgcatataaagacattggttttgttgggaagtctccacccatttcttcacttcttaccacttctcttattggaacttcatcaatgtaaaatctgcatgcaaatatttattatattaattttcataccagaacataataacaaaatatatatatatgtaatattgggatgttaattaattagttggtaggagtaactaatcaattgtgccagctatcctaataaataattaaacactgtctaagttttgtgatattttcttagagtatcataattatgaattgaaattagttattgttagctagtttggtgaatttgttcgcaacacatgcatttgccacatggaatagaaatcaatacatataaatagatgttatccggttgagttagataaactaatatttagctagagttttgtttaaagaaagggaatacttgagttcacatgcttaattaagtttgaagaatatatataaaaaaaaaacaattcaataagaagagttcacatgcattatttatagtccacataagataacccaatgcatatcttcatttttctggtttattaagtgtgtggtccagcatatactctattggcatttaatcctaattgatcatgaattaataattcgttacgtatttattttggcaaccctcatcatattattatgtattttatatctatacatacacatatatggtcaatacaattcgataatttccatatactaatttcataattggccaagaaaatccatttgcgcaaaaaagcaattaatgtcacgcatgcacatacatgtatatatatatatataaatattcatttacaaatgtaataaataataattctaaatatatatttatataaatatagatttcacaagaagaaacatattcgaacatatcgacttttatatactagtggggaaaggaaaaagtgcacacgcaaaatgacccatagataattagctttctttctttctatccctctcataaggtcaaacaatatatagtggacagccaatatagcccaaagtttgtaaagcatacccatgctgaagttggttattaataacagttattcacgctcaaacttttctaagaaaacaaaaatccatacaaacaatgtatttcagttttatttagttctaactcatataacacattatgatgtttggataaaataaatcaatctttttgttttaagtcaaaattaaataattaattaataacaaatcacatacgcgcatgcgttatctgactaatgacaatgtcaaaatatattacgtattgaaatcactctcattttagtcatttatatcaatgaattattgggattcgaaaattaaaacatgaaaatattaattgaaatataattaattaagaaaagaaactaatttttatttaaaaaataaaaagagaaagaactacttacataatgatgtttggggtccacagaatgctatagcggtggaactctttggtgggatcgaaccaaaggcggtagcgttcttctcggccacggctcgtactgccatttccgtacagattagtctgaaacctccatggctttccttctacattgcctaagaactcaaagtccagctcatcatgagacttttcaaatacgtcaccgtttgatgtctgtaa

SEQ ID NO: 185518 - DNA, 5866 bp, Cannabis indica
gttggttttgtagacatgtaatcaagaagataaaagtgaagagacttccttggttcagcaatcaagacgtcctaacctatcctccttgcaaattcctgcaaggtctctagaaaattctctctctgattttatgagaaatgacaattcttctgtatctagtcctgcttctactagagctggaccttccccccagaccaaattcagctaaggtcaagtcatccataaaaggcctgtttcctcaaagaagtctgaaagtgaaaaatttacctcaggatgttgagaggactgttcttattataccggagatgcttccatcagatggttcttgtgaaaggcctactacttcaaggtcgttttctcttaataaggttttttctcttcatcaagtaaagtaacaagttctttaccagttacaccaatggcaaattcaggcctagagcatgtacaggatggacatctggagaatcgttctgagttttctgtacgtgacctctttctactgtttccatcaccatttcaaattacaaatgcactagtccagtatgttaatgagaagggtgtgttttagaaattctcataatgaacatgattgcttgtattgctttgttctcttcatggtttcatggtcaaactattgcagactattgaagtcaatcatcatatcacccgctcattatcagtgccagtaaatgttaagactagaagtttaaggcgaatagattctggtggtgtatttcgtgtaatatcagctactccgcgtcctgcaactgttgatggagcatcccgaaatgatgccccagtgacagaagctggttagttcactttctttgtctgaatggagtgtgtttcttggtgtgtgattgtgtgtgtgttattttccaatataggaaggtattatattattaatatgaattactaaaatcttgtaaaaaaacaattcctatactaatgaaagttaaacttacaaggccagaaagtagcaattttgaaatccttagaaaatcagaaaagcaaagttctttaactcctcaacacttctcaatcaaatagctgcccaaaattaaataatttcacagatttcaactgaagttgtcatttctcagtaaaaatctttggtttatttcaccccaaaatggccaccatgaaagtcgaactccataacaatttcccctttctgttactgatcaaccagctgttcttaaaagagattagcacgagataatggaatcacctgacaactctttcagaatgattttaattcacaacatattttatgcacagttttgtggttgctaataagtagaaaatacgataattactagttagtaatttacttttctgactatgagcataatttgcgtccactacttgctaatttcagctagtgaagatgctggtgaagatattcctgaggaagaagctgtttgtaggatttgttttgtcgagcttggggaaggtggtgatacactaaaaaatggagtgcagctgcaaaggagagttggcacttgcacaccaagagtgtgcagtgaaatggtttagcattaaaggcaacaagacctgtgatgtctgcaagcgagatgttaaaaatctgcctgtgacattgctaaaaatacagaaccctcctcaaattcttagacggccgcctccagcacctcagcatagggaatctatccgttataggcaagtcaattattctattgttgtaaattttaatctttagactttaaattttttaattttgcattaggacatggcataggaagattagccacagtacaatgagaataccatcatcttttgccagatctaccatagaaagtgaaatttgcaaaaagtttagttaggtatgagttggttgtggttctgtagaagttaaaaagaaaagagtacaaaagaaaaataaaataaatatataacgttagggctgtggcatgaacgcatctttgtatttttataattccaagtaagccctgtctgtctttttttttttttgtttcatagctataagaaccacatcttcttacattttactgtggaaaaaagtgtatgtacagtgtccattgcctgatatgttgaccaaagatttgtttattttcatttagaattatgtttggtttatggttaacaggatctggcaggatattccagttcttgtcatggttagcatgcttgcctatttctgctttttggagcaacttctggtaacatatctttccttgttttcaacttcgatcttgttattttatgaggacacgtgtaggtggcagcattagttgctgccttgctggaatatataatgtcatgtatctagcaaacttcatattagattttcccatgataatgtatgtttagttgagttcttggtaaatttcccaagattttttcattcgtaggactacaccatgaatagtggtcatttgtatatttacatgtattggggatgtagggctgaagaaaatggaatttgctcttctgttatctctattagaaagtaaatcataagtgacccaatatcttcaattggaacacacagttgactttagcctctccttccactacattcaaaaccatggagggaattgggtcccacccaggtgctgcttatgtatgcacttgttgacatataatgtgttaatttcttaaccattgctattctcaatttcttttgaacaggtatctgatttgggtcctcgggcactggcaatttctttaccattctcttgtgttttgggcctcctttcttcaatgattgcttccactatgggtgagttctagtgccttctttctcttatagtgacatgtttttatattgcttgtctaactgataaaaactttttctttgtttttttttaaactaggatccccgtctaacccgacaattaaccaataaaaacttattaacttgacgatactataatttatagaatcttgggtttcaccgctccctcagcgggcattatttcctatattttgttactcaagatctttacttgtaatggtgtcagtgagcaggagttacatatgggcttatgcttctttccagtttgccatcgtcatcttgtttgcccacatattttataccattgtaagcagagtagtgtttactattctgttttttttttatataattttttttttatttccacaccatgcattcatgcaggtaatgtaatataacttctctggggagagggatggatatcttatgacgttatttttcaacttgcagcttaatgtaaacccaatcctttcagttcttctttcctcattcactggctttgggattgcaatcagcacaaatactttgctagttgagtaccttagatggagaactagcaggcagatgcaatccacccgccaacaaattgaaattgcattacagcaacaacaacaacgacaccttcaccagcagtggcagcagcaagagcagtatcaacaccatcaaccacaagaattcagagaaatcctgcaacagcaagaacgccatcaagaaaatactcgagagcaccaacaaccaccattggaagtatcaaatatgggcccccttcctagttccagacatcaaataattctgactacatagaacatcttttgaccttcggctcattgaaaaatgaattcaaatctcgaccaagtataaaaggcttagctttcgcaatggtcttattggaagtgtggcagttttggaatttgtattctctcctttaatgtgtaggaagagattccacctttaacagctatcaagtgcattgggtttgagcctatcttgaggttttgttctggccattggtttgctttgtttgtccagaaagagtggttttggtctgaatagtaaatgtatatggtgtatctttgcagttcacacattgtaaaataatagacattctttatccattcatattgttatccgaacatttatatatatatatatataatccctcaagttgcttgtgaaggattacataccttacttaacacattgtaggtcattggatcttagtatagaattcatttttggtatccaatgattgtgaattgtcaattgaaaagcaaaggttgagaaaaaaaaaaatactgatattgttttttttttgctggaacaaaagctcattatataagaatagaaatgggatccacatgaaacaatccctctcctttgatcagtcaaacaagaggcattagatctagctacactagccaaattgtccacataagctaggttgtcccgacataaagcaaatagacattgaaggtgaaaaatggagaacactatagacattttttagtttgagcaaccttaataccttagaacatctccacatcatctaaatatgtaatgttttatttatctttttcacatcatttttctaagtatcatgttttctctggcaaattatgcttgttgttagtttatctgttggctttcttgttgcatatgatctgtctttattagttgtccatctataactgtgttagttgcatctgtttaatctgctctcactttagttttgctacgttagtttttagtttgttttatttattgttatgtttcttgccagcgtggcggagctgttgttggttgttggtttagtcagttatccagtattcttagtataaaaagtagtggtagctttttctaactaactcctcatatttgttagaatcattcttagattcttgctctactagggcaaattttgtacattttgtggtttttgcaggttgtaaattattggatcttcaaggttaaagaaggagtattaatctgtgatgtttgatggaagttcagactgatctgttgaagagagtttagcttgctagaagaaaggggatgttgtcttctcagctataagtagatttagatctttgttcttgagtgtattcaagtattttggtaactttgtatgaaatcattaaagtttacattgtttgaattgtatattaaaactagagaaagtatgtttgaataatttcttagtgaaggttatcttacccggttcttggagacccaagcactacccggttggaatgagtttccaatgcaagggatgcttgtaattacgatgtccaattgattttttgtttttatacttgtgatagaaaacctaatcgtgatttagtagcttttggtatattttgaactttcatttagtattagagccatcctttacatgtgaagaaattgtgatcttgtagctaagtaattctggttaggtttgtcttgttatttaaataggttctggtgtaagttcttttcttctttcttgatctgttaattctggaaatctaatcctcttcgagattcatctcggagtgcaccatagttattggcttggatttatgtaggttgacaggaaatggagatgtttaaagaaagaggatctacttctcatccaccaatgctagaaggatctaattatccctattggaagaccaagctgagagccttcttgaaagatgtagatgaacgagtatggatggttgttgccgaaggttggtctccacctactattgttgatgatgaggggaaaagaagaaaaaatccagtgaatggtcaactgatgagatgaaacaagcaaattttaattctaaagcttttcacgctctctttaatgttgtctccacaaatcagttgaaagtaatttgattgtgagattgctaaggatgctcgggagaagttgaagataaagaatgaaggaactgaggcaattaaaaaggctaggttaagagggttagccaagtcctttgaaaatgtgcctatggatgaaaatgaagcagtttctgagtttcatgctaaactttgatatttctaatgaatcttatacccttggaaatgcctattccaataaaaaattgatcaaaaaag

SEQ ID NO: 185519 - DNA, 3706 bp, Cannabis indica
taataatttctctataattttttctcatcttttcactctccaagctcatcttcactaaacaagaacttagactcattttgaaaaaaaaatgtttcaatatatttgagacagacaaaacttaacatgtaaattaaaaaacgaagaaattactataatcttgtaaataatattgagcatgagtggaagcaattaatttgagttatatttgtatgatttttttttacaacgcacaacttggataataagaatttttttccagaaaacttgtgtgtattatcgaccttgcactaaggtagttgttaacttgttgactgatgatgaaggtttattgggagaggtagagatagaaggagaaatccatgaaacaaaggctggttgcttgggatttgacaaaaatgttgtctcatttccaagcatgaataccacatctggcatggtggggcgatcacttgagctctcttgtacgcacaatagagccacgttaacacacctcatgaattcatttctattgcaactctcacttaaccttgcatccattagatccaatgccttgttatctttccacaatttccatgcctacaaacaagtaataattgagaaatatcattttgttgatgaccaaaataaagaaaacaaaatattataatgtgaaaatgcattattatttttatatgatatcataatatagagattaaatataaaatgcaacaaaaacaaataagtgttggtagaatgttcttttgtcaaatcgtgtaacataaaattgtggggtgaacaaatctggataatattttctaactcctacaaaattacgcaattaaaactttaaaaaagaggttacacgatcttaattttgaatctcttgaagctataatgtttatatttgttagagaaggctaatagattgcaaagcgtagaacaaaagttcgaaaagtggtacgagcagcctaggcgatatacccaatgtatgacgatatcacaactgccatgattttttcaaaaactttggtttggagcttctacaaagtatattgggcgattctaacattttgttaagaactctattcaaatgcgctaacaactatgcgattagtgaattttgaaacacaaaattctaagtttataataaaaatataatatttttttttatctctctttttcttttacattatttatgacactcttattccgaatactattataaatatataatttgttttaattataaattatatagttttatttactttaattttttaataaaaaaaaaaaaagatagaataatgtcattgtatgacctcaataaaaattcttagaatgacatttatttctctctaatggtatagtaccctcatattttgtcgacttagatgtctacctcagcaaacatttccaaaatttaatcattggatatgctcttgtatgtattttaacacacacacacactcaattgtactaacgtgttctcaaaatataagtatagactaatctgacaggtaagctagtaacgaacaagtctaagaactacaaacaatacaattataggctaaaacataaccatctcaaaattgagaccaatttatctataatcaaacaaataattttgacttagattaagatataacagtaagtttatgatatcttttctactatcaatattggtccagtctgatgtataatcaataatacatttaatccaagtttactttactaatgtcctagaaaagacattccacttattcaagtgtaagtaaatcacatcatttattatcacgttagtgtaaatttagtatactgataaatcgtaagaataaatagtttgaaacatatacagtcacaattattttttattgtgatgatatcactataattgttaatatgttctgaatttaataaattaatatatgataagattagcatataatttcttatttttattaataattaataagattatatttaaacttttttattataaacgcaatttttctataacaaatccacatatttagaaaacatatacatgggttgattatttaacagagcaattttgattaagaatacctttgtgcttatggaataagaaaaatgaacttttgcgaaaattcttaacctttatttaaattggtgatctcactactctacacttattatgattgtgtaagtatttttctccttattgtatagttcttaaatcttgtatgttgttgtaattctaattagtttgtaattattatcttcattttcttttacttctccatttacttgtaaatttatgcataagctacttgtaggagaatttagtaacttgggtattgctactgttagtctaatctggtgacttgttagatgttgtaggtctatccaatcaatttttgagttagtttttacagttaactaacttgggttcctctcttactaagtttcctatataaggctttgtgtattacttctcaaggtaatgatctagaaaagaatttagatgataattaagtttgtaatgagagaggagggttgttaaagagcatgtgtgtgtttgatcacatctctctcaagtgagttgattggtaaggtacgagacacccttgataatgagattgaactctgcattctcctctgtattcctatattgttgaagatcaaataaagcttggccaaagggcagttcctcctaaggattagtcaccacaaaaagagtgatgaacctcgttaaatcttgtctctatttcattaagtttttttgcatttatttttttggttgatgtcattgtttgattcaaccattctagtactttagttcttgttttatttgattcttcataagtgttaattcaccgcaaatggtattagagctatacgattagatcaaggattcaagaatcaagttttggagtttcaaaaactcatcaagatttaagaactcattaagaatggctactgctagatatgaagtagacaagttcacatgactgaatgactttgggttatggaggattaagatgaaagtgctcatttcgcatcaaggtcttgtagatgcgatttaggctactgattctaaggaagatgaagatgtgaagaagatttctcaaaagattgatattaaaggaaatagtgctattatttttagtttaggagatgaattccttagagaagttgtcgatgaagactctgctttgggattatggaacaatcttggatcgatttacatgatgaaattttcggccaataagctctatttgaagaaacttttttacacgatgaagatggataaaactaaagggcttcaaaggcatctatacaatttaacaatttaattctgaacctaaataattttggggtcagaattgaagaagaagatcaagctatacttctaatttgttcactctaaggtatatgaacactttgtcgataccatattttatgggaaaaatacactaactatgtctgaagttaaagcaaccttgaatcagaaggtaattcaagtggtgatggtttgtttgttcgtggaagaacagagaagaaagaattcaagaaacccaagattgggtacaagctaaggtcaaattcaaaaacaccaactggaaagaagtgttattattgcaaaaaagatgaacacttttgagatggatgtatgtcattgaaggctaagttgaagagagacaacaatcaagggaagaataagtacaagaatcaaggagaagctgat

SEQ ID NO: 185520 - DNA, 4785 bp, Cannabis indica
ttgctttcatttaaatgtattttctgggagaccaaacttcgtattcctttactcatcaagacaaagttgtttttcattttctctgaaaaaaaagtatgaagtaacttcagctaccttggttggtgaaccaccatggagacattgactccctcaagagcttcacgtctaagtgctctaagaagttgctgcgaggttgcactgtccaaaccagatgtaggttcatccaagatcaaaagtgaaggctccataaccatctccaatccaacattaactctttttctctgacctccagatattcctcgcttctctactgtcccgaccaaggaattccttactgcctggagccccaaagactcaataactctttcaacaactaaaactttatctggtttctccaagtccactgacagtcttcacaatcacacacataagcaaaaacattacagaagtcagtcataagatggacatggacaagacagttaccatgcacagtacatttaacctgagcaatgacaataattaccagaaacaacataatactaattcaatgttatctaacaatacattcacaaaaatagttatatcaaggcatagattttaatttaaacaactttagttcacataactcaagccataaatcgacaaaataatgcaaaataatcagcataactatatgtcaagtttagttgtttgagtttgcaaagagctcacagtgacattgcatacctgcattttgcactgaaccatagattctcttccactgtcaagtttccatgaacaatatcatcttggggcacaaaacctatgacttttttataagaatgaattgattcgttttttccatttattaaaattaaaccagacattttgcatccaatcgcctttcctgctatagctgaaagaagtgttgtttttccagcacctgatgggcccatgacagatgtaatgcgaccaggcttgatattaccggtaacacatcttaaaatatgtttgtcttttcctttcaaagtaagggttagatctttaaaagaaatctccattaaaggccgtttcttgattctgttatctgtagccattttgattacccctgagaaggtaagatcattgttatcttgttgctgagctttctccttttcaagttgagcatatgcatacttgaaaatttgactgttggtacttatttgctttcccttaggcagattaaccgcacttgctacatcaaaactaaaaccttcaaacttctctggattttcttcaatgtcacgtattctatgcatgagatccttatgttcctttacctttccttctgattgcacagatgaggtcatagatataccataatcagttgattttgcaggtgacatatcctcatcacttttgggattgtattgttccaaaatcctgtccttctcgggatctgttgcatttcttgtaggagaaaatgaacgggataattgagcttgcaatccacttgcatgcttcttgacagcatttttagcagacgtccacctctgtcgtgctttgactgtctcttttgcacttcgggcagctgcttctctggatttagtcaacctcctttgtctagtacttagaacttggtcagaacagttgtaaataactagtagaataataccaagagctgcctgcattagtaattgaagaaataagctttgctactcataagatagaatgagaattgaagttgcgaaatttctaaaatactacaatcaactaaaaggtgctttatttagctagcatagtgcgttaacatgaaagagtcaaacatgggtgccagtgcagcctccctagaacaagtactaacttactataattatcatcccatatgcttcgatgtcttggctttctgtatttggatcacaacgcgccaacttgaagcaatctagtagaggaaaggtcgttaggtataaaccgagaaataagtacactaaacgtggaagttgaaattccaaatttatggtggaggaatgtacaattgcgattattattgaatacaaatgaaataattccaaattgagaagaaaaattaccttgctgaaatgtagaacccattctacaataatgtctttattatacgttgcagaagaaatagaaaaatgttagcattgcaaaatgcagataaaatcaagtcaaaattaaattatcaggaaagtatgatactcaagtgaaaactgtgatgatattgtgactatattagtacaacttttatcattatgtgagaagaaagatgtcattacccactgctgcaattagtcttttttgtcgttgttgggcaatatgatcccgctgaacaaaacacctcactactacccgaatcatcagcccaaacattagcccctccacaagtatggtttggctttagaggaggtagttggtaatggtatctgtaaaacatttatcagtgaagcattaaatatccaagtcattgaaaaccaatgaagaaaaatgaaatggtgattcaggaaatggtggaatctaaacttacgggtcacatacaccggttgtcttattaagcgttgcaaggggacaataagcacccaatggacaagctgcaagaaggcgaaatcagttggtaacagagaatcaattgatcatgtttcacactaacacagcagaaaacaaagcaaggaaatacttacgtatcatacatgtaataccatgaggacagaagaagccctcacaacaagtgttacacctaagagttcttgctggcatgtcttctgaattactaagttcagaaggctctttggaaatttgatcaacactacaggcccatcccggttcacaaccagaaacccaagatgttaaattacagttcttattgggttttaaatagttatcagtcaatgcaccaggaaacaaactgttaaagtagaacttcatttctgctaaagtacacaaacgatttgtaatatcacctgttaagccaatacagttactataagtaaaaaacataaactaaacaaaaagataacaaaaatttgagatagttgaaaaacaatgtcactgaacaagataaaacatgaattgtggcacttgtagcttacatatctataaaagatactattgaaaatatcaactttctcacatttgaacatgaaattaaacaaaagtccaaatcatgaatgaaattctttcaacaacttaactgaacattaatgtttcctctggctcaccaataaataaaacttacttaaataccaaacaaataaaagaaaagaaaaaatagaaacttctgatttacaataacaagtacttttattataccttcggtttttaaaatgcaagaagataagaagtccaaattgctggaaaaattaaacgcccgattccaatcaacctgtctgaaataacaaattcaagttcgaaatattaaaagcaaatcattagccactccattttttttttgcaaaaatttctaatttgaattctgactgatacccagaatttgattcaccacttttcttatcttttctttgtttttttcatgcattttctcagcaaccaaacaaaaaagccaaagtagaaacaaaaaatattgactcacggatccttaatgcagaaactaaaccggttgccaagatcacgactaagatgatcagtgaggttggagagacgtttattaagaacccgtgtaatttgaggaagaatcaaaggattgttgaactggtcaaagtctccaacattttggcactgcccaagcttaagaaagctcaaaacaacaacacccagaaagacaaggataccaaagttgaaagctttaagcttctgaaagctcatctgagccaactataacttctgggttatgaagtccaagtgggaaaaaagaagtgaaagtggaaatctttgatgaagatctaggattgttcagagcttggagtttagacgattgtggctcataataatctaacaatgtagtgttgtcatacaaagttgataagtcagtcaaacgcgggagaagagaagagaagagaatagagtctgctgttctaactcattacgttaaattgccgtctattgctttcggacattagtttttagttttcgattggttcaatgacacaattttatattgtgattctttcttattttcttccttgttggccttacctcattggttcttctctatgttgatcttaaattatgttttattgggtaattactatataaatggattcatgactttttttatataataaatactaataattacttttcaacatatgactttgtccgtgccttcgtttttgaatactaaattttttaatttgttacgtttgaagatatgttttccataaacaaataattatttattaatatggtgcgtgatatccttgttagagatctatttcaataaaaaaaaaaacattattcaagtaacaagaaaactcactggcaaaaaaaaaaaaagtaacaagaaaactcacaccatatattatgattacttaatttaaatttttaccctttttataattcgcctatacttcttattttattttatttattttcaaacgttcctttccctttcctaatattatatattattttatttataactaaatataatatatggtgtcagctatagtacacaaatggctaaaaacgtaaccaaacacgttacactgtgaattgactctaaaaatgacacttattttttctagctttaaaaaatattttattgcatttataaattactttttaactggttattgtatgttacacttaccgtttaatatttaactaattttttaggctaattagtatttt

SEQ ID NO: 185521 - DNA, 9427 bp, Cannabis indica
aagggaattattccatatactgtttttttttatttccgatttgagtttctaaagtggttgcaacgctagttgcaatagaagtttctatacgattttttgttgcgatttagattgcagcgctagttgtaataaaggtttttatataaaattctgtaaaaataacaaaaaaaaaaaaaaaaattaaaaaattaaaaagtataaaaataaaaaagattctagttattatataatatttttttataaggttaattataattaattcaattctaaaaatatataatttttaatagtaacttattttcaacctcttatacaatatcatgaaaaatattttcactacgtcacactcaatctagcttgaacatttgatttgtactctgaccaatatctaaactcgaaccctgacttgacttagatcggaacacagacctcgatttcgatctcgacctcgaacgcagctcccgaacgcgatcttaaaccctgacctcgacctcaactctaacatacatctcaaccctgaacctgaccctagatcctaaccttaacctcgaccccgattctgacttagacctagatcccgggtccccaaactccactctagacctcaattctaattccgagccaaactcaaaccctggcctcgacctcatccctaaatcctgaccttgaccccaactctgacttaaacctaaaatttgtcccccgaaccccactctagacctaaactccaattccaacctcgacccgaacccgaaccccaacttcctaaaccaagatagaaatatagccaaacactcaacaagtgctttacttttcctttttagttaaaattttcatttgttttttaattaagaaatatataaatatattctcatctcacatggcggcttctgcgacttagacgagagaggaagaggaataatctcactccgtcttcaacctttgcttcttcttcttcttcagatactcaaacttctaatccaatctaatcgaaggtattttcttcttttttaattcgaattggggatctgttctgttcaatttcaatttattgcaaagatttgatttttggtcacaggagaagcgaagaacgatgttgagatttcatgttggcggcaaagtcgttgaaagaattgatcttttgaggaagaagcattggccatggcgtttcgatgtttggccttttgctcttctctatgctatttggctcactaccattcttccaagtatagacattgtcgacgcttccatagttttcggtgcaattgcaactcttcacattttggtttttctcttcactgtttggtctgtcgactttaaatgcttcgtccaatacgctcaggtatgcaaaaacactatctttatctatatataccaatctatctatatgtatgttcatggagaaccaaacctggtttttgaaaattcaaaactgaaccagaccaattaaatgctcaaactaaactaaatcaatccactttagaacggattggtttggtttgaaactatagtttgtaattcgtagatgtttctatttccttaaggtaactatgaagatttttcataaataatgtataaaaaattagggagtttggtttggtttaaccacgaacaagaattgtaaaaccgtgaccgaaccacagaattataaatggtccttttgattaaagtaattaccagaaatgccaaataatccaaatgccgctgtcagttgcggctttttactaacatgtagttgatatatactttggattgactaaattattgataccggattcatttgctccagtctgaaatggtttggtccggattggttgggattttgaatcatggattgtgaattatatgaacattgattaatgaatttcaggttaatgatattcaccatgcggattcatgcaaagtaactccggctaaattctctggtcctaaggaagttgtgtcactaaatttccgtgaacaagtaagtcaactaattcaattattgtttgtttgttttgtctaatgaacaagtttaatttttttaatctaaatttgtatttacatcgtttgtgtttggttcagctcggtgaagagatttactttgattttagaaagcaacgtttcatttactcaaaagaaaatcagaactttagcaagcttccttaccctacaaaggaaagttttggatattatctgaaaaacactggccatggaactgaatctaaaattgttgttgccactgataagtggggaaggaatgtgtaggttactactgccttttttgactttgtttcatcattttcgggtctttgatttcaaatgttcttgcttgataatttgatttcattttgcttaggtttgagtatccacagcccacgtttcagaaattgatgaaggagcactgtatggagcccttctttgtatttcaggttctctcttcaactccaactccccaccctatctctgctctcatttggggtattcactcttcgtttggtactttttcgtaatgtaggtgttctgtgttggcctctggtgtttggatgaatattggtattacagtttgttcaccctattcatgctgtttatgttcgagtcaacaatggcgaaaagtaggttgaagactctaactgagcttagacgtgttagagtagacaaccagactctaatggtgcatcgttgtgggaagtatgttatcacacaacatttgtacacagattcagtatagaaaacttgctattaatgttgatcttttcaggtgggtgaagctctctgggacagatcttttgcccggggatgtcgtctctgttggacgctcttctggtcagaatggagaagataagtctgtaccagctgatatgcttatcttagctggaagtgctattgtcaatgaagccattctcacaggagagtctactccccaatggaaggtaattcttctgtttgttactagtgccggaccttaaaccttaaagttttaagacaaaacaaataatcgatctgcacataggcttactggtactagggaagaacaattttaacgtataacatgttttaatgaatgaagttgtatgtagcatgatgtatacgcactggcgtgcacttatataaatgttgaaataaaatacatatcctttgccgtctcattttcttgtgtgtggagcctagcttacatggtttctgtcattgttagagttgagattgttatgttctctctgatagctgtagcatactgagtgatggttcatttagaaattgggaaagctggagtctttaatttggatgcttcgtgttcaggtttcggttatgggtagaggagctgatgagaagttatctgttaagagagataaaaaccatgttttgtttggtggaacaaaaattcttcagcatactccagataaggtaactcagacttcaagaaattcatgtattttgtattctgaatattctcgtgctcacttgctttgtttatctatttaaacaaaactggaatcagagcttccctttgaagacccctgatggtggttgtgtggctgtcgttctaagaactggttttgaaacaagtcaaggaaaactgatgcgaacaattttattttctaccgagagggtaatttgtattgatatttcatcatccatgcttatttaaatcaacagcggttgattcctcttgttcttttctgattggttttttccttcgtacttcttgactttcaggttactgctaatagttgggaaagtgggttgtttatcctatttttagttgtattcgctattatagctgctggttatgttctaaaaaaggtgaataactgaaaacattgcatacctaatcgatatttctttggctttggatttagctgtttcttgatcaaaatgagttaatgatgtaggggctagaggatcctactagaagcaagtacaagcttttcctaagctgttcactcattattacttctgtgatccctcctgagctgccaatggaattatccatagctgttaatacatctctgattgcattagcacgacgtggaatatattgtaccgaaccttttcgcattccatttgctggaaaggtatgtttggacaactttcgggactgtctttcgatttaccatattcatttgattttctaatttcttttggttcatacttttattcctcttccgaatttgtatgcactcaattataaggcacactttctgttctgctagatagagagacattttgaactatttgttttggctcctccaggttgatatttgctgtttcgacaaaactggaacacttacatcagatgacatggtatgcttgtgctatgaaacaatctattgtatttatgttctaagtgctcttgttttattatgcttatctcttcttttcttgttccttaacaggaattctgtggagttgttggattaaatagttctatggaattagaatctgatgcaactaaattacctcctcgcactgtggagataatggcttcttgtcatgcattagttttcgtcgataacaagttggtatgcttaatttcgtagactcgtgttaaaagactagcttctctacttatacttgttgtaaagcataacattgttcttgattatatttactcggagttagcaaacctttggtatttattacccctttgtttaattattacagaatttttgcgtttacaacaatgttttgtgttctgcataacatatcaatatgttgctttaatgcttttcttgtctgcaggttggtgatcctcttgaaaaggctgcacttaagggaatagattggacctataaatctgacgagaaagccatgccaaagaggtaaaacttttaaatctttctcattcagataatgaatagtatttcttagcttgatcttgtatagaagtttgtgattgatccttttgtataatttagataattatttatttgttgaataaaaaaattgttattaactgcagaggaagtggtcattctgttcaaattgtccagagacaccattttgcttcctacttgaaaagaatggcagttgttgttcgcatggaggaggaatttttggcatttgtgaaggtatgtgtatggatctttctgaggcaatatgtttgttaaagagaatgatgagagttacaaaattcatatcttgacactcaccgaggctagctcaatggttaggtggttccttttgaagtctcaacgcaattgaatgggaaaacaagtgtcatttttcagatgttgacctgatttgtcatagtggatcaataaatacaatttattctttacagggtgcccctgaaactattcaagataggcttacggaagtccctccattttacgtggaaacatacaaaaagtatactcggcaaggatcccgtgttctagctcttgctttcaaatcccttccagacatgacagtaagagttctctgacattttaccgaaagcattgaaaatatagtaacccttttcaatttatctgtttaaaccattgcattgtttaatttttaactatgttaagcacctcacactggaagataaggcagattctgaagtagattaaatagctgccacagttgccctctatattttgctaaatatttctcggctttacttagcttagtaatatgtctgtactcttattcatttatctgtcaatcgtgtgaaggtcagtgaagctagaagcttggatagggaaatagtggagagcggtcttacgtttgctggttttgcggtaattcttttgtcctattcttacttttccttctgtttattgacaagatggttaagtatttatggataaaacaagtattagtgacacaatcaaatgattttctagtgtttttgaattactgattccctatttttatcgctatatttttgcatttgacaggtttttaattgtccaattagagcagattcagccactgtattgtctgaattgaaaggctcatcacatgacttggtaagtatcttttcttatgcactcacacagatacgctgaaatatattcgattgtatctagaacatatgtcgtaacccaaatattaagagagtaacatttgcatcaggtgtctgatttaataaattattgcaataaatgttgtgctgatatcagtaagcattgggaagattttgtttacacactaaaccaagatttttcagcccctggccatctgagctatgttacagttattgagttgtcactctgttcttgatatgaatttaattaatcataggtgatgattactggtgatcaagccttaacagcatgccatgttgctagccaagttcatattgtatcgaaaccagcactgattctcagtcgaagagtgaatggcgaaggatatgagtggatatctccagatgaggtggagaggatgccgtttaggtaaaatactgttttgttttggttgttgccattgccatttttattaccatgctgaaattcgcttttagatttataaataagaacagttacaccctcttcgccactcttttactgttttatacatcagagtttctccctgaggtccccaaaagcatccatatttctcccccaattgtttattcatttgagtgtttggtcctcctattgtaaagcctcgttcggcttagcttctataagctatttttttttttgcttttagcattaaaaaagtccttccacgagtgtttggataaaaaagaaaatgtttcttttgggagaagctaagatttgtagcttaagaacttttaagagcagtttttaaaattaaaacaatttgtataattcacaatttactaaaaaaaagatctttcttaaatgatattcaaacactttcaaaaatacttaatagttatccaaacggtaaaaatgaattaaaacttctacttatcttatacttctagctataaaaaaaataaaaacttggccaaatgaggcctttattgtacattatattccaaatggttgtgtagctaaattcatagtttccttccccacctaatacctttggttggtcactctaataccacaattaatgtttccatattctcctatactctgtccatctattaggatggatcagagaaatatacattgctatgaaaatcttggattgatttcattgtttggacaatttgtatcagtgacaaagaggttgaagctttatcagagactcatgatctctgtattggtggtgactgcatggaaatgttgcaacagactggtgctgtaacacgagtcattccgtttgtgaaggtttgtaaatgctgtttgtttgttaagcgctagctaactaacaccgacatggggttcattttcgacattgcttgttgtatgtttctcaggtatttgcaagagttgctcctgagcagaaagaactcatcatgaccacatttaaaactgtgggccgtataactttgatgtgtggggatggcaccaatgatgttggagctctgaagcaggtaatgattgcttacggattaaccctttaaagtttgatatatgaattcatttgcaattgtgctgtatttaacttctctgctatttcaaacaaaatataatttgctctacattttccaggcgcatgtaggagttgcgttgttgaatgcagttcctccaactcaaactgaaaagccatcttcagaaacatccaaagacgaaagctcaaaggttgccaaagtaaagaaatcaaaacttgcttctgaagcagaaggctcttcaaaatctaaagttgctacaaacaactctatgagtaaccgccacacaacagcattagagagacagcaaaagctgaagaaaatgatggaagaactgaatgatgattcagatggccgtgcccccattgtcaagcttggcgatgcttccatggcttcgccatttacagctaagcatgcatcggtttgcccaactacagacattattcgacaaggtcgtagtactctagtaacaaccctccagatgttcaaaattcttggccttaattgcctcgctacagcgtacgtattgagtgtgatgtatttggacggtgtgaagctcggggatgtccaggctacgatcagtggtgtatttacagcagcctttttttctgttcatctcacatgcccgaccgctcccaaccctttcagcagatcggccacatcctaatatcttttgcttttacgtgttcctttctctgttaggacagtttgctatacacctatgtttcttgatatcttctgttcaagaggcagagaaacacatgcccgaagaatgcattgaaccagactcgaacttccatccaaacctagtgaacacagtttcgtacatggtgaacatgatgcttcaggttgctacctttgctgtcaactacatggggcatccctttaaccagagtgtatcggaaaacaagccattcttgtatgcgctcttgtctgctgttggattctttgttgttatcacttctgatctgtttagaggcttgaatgatagcttgaagttggtgcctttgcctgaagggttgagaaataagctattgggatgggctttgctcatgttcttaacttgttactcatgggagagatttttgcgatgggcgttccctggtaaaatcccggaatggaagaagcgacaacgacatgctgaagctaaattagaaaagaagaaacatgtttgatcaaatgaattttcgaggtgaagaaagcatgataagcttaatacgattatgtagcataaacggtggcacaagagcgagagtaccggagaggcgaggggtataatatctcactggatttttgcatttctaaagcatggaactgaggaattcctttcctttttttgtaggggaaatttgctacattttagtttgaaaatattatgacactactaattacaccctagaattcacagctacaaattattttgctattatttggaaaatgctctttttgttagctcttgactattgagtcaatgaagtgtatctaattccttttgtcaaggatagttaagttactatattcatgttgagtaatttatttttcaatagttaaaaatattggtattttaaataattaaatttgtaaagtgtaccaaatttctttattaaagggaaattaccccacactatggtgtctctaaaaggcagcaatagcatgattaccaagtataatatgagcattgtcattagccactcactgctaccaagtggcatcttacaaatatctagtgatactttacttgatattactaaaattattaggggtgagtaataatcgatttggttggttataatttaaaaattgtctgactattatataaatgtaaaaaaagtagttcatattaattcatagtttgttcggttttttaaacttaaacaagttcttaaattttgtataattatttggatactaaaaaaattagaatatttgtatcaaatatcatacgattttaagaactaagaatttcataataaaatgtaaaaatatata

SEQ ID NO: 185522 - DNA, 9721 bp, Cannabis indica
gagtgcaccatatatatatatatatatatatatatataaaaacaatataataagatttcaccaccacaataaactacatcatcttattaaagtttcaacaatacgcaaaaatacaataaaattcaaactaatatacacatatacacaatcttttagaacgtgaaatacaaaaaatcaaaaaataatatccaaagtttaagcctcaccaattatgtcaattattatatatctacataaatttttaaaacattaaaaagaaaataatgttgaaatcttactatacataatttacaaaagttagaaaaatgctcttagattataacattcaaaaagtaactaaacattacttctactttgtagctcaaacagctatgccatttgagtactaatttaattttcaaattaattgttaaaaaattctatagaacataatattccaatgaaatgattagcatagttctagaaacatacaaatatagttttagcaattcctcccaaatcaagagacttacttttatcttctcttaactattaagagaactttcaacttcttagaaggaaaaattgtaattgatcaaacttttgaagtttgtaaatgtattcattttgcactcgtaagagaaaagtgccaaagggtcaactatatcaatacaatatagtgaagggaaatcggttgaaggtgcaaataaaatttagcatttacatgcttatcatacacaaatctgtgatgaaatctcaaatgaagaaagaggaggaaagcgtttacccaaaaatttgatagtggactgtaaatatacatctctcctgctcaaacatgacttcgcagtttccatcagtttgaagcatattgcagatatttctggacttggctgcataaatatgaccccaatataattatatattgcataggaatgcagagcaacaagcatatcaagcactagttcaataatttaaaatagtgacaaggaaacatctcatcatgataatcttctcaaatgaagatttaaaaaatcatccttaagaagaggtttaaacatagactagtgtggatactgaacaggactgttaaatgatttgtgtaagaaagatcatcaacaaaagaatatatagatatttgagaggtctttctgcggtccttacgttgaaagatgatccaatgcagttgcaagcttctagtgccaggtttccacgaggaaccttaattttggtcagcagcatcatatcataaacagcacaaaaaaaaaacaagtagaattttggaaacacaaaggcattgatgtcatatataagtttgtatttatataaatattatatatatgaaaatttttaggtaggggcatccaaaacttttgcccctaaaggcatttcctgtttttggtatataaagaaattataaaccaatatttttttattgtgtacactatagttatactaagcattttgtctgttttcgaacaattctaataatttatagtgttaaaaacagaattcaaaaaaataaataaacaataaataaaaaaagaattcaaacaatcagttgcacgtgtctgtcttattttttacgtgcaacaatctattttaaattttatttcgacaccataaattatttagaatttctaagaacgggtatgatgtgcctattacaactacaatatataacgtcatataaattaagaatataatttatatagactgataaatatagataggtaatatttaccaacgacggttcttgctgaacggaatcaaccaagtcttgcagaatcagcttagacaatgacagaagttcatgtgtataagataaatcgccatagaataagcaatcatttcctagaacctgaataatcaataagattggagaacagtaccaacaatgagatattttgtacaagcacgcatcagaagggttctttatttgcagaatgattgtcattaagtagagttattttagttctgatatataatgaattaaaacatgggttggtctcactataaacaatacttttcatttgagagaaaaaaaacaatactttcaatttatgaactactacggaaaatttaccttcccacaatcagcactgtaaggaagcttattttgagatagggatgcagacagtgacactagcgagcacagaatctttcccttgatttttggtttcaccctatatcatttatagataactgaagaacatcatcataagaactacagaaaaacttgttgaaaaatccaaagacaaaattttaatgataaaattttgggaaggaaacttaccatgactgagagttcataagtgataaaatggttttgaggaagtaagtagctccaatctcagggttaccttcacattggtagaaaagtaaataatcagaaaacgaatacttaagcaggtgttcgcaccaaactctagtacacaaaaagaaatacaaccaaccataaacttgttttcatttttcaagtgccatttcatctaccaaaataaggcctttctcctcatattcatcttttccaagtactcaagtattctatgtatggttttttatcagttgcgtaggttaatcaagacctcaagtaagtacaccaattttgaaacatcttaacggaaattagtgttctatttgtttcgaaattggcgagctttggctcattcaaatgtttataatacatgaaatacaaatatacaacaaagacaagaaaataattagagatctccaacctgggaccataatcaagagactgcataatttgcgaactgaagatagtatttcatcaacatctttcaccatttttgagcctattcaagaaagtgaaaaagaataaccatgaatattacatataataaaaaaatgcaataataaatctacaagagattaaaaattagaaaagtacaatcatcatttatagtatgtgtttaccgagatttttgaaaacgagattaaataagagctcaaaaaattaaatgagaaattaaataattgagatggacatttttacgtggttcgagagtaaagattcctagtccatgattcaatgtattggcctttagaggatttgaatgtattacaagtaaagttttacagcttgaagaactctagctcttactataatatcttcccttctaagtttctcttagtgaggaagaaagcttaaagaggatttctcaaaagtgtttttttctcctcccccttacgtgaagagtaagaggggtatatataagcttaaactcgggttcgggcatacctgtgacccgctaggttttttgtgcaaagatgggccaactattgggataaatacattaaatacacgacattaagacccacgacaagatgctaccttttgggcggaggcgtccaatgggtgacctatctgatctaaacaggtgtcactcatgggtgctgctacagtagacaagaatgtcaaaggatcactcaggtgtcacttagcattttcttatcccaacctcatcaagcagtcccaaagattagccctcaagacccaatgcaaaaatgaagagaaaacgagggttgccctctaggaggctgctgaagccgcggaagagtatcgaaggcggtgcgtggatcaatttttaattcacacgttccattacttgttgaagaaagatctcactgttttgaagattctcggggaagaagaagaggcatatctagcccaagtttaagctttggaaacggttgaatcttctgaacctccggctgctgagaattctagcaattccggggatgctactattgaagtcgatcctgcccaacttccgttagaccaggcctaattccaaaatttcaaacatctctctccttctttttaaatattaattcttatttgggggccattggtctcgttttggtatttgtggggacaatctaaatgccttaaccgcgaggcgatttgtaataacttttaacttctttttcacttcttttgccagaatgcttttacattactttgccttttgcaaatgcttgttgtttgcataactgctttcaggtgactttggatgtcttgagttcttggttccaatggcctgaacttcaaggcttaagctttaattaggaccgttctaagttgcacgttatgtgtccctcgtgtgaggaagtgctgagaagcaaatccaccttttaagcttcttagtacttaattccaggaattaatacttaggatacttaagattttttattctagcttttgcttccagacaagtacacgtcttccaaacttaggagctttccacgaaacataaaccttagtctgttggctctgagtgatgaaaaaggcaacacttactctcggttccctggggtttcgattccagatgttacacgctcgcgggcttcaatttgcgcttttgttctcggaccaacttgacttagcgagttattaatctcaggttcggcgggagagtgggttacttccgactctaagagtctccatgtaacagtacacacctttattcgtctgaaaaaatagtgtgttcctagtctgcaacatgcatcttgatttaattatagcccgtgtatatctctttgtggtacgcgcattaccatgttctggcagatgggacagcatctgacggggtgggcccaggcgtcagagaatagccacgtcactgtaagaagacttccgaatgcaccttttgggcttccccgtccagatgcggctccttaaccctcaagaaggcgttgttcgcctcctctcttggaaggcataaagggcttccgggagtaggaggatcctatctccagggtgtggctccaggaagtacgaagggttggggcacgcctccagtttggactcggccttcgcatgctggaagcccagctgctgatgacgcgaatcgatgcatccttaatatgtcacatgttgtccatccaaaaacgtaaataacagtaggcattcatagaaaccgcaagcatgagacaatagtcattaatattcaattcgcgtaatagccatggtcaaattcaataccaaataatacaacaacaaaattaacataacttcacagagaaagagacaaagagacacgaactaaccctccatcatgtctaaacttagcaagcaactgatagctgaatttaatagtccacccgaatgagaaaccaaaccgctcaacaaagcaacctaaacacagtgacacatgaccacattatatcgttattactcaatttgcatcaaacagaaatattaaatagatggatcattacctcagctgtctcaaggtaaagatttacttgtctaacttgcgacgaaatggaaggcagtgtgacttcacaaaatgctatacaggatttgataaaactgagatgtttattgccacatttcaaagccttgacggctagacaattgctcgagtgaataagaatttcctgcaatatatcaaatgataacaatacatattttcaatccatcaataaatttcttgattgacattggatcttctcaatgtactctataatctttggggataagaaattataacaaattgctagatagatctgaaaaattcaatccataatctcatagtagttgtagaaaatggtgaatcaattatgcattatttaataaaataacaagtatttatatacaaaactagaaagactaaatagaaaatcaggtaattacaattattcctaatttctatcactaatatatattctaacactccccttaaggtggagcataaattttaataatgtctagcttattacaaattaggccttgttaatcaacccgcacttcatttaaaaccttttgtgaaaatatcctctaaatgatctccagtcatcacatatcttgtgcagattaagccttgttgaatttctcacgaaaaaaataacaatcattctcaacgtgcttagctcgctcatggaacacgagatttgaggcaatttgaaagaccacttgattttttgcaggaactaatgtcttaaacccgacttcagtcaaaagctgataaatccacactatctcacagacagattgtgccatagctctatattttgattttgtattggatctagacacaacattttgttttttgctcttccaagagatcaaattgcccccaacaaagatacaacaacctgaagtggatcttctatttaccttggaacctgcccaatcttcctcagaaaaaaaactttatctaggtgtgtccattgtaaacaatacctcgtcctagtgctcttttcaagtagcacaaaatttactctaatattgcccaatgatgaattgttagagatgacataaactgacaaacaacactaactaagaatgcaacactaactaagaatgaaatgtctattcattggctattctagcacgcagaaaaagagcaataaagttactctctagttacaaaaaaagtgtactaacactatggatgtttctttttttttttttccttttgaacaccagtctttttttcccaactcttgatattcagagggaacattcgagggaatatcatctttggaaaacttttcaagataatcaagttgcattcccaaagcctcctatcatgatatctcaacatccaactgttcaaactcaacctgttttatcaaaatcagctgattctcctctatccaatcaacccaatttgagtcttgatatcacaattccattctctttctgtaaacagtctaccagccaacaatccattagccagtcttccttcagaaagtacacacacgcttcctacgtcatcacctcttcaaataccagcataggaaacaaataacttcgtgtttataaaaggagaaaagctgggaatatagaggtcaacatgaaaagcctggactacttgggcaccctcctcttttaagttagttttttggaagtaagttatacttaagttgttgtaaaaatgatatcaaaaccatgcaccctcaagtgagaccaacatcgcagcggaaggggcaacctctagaaaagtccagagtgggccatcaccaaatgggccactgtggacgtcaattataagggggtgtattgttagaatgccacatcaactaagtatggattggttagtggtttataacttcttgagcaccctcttctcttcggctagttttttaggaatgagttctgctaagtagtagtaacacaaccatgtttttcattataccatacaatatccaaattataaagtcttctcaaacacaagaacttcaaataaataacatttacataccagtactatttaaagattcattcgtaaaaatacttacaaagcagatcatacacagctacgaggtaacttgagcaaatgattaaaatagaatgggaaacaattacaaacctttagtccattgattccaccaaaagatgcacggcattcaactaaaaatgttaaatgacgttccattgctaccccataatcaacctaagaaagatagaggaaaccatctcagatcattgcaatccaaatataaaatttcagtatgcagctgaaatacataaataaatcaaaagtgaataattaaattagttaccatgttaacaaaacgggaaatcaaacgtgctggttggttatctgcatccttcacatttgcaaattcaataccatcatacaaagcctgagatatttcgaaaagtagttgtatggtcgttggatcacatatataaccatccctgtgcatgaaattatcctcaatagataaatttgtcaaagacatcaaacatcatttaccggattcacatcaaaagagaaaacagaaaaaaaatatgagcaggaagatgctggttcaatgaaagttaagtggtatgaatatgagtagtttttcagtataacagcattaaactaagtggagtataaatacaaagctacaaattgtgaaataccttgttgccatgttaaggatatgcatattgacaatggtttgtgagctcccatacattacgtccaaaatatcaagaaaatggttctagaaaacacaatgtacgacaaaattttatcaaaaagttaagcacatattattaaatagtttactatataagggggcggtggggaaagcaaatagaattaaagtaataagggaatataccaaagcaaacatatcttctacatggttgtgatgatctagaagcttcaccaagatggactgcaagcttgtttgttcactttcggtagttcctttactgctcccttgctttgacataccttctaaaatggtattcaaatggttatcctgaaataaattattaggtccgctgaaaattatattagtataagttcatgctaatacactcacatgatgcattaacttcaataccaaagggaacaacaagaaggctattccaaaataggcaaaataagaaaatcatttaatcaaggcaaacgtaaggtagcgtttagttgggaagaatgaaaatataagaataggaatgaaatagaatcaaatttaaaatgcataaaaaattgataaaaaaattattaaaatttttctcatcctacattgaaatggtcattccttctatttcaaaatagattagtcattccaccaaaatgatgaaaaaatcattccaatagaataacattccaatacttcaaaatggcaccaaacaaaagaatggaataaaaattatttcctttccatttcattacctctaaccaaacgctacctaagttctaagaaaagtcaatgttcactgtccaaccttttgttagaaatatctgtgtacttaaatcattcaagtcaatcattcttactgtggaaagatcacattaaaatttcaaactttgtttttttatccttttttagtttctgtaatcaactataattaatcaagcatctctgttgtgtacgcagaaaaccaaaaaaaattaacttcattctgtgtggcagaacttgcactggtacacaaggaatacagtgtaacacgtgactgatatagttatatttaaaaggaaaaaaaatactacttggattattatgcattaaaatccaattaaaagagaaaaaaaaaaccatcagcacaagcaaaatcaactctaatctctcaaccaggccgagaaaggagcatttattaaattgtcttcattatgtagctgtcaacaaagtaaacgtgggcttcttcgctagaagaacttttgttgtcttgatcccacaatctattcactctctcctcttcttcaaagattcttttgttgctttccaaccatagtacccagaaaacagcagcaactgctgtttgccagagcttttgcttttaatgtcttcacttaatctgaaattataagacttccatacactgaactgggacacaccatattaattctaaatccttcagtagtgtataccaaatctgtatcaatattgaacgatgtagaaaaagatgctttgcagatttgttctcttttctagaaagtgcacaccaactgggagaggagacagcaacatataatgtcttgtttcgaatcacatcatgaacattcaccctaccccactcctcatatacagttcataacagcaagaccttaaggcatgtatttcatgtttatttgttttattatcaagcaatttgggtaaaggccatatatggttgtgttaacacagattttcgttcattgtattaaagcctaaatcgtgatggatttgcacagaaaataaacgcagtaaaggaaaaaataagaatacaaagcttttttacgtggttttgcagtaagaattctgcataattcacgagtctatcttattagat

SEQ ID NO: 185523 - DNA, 12711 bp, Cannabis indica
tttttttaaaaaataaaaaaacataaaagagcatgttaagaaactatgtagaaagatacaaataacagaaagaaagcaagcatcaacaacaaagaaagcagagggaatagagtccgagtcatacatgctattccgaggaagattcatggcaaccagatttttgaaaacttcttccctctcttttttgtgaaacacaaggagatcattacatccgtccatgctaaatatctcgacagctacaggacgcaactggtaatcacgcttcaaaatctcatgaacactattaagcttccacatacgccaaaggtgagagagatgtccaccagtacacactttctctttcccccacgcaccacccattataggcccaggctcttcccccgatccatggcttagcagttgtggccgaaaatgaagtggacttggactggaaatcactgcttccattaacatccttcttaacacctaaagcctgatctataatagtagagttcatcctcacattccttttcacaaatggaaccagactcgtcgatataaaagttttcaataacatacaggcaatgttcacctattagaaaaataccatcatgcttatcaagaccaacaactctttcacaattatatctgaatcgaattttttcaaatggttccaaataaggtctaattaggtattctccattatcatgaagatctttatccgccttatcctctgaaacctttatgtcatcatttctagcagaagatgattgtctaggagaacctaggtcagatcttccttgagtactgtcctctatttgaacagatactgcactagacttgccgccaaactcaagagcagagtgcagacttgcatcatttacactactagctctatcatcattccacccattcttaacagatgatgcatctctgacattatcaggttctttgtatactgattcatcatacagctcatcaccaagatcattctgcttggttgcatcactgaaaaaatgaaaaaatgattcagaatcagtgtcagaagtattaggagcgttctcggcttttgttttggactgctcttcatctccaaattcaaattgtccatcaagaacattttgtatagagtcaattttcagcttgcagcgctcgagctttttccgcatcctatatggaccttcaatttgacaaagctgccattccggatcctcagtctccatggatttacgcattggaaatattcctcgctcatgtacaagttgttgtagatggttttgccactcactctcagcatgcaaaatccacccatacttatcttgacgaacaactctaagctcagtggacattgcatcacgtaccaattccaatgcatatctccgctcattcacctgttcccagtgctttccatctgacttcgaagtatcccttgattttcttcccatttcccttcttctacgaccctccatacctttaattctcacacccgggaatttcgcagacccagcaataaactgaacccacattatggctgcacactgctcaagtactttattaacagattgttcacaactctgaaaccaatcaaaaaaagaggataaacttccaatcaataacttatcaaagccaccatgtagtaaatccagctgctgtccttgatttggtttagaaacaagtaagtcttctaaggcagccctacgatgcactagaagatgcttcacaatatccactgccatgttctgtacaatccggcgctggtctcgcaaaagagatattaaattcacacagagacagcaattaagatcggtgtcagtattgctaggacaaaatataatttgcctatgggcaaccaataactctaagactgtgcagatatcaagtcctgaatcatcttgggaagagttagaggacattctcttctttggttcaatcagcaaacctaggcatgagaggagatcttcttcaccaattgcaatcaaaaacgatgggagaaaacaatacaaaatcatacgattagcatttttcaacattgaatgaatgtaagtatcaagttgcctgcttccccgtgtgatggataaaagactctttccagtaggagcagcttcttcaactcggccgtctttgtttgccaattgtaacatggatagcaggaattcaagagttctcagcacaccagctggttggggaaaagcacccatatatacacgatccactatcatccagcataacgcatccaagtttgaggaccaccgactcttgtctagcttcttttcattttcctcatcatcacgcaggagacgcctttcaagaaagttcatcaacctaccaagacaaaggccttgaaaaactaacactgcatcagcatcaacatacagtggaacactttctaagatgctctctacaatctgtgatgatttcaattgctcagtgataaaatcagaaagaacttctgctgtaaaatccagaacagcagttgctcctgcacaacaaggaccaccaccatagccagagtcatcaatttctagaagtagttttggactaaccgaaaaaatagcatttacagctaaaggtccttgaacactagatttcacttctagagaaggttcaacttcaccagtagacaaagaagactccacaggagcagtaaccaagggtgttttatattcattattgccagaactgcccaaccaagaggtcaatgctagaactggagacgctgtgggtgtgagtgggatagagttggacttctctgataaaataggagaatcgagcatagtaaatgaattggaactatgtgaatctgttgcctgtattggttctagagtccctttcaaactacggaagctgaattcattagaacttgagcttgcagaaacctggtcaacaccgtcaatatctaagctcataacagctggagcatcactctgcaccactttgtttaattcctgcagggatgacgtaactttggtctcttctttatcaacaatgacaatgttttgggtgacaggaatatcctcagaacttgagcttatctgctctttagggaagcttccggcactgatagaattattcacagattgatcttgttcatgaggcaagctagaaaacgtattatgtgaactgctggtatcatcagaatcattcatgttcttctcctctgccttcaaagaaagttcctttgccatctttaccgcatgggcagctctgcaaaataccaagtaatcaatttaaacgtacagtaagaatataattgcttcagctagaaattctaaacgataaatttcaccagctttggaatataattaaaccatcatctatagaataaaataaaatgaacagacaaacctaacacatgaaaaataaaggtcaatgcagctttcaagaaattccgctcgtctgcatacagcagaaaaagagggacacatttttgcaagatcaaccataaatctcagaactgatgttgcagcaacaggggcagatgcctccccacccattaagcgtgctgcatatgtcttgtgcatcaatgcttcaccttgaagctctcctatcatgtcagcattttcctcaacaagctctgctacgaagccagcacttacctgtgaaagattgcctgtttgatgtgcaagcactgattgcatgcacaacctatcaaaagttgattttgccatggtaatcacagattctaacagttctacaaactttagttccacattgcttccatgacttggcattagagcatgaaagtctagcatgcggacttccggcagtctaggatacactggcttcccaaatatcaagcagaacagaatataatatatatcaggtgaatcatagaaacttctaagcacccgagccaaaccttgataacctccactactgcgaaattttagggcaaatgtaggagatgatgtaagacagatgccaagcagcgtcatgatccatctcatactggtagggtgaacagcttcatcaagaaaataagttatcaacttggaagaaacatttttatgccactgttctagcaactcatccgattttatggttacttgaagatctataagcatctctagcaacatgttcctgactattacatgcttccccattgactcacgagaaaccgggtgccgagatgttagttcaggcggatcaaatgtcataataacaaaccttactacatgctccagttcagaagagaggaacccatcttctagaattacaccaagcagtacaaccagcttttccaaaacaggaacttcaacatcaccccgctgaagggttacaagtaagtgttgaacaaggtttattcgacgcagaattgtgaggttatgatttcgataccaatgcatggacactagatgctcaagaaagccaaggagagaaatttggattgacagtgttgctgttacccacaatgtccagtccaacaggacatgctcaaccatgtctgcatttgacaacacaatgcaattggaagtttcagcaggtatatcagaattttctagctcagagatattactaaatgaatctttttgtgcagaaaaatcatccatatctccctgagatccaattgaagaaatttcattacggaacttcaaatgaagatcctcaaaacttgtttcatgcatggtcatagcaggcgacaaattactttgagtatatctagacttctttggttcagaaaatgaagcctcacatgcagcaatctggaaaaagatctcaagagattgcaaatcaaacagtgacattctacgacgcaaaaagagtgccaacagatggtatcctcgatatgtttgcatgtccctaatattttgaggattctgatgaagagcgcaggctagcaaggtgagggccatatgcagcatatccctggtctcagcagcttcaactagtgcaaggacaacagtcatcccaccaacagggtgaatagtatcaccaatcacacattgcttacaaatataaatgtccccatgaaggcgtccaaatcgtggtatccctgtaaagaacataaaaaataaataaataactaaaagagcataaagaaacagattttgtcatatcacatttttaattgattcttgaagttaattttatgcctagatgcagcaggaaagattttgttacaaacctccaataggagatgcagcagcagacataggatcgactagattgagcatggaaaaagtccctgatgctcgaataggctccgcacatgttccatcaaatgcaaatataagtttttttccagagagctgtaaagagagatttccaagtctctccaaatcccaaacgaacccacttccatcggtcttggactctcccagtttgcttggaggatcaagcctttgtgtatttaaggccaaggtagagtcagcatctaacgcatctaagatagccatgctaccaccaccacatgcttgattaggtacaaaacgaagaagatctgtgtcttgaaaaagccctctatatcctctaccaagaatgtacatgaagcaaatacaaccagatgtgagaacctcctcaaaaaggtagcaggagcgtaatttccaggtcaagccactaactcttgcacaagtagctggagttccaatggtaacctgcaaaggttttccaaccggagatggagaatatcccagtttcccagtatgtcgcagttttccattaaggtacatataagcaacgctagcttggaacagcccagcaagagcatttggcttgctgtgaacaactgcaagatgatgccacctgccttcctcaagttctaatcctgaaaacgatagggaacaagagttgctggttgcaagagtaagaacaccatcctcctggagataaagttcagcatagaatgtgttttcattatttgctgcacctacagaaaatattcgaagaatattctgatcatggtttttcccactagagttgttctgccgcttagaagcattagttttggaatgatctgtttcctttgcctgtgactttaagaagttccaaaactgaaaccaacaaacaaatgaatatccagcagctggaggccatgatctttctcccagagagacctgaatggaagcctgcccaatctttctcatgtccatctctataaatggagccagaggtacatcctctgagaccatatcctcattaagaatcaacctttgcatcatgtcaacaagtacatggcctgaattcatcgacctcatgttcagcacatatctaataagcattcgaagttcagaggcagataacctgtcaacaaacacattttccaacatcataagtgaaaacattgattgaaacaaacagataaaacaatttccagaaactaagcagtgtatacctataagccccaagaacttctacaatcttcaaagcatgagaaagtaatggagatgaacccaaaagaaaagggtggatgatctccaataaaagttccacacaaccttaaaatgaagtggaaatagaaaatgtaagaacaatggtgactcgtataaaaatgtggaagaaaaaaaagcataatttgattcgcacctacagaggtcagattttcctgattgaaggggccaccacaagcaagtttttcaataaggcctaagacttccaattgcacctttggagtaaatagcagcaatgaacggatcagaactctaacagcagcagcattgtacactcgttctttatcaggatgaaatgatcctgagttggtaactaaaataaacccttgtgattcattcccattcacattagatgatgtgctactttctgtagttaggaacggtgggagcacaatttcaagagctaattcaaacaacaactgtataatctgcttttcacactccacgcataataagccagactcagagagaagatcataaaaagtctgagatgatactattgtatgcagttttgtcctattaatagcattatcacacactgcagcagttataacacgcaacaaatatgtaaaaaccttagtgtaaacctccaaaggagattgatctgaaggttccccgtcactttggaaactatggagtgtggtaagcagaagagaaaacccagtggcatcaccaaaaactctctgagcagagttgttaacagtcaaaatacgccacagggtacccattgtatcacattttgcttcattttcaagcctatattgagatccagaaacgctgctgaccattccacttttcagaatttcaacaacagaacctaattcttccgaatgcgcctgatgaaaaagagaaacaaaataatcacatttcatcaacaatcaagcaatccaagaaaggcattatctaatttaacaaaactacaaaaacaaattgaattcctaataaaacaaaaaaaaggaaaaatatattataaaatatactgaactgaacagctcgaaaaacaaaacagatatgatcacaaacctgtttaacatcttcaattatcagacaggacaatactcttagtactccagggcgatgtacatcagacacaagaaaagggagaacaactgaaatgccattagccgagcgaaaagctgactgactggattcagttttctttaacaaagagaccatgcagtcccatgcaacagcaattgtattctcaatttcaaatataggaaacttcccggagccagaatccagcagtttgggtgatgaaataattacgtttttactgtctaaatgttttttaaagctgcttgagctagattttttctctgactgactagtatttccactgtttgaatctgagcccaaaagaaacttgttatgcttcaggtcatctagcaaaacttcaaggacaccaacttcacgcaggactttcctgtactgctggtcaaaggacaggagtttaacaaaaaaggagagtatcgtgtgctttaattcggatgttattggctgctgcaacaagcagcaaagtgaaagtaattcttgctcaggaacacagtttacaacagtcacagcatattcaagaatttttaatattatctcttgcaaagatggagggaaaccgtccatatttaagattaaaagtggaacagttcgtaattgttggcataacttatagttatcaagatgacttgagaagatcttgaacattctgtttagaacctctgcttgcaattccctactaccagccttcaggaaaatgtcctgcaacatctgaattgcttcaaggtctttaactttagtatttcccttctcccaaacatcttcagcaaaccgttcagaagacgatgaatggcttctgctattgccactggccctcggatgagaagattttgagccctttcctcccgaagatcctgaagtttcggatgggccagtctgagctagattaacaagaacatcaagcaatctagacagcacaggtgaaagctggtattcaagagattcatcattttcaatgaacttcttagtgtctaaatcaatgagtgcatgggaaccatctgaatcaaaattatgatttgaagaagattcagagcgagatgactgaaaaccatgactctttctcatggatgtaagtgtcagtgcaaattgaacaagaaactggtaaccatgagcattgtgtatatcctccctaagcctgacaccaccagcctctacaagccaaaacaattcaaacatatgtcagaaaatagcaattaaggttaatacacacacaaaagtacacaaacactgaagtactgtacactcaagctcccaagaacaaaatcctcttacagacaaaagtgaaaataagttgaacaaattaccaggcctgtatgacaattcaacacattccagtaacaagtcaacgatccccatagtgtaggcagaatcaccacaatcaggattgaagtctttaacggccattaaaagaacttttatctgctcatgaaacaaaaagtgagaagcttcttaaattaaaagaactcaccaaagaaacatatttatttggagatttacacatatgttgtacccagctgtagaaatgaaactcgggattcattggatgaaaattaatcagaaaattagaaattacaatttccaccaagagaggaaaatatgacgtgatcctaacccgccaattgttcagaaaacaaaaatgctttaacaacacaatcaaaattcctagattaccagcacatacagatgtaataaaaacaatgtcgtaccagatgatgtttgcgaatgtattttgcagtgcttccattatcactcaccaaaagaagaccaagtatctgaaacaatgaggaatggtaataaaagttacagcttaaataatcgatcaaaacaatcaataagaaatcaacttttccgcgacattgcaaactgcatattactgcataattccaaaaagtgaatgttaactgtttaactcatctacctgcatagcatgcctatgaagttgtatgctgtgcaaaagaacaaggccttccttgtatcgagaaaagattgtcaaagaaccatttgcaaccatctggaagagcaactgaagtgaattgtcttcaatcaaactttgtccagcggaaggatggcttgctagtgctttcattatgtgcacaatacttccctctacctgcccccagaaaaaaaaaagtattagagttaatgaatctatctcacgtgactaataaagtaaatactaaaacaaccagatatgatgtgttacacagtgaaacccctctcacaatgaaaattcaaatctccttccaaaattagtactgcagtattctctactaggaaaaaaaatacaagagacaacagccaaatgaagcacttccatgcattatacttacgcatacaacaataagtaatgcaacaaagagaaccctacctcaagtcgacgaacatcagcaacaccgctatctttttcagctagcactggtacttcacaatcagtagccttttgtcttctatttgcttcatcaggatccaaaagagcatagagaatgtgaatgagacagcagaatattcccgaatcaaggagagattgtttatcaataggctgtaaatagcacccaaaaaaggtggataacagttacaaggtgttataaccaaacaattaatagaccaacagtaatttctgtgtggcacaaactatcacattcattatgtcagacaatttcacatggtaaaaacatgtattaacaatgtggcaacaattacagaagcactgaattactcatgccatgcacgattcctttgagctactcactccaatcaatataaacagtagaacagagaagtagattatagtacacaaacacagaataaaagaccaccacactacaaattgacaactgaaaaatacaaatgagaatgacaataaagatattcaatcaagcaaagattaagaaattataccccagatactagaacttctaccgccctcaataaatttgatccagggctaatattatcctgcaaaaaaggatgtgaggatgtaatttaaggaaacaaaactatatttagagaggaggggggactgcaatgaaaaaattaaggcagcaacattaaacacacaaaccttgacttctgaaaagaactttagcacttttgctacatccaaagatcttgttttgctgccaatttttaacttttcgatatctgttacaaatgctcttccgacaacaaatgaaaatatatgtgtttcaactaacctgtaataaagcaaaacatgcaaatattggtcaagaagctccacataaagacagtgtgcactgattttgaatagaaatataaaccaacagaacaaagccatttttcattgtaaaggcaactttaaaagagagaatacaaagcaaacaaacgtaaatatcacgtgctctataccatatacatctcatctgatcccactaatagcatattagaatctatacatttctacccatacatgtgccatcttgagttgaatttgatacaagtaatgaggacccccatattctagaaagaaagcacaaaaaatatggtaaccaataattatatatgcaacaggatgcataaaaaaagaagacaaccagccagtatgtatataatgctagccccaaaaataaggaatatcacatcaaaatggaaagaatcaaaactatctttactatttatatgaaacgctgacttagcgaactaatcctataaaacataagtgttaaagtctaatgcagcaaatgagattttgaggataagcagtaatacatggtcactaattgagctacatcagcctgctgcttcactaatctacaaaaagcatcaactgttaaattcaaggccgcttctttctcctgcaaatacaaaaaaaaaaagtatcattagcatacatgtcttggcaagcaaatagcaaaggaccaaaataattaagtaaaaaccttttcagagctggatgaccgaaactcttcccaaaatctcttgaaatccaactccaattcatgtttgtctctgctttcacaatgaagattaaattaaatgaaagttcactaaaattgtaatcttaagggggaataaaagatgaagaaaataatccgttcagattctttaagacagtttaagctaccctgctacgtcagtcgcaaatattctttaaggtagtaactgtattgatgtaatttctaatacaaacactaatttagaaaaaaataataaaatactgataactaaatctgataattttttaccataatagctactactaatataatcacaataaaaccacagcaaacactatattatttctcaacattttttactgaattatgaaagcaatgtccaacagtagtgcaagatattttactatcctccaacaatcaataattatcattattcccttaaagcatgacttttattatacaatcacactctgtatatcatatcctggtttcttttttattgtttttggcaagaaatgaaaactgtgattgttttaacaagacaagtataattaaaagagtttaaatggatatgtttctctcatcttctcagagatttgagttattcttgtttcttgtcttgttttggaacgagtttttgcttgtggctggtaggagactttttcttctcctgtaatgtcccttcatttgtacaattttgaggtttcctttttaagcctttacaaaaaagttattcttcaagataagagataaccaaaaagcccaaaataaaaatttccccatacatgtcatccccagatgatatgtcgtgagagcctcaattagactttttagcctaggaaaacagcaaataaacatgccctatcaaccccaataaggtattaaaaattcagcaagtaaataaagtaaaaaaaaaaaaaaaactagatgcttctgtggacatgtttcaaggaaaaaaaaacataaatacaaactcaaaaccaagttcatcaatcaagaaacttatagacatgagccccactttaataataggtgaagccaatgtaaatcaaacacactaaagactactccagacttatgcacattagatatgaagcaattgtcgcccaaagcagccatttgccacatttgtcgacaaaataacaaaatcactaaaatatttactctgcatcgattttcatggaacatttaaaagctataagtttgaagaacttatattctttatataagtagatgaaaaagataaacagtattaaccaaataaaggacgatatccttcactaaataggtttgatcacctgtcaaatctcccaatgctgtagcgtattatcacataacagagctcattcgagccccccctacaccccccaaaaaaaact

SEQ ID NO: 185524 - DNA, 2567 bp, Cannabis indica
cttgtcttatattcttctaactttcttttctttgccaaaatatccttcaagaatttcaagtaagttgtcaatttttcaagagcctccgaaaagagaatatttaatgtgtagcttcttaaatattaaactaaacatttttttttttttgacaaattaattcatccgtattttagtatgaagaagctactttaatcgtattatcaattttagtgcttttacattaacacataatcaacttcaaatccaagcttacatcaccatcactcggtcccagtagttctatccacttaattttcttatgagatataacctttgaaaacaaagattaaattattgttgtaaagaattaagaaatatataacaagggcacatacgtacacatgaacatggtgggatattatttacagattgaataacaaaatgatgcaaaccttgcattaatttcttaaagtattcttgaattcaaaaggcctttgtcattcatcctgttcatgatccgggatgcatcattaagtctatttgctcgttcatagatgccagcaaccacaagatgcaactcctttttgttaatgttaagatcagattctagcctctcaaacagtgtttcaaccatatcgaaatcgtttctggcaccataaagactgagcatctggaaatgaacttcatcagggaaaacacacccctcatcctgcatttctctatatacagcatctgctctatcaaattcccgcaactttccataagcattgagtactaatgaaatcacattggaatcgggaaagtatccggcccctctcatcttctcgaatacctcaatgagatttgtatacttcttgtttcttgagtaaagatttatcatacaaccataaacagatatgtcctttatctccccatcaatgcaggcctgacgaaaaacccaggtagcctcttctagtctaccagctcctgcaaggatggagatcgcggtgtccctaggaatgttgtcggggcgcttgagctcatgaagtaaacgcttagcatgagcaaccagccctgctctctcataggccacaatcattgtctgataaagaaccagatcaatctcaacacctgaactcctcaacttctgaaataacattgctgccctgtccaacttcccagccttaccccatatcgatattatagtagagtatgttatagcatttggttcaatgcctctcttctgcatttcttgcacaaggttagtagctttttcatgctcaagggatttaccataagtttttatcatagtgttatatgttacagcattctgctcaatatcctttctctgcatcaaccgaaaaagatgtatggcttcgccaaaaagctcagcttcaccataaactctcaaaagggtattatagctaacaacatttggttcaattcccatcttcctcatactccaaaacaaaagatcagcttccttggccatatccagctgtccataaacatcaatcattatgttacatgtggtgagatcaagagaacatctgacctctttcatctcagaataaacagataaagcctcaacaaacttttggttctcaacatacatagttaagagagtagaatagctaactgtatcaggcaaaacaccagcaaccttcatctctttcaatagaagacgagcctcacgaaagagcttagctttcccaaacacattaatcattgaattataagcaacaagatcaggagtaatacctgaccttttcaatcttgagaaaatagaaatagccttggaataatcacataacttacgagaaagctcaatcaaattactatacaaaacaagatcaccagacacacgatcttgctccatttgctgaagccatgaaagagcagaatcaaacataccctctttcccaaaataagtaataagcgtagaataagtatatctatcaggagccaaagctctttgacgcatttcatcaaacagaccatgagcaatatcccactgcttagcacgaagcacattacgtaaaacaacattgtaagcaaacacagaaggagtatacatagctacttcattaatccaatctaagatagcgagtgaccgttgccagtctggctcacgagaaagcaacaaaaccataaacctaatcgaaagctgtctacctttataggtggaaagaacggcgaaaagttcatcctcattctgggtctcccaaattgacctcaagagttcatccatgtccacgctatgatccaaataatgggtatttcttccttttctcgggtggcggtcgtggtcgtggtcgtgggaggttttcctccatacatctttgttagtggattttgaataggatgagataatggaatggtttggcttagtcttggcttcgaagatgaagggtatggtgatggaattagtggacttgatttggggcaataatggtaaggagaaggaagaagatgaagatggagcagagagggataaagtacacatttttgtacgacaacacaaagtgtgcgactcactcttttatgactaaaaaaagcttcggataaggcaaaattttatcatccctgtgcttcaatttgatgtaaaa

SEQ ID NO: 185525 - DNA, 1108 bp, Cannabis indica
gccgagaattctaagaaagactcaactaatgctaaggaagccgctgtggcttccgcggctgcattggttgcaagccaatgcgccaaagttgctgaagctatgggagctaagagggaccagctcagctgtgtcatcggctcggctatcaccggaaccaacgcaaccgatatctttactcttgctgctgctgctaaaacatgtaagagaatatgcattctgtttaactgtgttcgaagtcaaaatacatcaaattaatttatatattttaaaaaaattattgtataaatatttaaattgttgagtttgttgttagtaaatacgttttaaaaataggtataaatatttaaatattcttaaaataagtgattttgtcacacttaactgtttgttagtttcatataattggataccacatgccaatattctattaattattttttgaatttgagcgtttattaagaacaaataacttaataatttaagtatttatgtcgtaaattttcactttttatttattttattttaagcaaaaaaatttctaatatttcatttttgtttgtttgtttcattttttttcctatgtaggtgagaatggtagaagtttaataaaattattaatattaacaaatatagttaattattaagttttctattttttttcattaatttttttttaaagaaatgctataggggaacataattatttgatttgaattgatttagaaaaggaaatggggtacaattatttttagataagtgttaaaggacagagtcaatacatgtatgttttatattattattagtacaatttaatatcaagtcttacgtattaaaatgtgactcaatttaataccatttcgattattgaacttaattttggttttgtgtaaaaaatttatggatggcagcacttaaaggagctgctacactaaaagtaaggtcatcaggatgcaagaacaaaataaatggagttgcacccattttgcctattgaagaaaatcatcatgaccttggttttgatttgaacacttataaatcaactcttgcaaagggtgctgagcttggtgttgaaactccagatggtaattatatatttatatacatatat

SEQ ID NO: 185526 - DNA, 3510 bp, Cannabis indica
cccccccaccacttgcaaatcgtcactagcagccagtttaatactctttgaagctaactccctaatctgacgagctaacttatccaaatccaaaggaactccatgatgatacatatcattacggtgattccacaatttgtagtacaacatagcaccataaagagtaaattcaagagcctcagtctgcgccagagcattgtggaaaggcggggatagcaaccaattcaccacctcacggccattcgaactctgtaaggcctccgatcgaataccccaacgggtagaaaaccagaggaatcttgtgacaggacaaagggagacaaaatgactcacattgtccccttcatcttgcccacagagcatacaaacaccaggagcattcccaaaaatgttctgtagtttggacccaaaaggaagaacatcatgacatagtttccacaagaacaacttaaggcatttttgggcctttaacttccaaatttttatactcaaaacatccttctcctcaaatctctctttatttagagaccaataagcagctttcgaagagaattcgccattcaaagaggagttccaataggctgtatcattagccggaagcaactctcttttcaccttgggaatgttagaagaaatagccggagtaaaagtcgaaaccaccctcccctgatgccaaccatcctcagccaaatccaccaattcctggatccccatgctactaccaaccagggggtttatcgcccccgaataaacaacaagatgattaccacacgaccatttatggaaccagattttcacatccgagtcttggcccaccacccacacgcaattttgccgaataaaatcctacgtggactaaatccctctagcagccgcagaggcattcctatggtggctcgaagagagaaaactattgaatttgcaatacttcgatccgagtacatgtgtcaagaaagccttagaatccttctccaacaaccagccaatcttggcaatcaagctgaaattaacatctctggcccacctgaagccaagacccccgcattgcttaggcttacataaagaatcccaagctttcaaagccagaaaatggccctccttgcactgacatgtccaccaaaatcatctcagagccgcatcaatttggttggtaattcttcgcgggagaatgaaaaccgacatactgtaaatcgggatagaagcaagaacacttttgattagcgttcctctcgcggcttgagataaaagtcgagccctccaaccttcaagtctagccgaaatctcatcaagaataaagttaaaatcgctactccgattgcctttgaaaaagagcagattgcccaagaatttctcttctctccccatctccttaaggcccagcaatctctgtatctcctaacgacgctctccctagccatttttagagaagaacacctttgacttctacacattcatcttctgaccagaccacttgcaatattcatctaaaaaattcaggatcccttctacattacctctatctgcctcaagatagagaaggagatcgtcagcatacatcagatgtgagatagggattccttctctgttcaacgagtatcccctcaggttcccttcagattcagctttagagaagaagcgagacaaaacctctgctccaagaataaagacatagggagacaacgggtccccctgtctgagccccctcttcggagcaaaagccttagtgagacccccattgagcaaaacttgatactggaccgacgacaagaaatgcattatcattttgcaaaaatgaaaattaaagccaaagcccttaaggactttaatgatgaaactccattccatatggtcgtacgcctttgacatatcacactttatacttgcaaaagcttttttccccaccttcctattcatatcatggaagacttcattagcgattatagaattgtcggctatccatcttcccttaacaaaagccgattgaaacgaggacacaatcttatcaagcaccacacttaaccgattaggaaggattttagtaataatttcataggtggaattacatagactaatcggtctaaaatcatcaaagcgactagcatgagtctttttaggaatcaagactatgaatgtgcggttaacctccttgccaaaattaccacttgagaagaactcctgaacaaagtatataacttgattccccactatatcccagtagtccttaaaaaacttaatagggaaaccatccggacccggggattttaaagcacgcaactcctaaacaaatttcttaatttccaccggggaaggaggttccaccaacagccgattctcttcatcagttttgcataaattaagcagggaatccaactcagagtcaaacctctgattagtcgattggtacacctcagagaaccggttcctgaagaattcgcttatgttgccacgaccttccacccatctgtcattgtcttctttaaccgcccatataaaatttctttttcttcgaacaacaatggaggcatggaaaaatcttgagtttctatctccctcttttaacaaattctcacgtgccttctacttccaaatggattccaaccgcttttcaacttcttctatttcgagcatgattgttccttccaattccacattctccttactcgggaggcggctttgaacatcactcaaaagcttctccagcgccttaagcttagtttgacagtgcccaaacaattgcacattccacttgctcagagcttttgccgtgagtctgagctttttacagaggatgaagctatgaaaaccccgaataaccacatcccaagtctcctctatcacccttctacaaccttcgtctctactccaagcatccaaataccaaaaaggagtcctgaccacttctctatcaagatgagtatccaataaaatcacagcatgatccgaatgccgaatagacaggttttgaactctcgccttcttgaattgggtaatccaattagaggacactacagcccgatccatttttcacgcactaagctatcccaactttgacaatttgtccaagtaaaaattgctccaatcccttcgagatcgatagctcctgtgttgaaaataaaattacggagcccttgcccctctgcctgagttaccagtctgcctcctactttctcttcctggtgcagaaccgcatttaaatcacccatcaccatccagggacagctaaatgctttcatcacattacccaactcctcccagaactccaacctttgctcccttcgaggaggggcataagtaaagcacccaatccattcctccaagttcaaatcagaagcaaaacgcactaaaatcttactaaactctgcggaaatattagtattgatagtggagatatctgatggacttaattaggaccgcaagtgctcttccacagtttagtctacaacttaaagttgtacatatattcttagattcatctacttgatgctttatataaaaagaagaaagaaacta

SEQ ID NO: 185527 - DNA, 1938 bp, Cannabis indica
gaaaaatgtgatcacgatcacattaggactttcccgagaagacttcaacaatcggtgctggaacctcttcaaaccagcataactcattgtctaacataaccagtgctaccttttaataattatcataatgatgatatatatatgtatttatcaattatttaaattaaaataatattaatatttaaatataatacttaatattataattctataattaaaactattaaaacatgtaaaattaagattaaacataaatttatttatggggtatgatataaaaattgagtatttataagtaaatatttaaattttaataaatgctaattttttttaatatgatgctaataattttttatataaatataaataaaagtataaaatatacacacttaagtaactgtaaaaaatatgaaaaagtaaagtacgaattcaagtccggatatgaaaacgggcttgcttgtgtaagacatacggtcgccacaagcaaaacacaatatgaatccgagcacgacataaaaaataagctggtctatgggccgtgtgtcaggcctacccttttaaaatattggcacgagatggtacgatccatatttcactatagcacaacatgacacgattcatttttttatttagaaaaaaagataaatataggctgggcgaatttataacactaattgttagtagcatataacagtttttttttttggaaagggttgttggtgacaatttaagtatgcttatgatgtgtttatgtctagtctattttgaatgaagatagtgaattaatatgagttagtgagaaaataaattccagatgaagcccagcttgtaaatattatgttactgtactttattaaataccaacacattatggacttataatcaattaatgtgacatcaaatttcttccttaacaaaagtgacatcattaataataccatattaggtaaaatcgtgaatttattaacaaatttagttaagataattattcgatttttttttaatgaaaggatatagttctttattttgatgagagaagctaactaatggtgacattaaaaaatagagttggttaatagtgacttacgataatcaatgaaatcatttggtaactattcaagtgttggagctggagagccaacaatcaagtgtgatagccgttgtaagctcatcttaaacgcacttttccaatttttattatctataagtcaaaaagaatgaattatttatttcgtttgggttcggtatgagtcttcaatgaagattttgccaatcacttctttgtaataataattattaatattttaatgggaagtatagggataagtaagtaagttagttggaaagatttttacacattaaggattgagtagattagttggcatggtgggtaaggttttcaatgaatttagtttttgcaattagggattttattatttaattttgatgggggaagcattgaggatatgagtagattaggtgtggtttttgatagtacatttaaaagggtcggctacgtttgttggtaagtattagattggaagttaggaatttattaggtgaataatgacatcataaaggtagttaggtgtgtcaccaattgtgtatgttacacttttttagccctacgatgattgtgtatgttatgtgcataataatttttatttatttatttatttattatgggaatggatgtagtctatgtgcctccgggaatggatgtagtcctattttaattgcttctactgcatattgtgggctgcaaattgcggtgtgcaatagcatttggtttgggcagagatctataccctaacaccatctcccaatgcaagtatttatgctaaatttagaacaaaaaaaaactaacaaatactataattttataatatttgctattgtactgcacaataatatttataatacaaattataataacaa

SEQ ID NO: 185528 - DNA, 3735 bp, Cannabis indica
aagaaaaaaaattaaaataacatagccatactgtatccataacaaatttatagagaaattttaagaagaatcttaaagtatcaagtactataagaggtggccgtggtgtattgctaatggtgctatatcgataaataatataaaaaacttgctaactactcacaacgtgctacatcgatatagtgttggtcttcagatgcctaataacaatgcacaaattcataatactctgatttgtgtggttggaaaaaacatacactttttgggacagaatttgagagttgtaaaattgtaattagcatttctttaatcatatgacccaacaaggctaaaagcacatatagtaattattcttctcaaacaagttatgtaacaaaaagaagagtggatagataattattgggaaactattatgctgttgcaatattagtactcagttttagatgaaccaacagagcatatattataaatgaagataaaacttatacaatatccttaaaccaatgttatcaaataccaattacacaaattttcttctcacacatgaaaagatccagttctcacaaaatctacttcaatatttagtaataataataataataagacaacacaaaagtgttagctaacagtcttgtaattgaattggccaaaactcactacaccccaccatcccttctgtacaaaagagaactcaagaaactttttcaccttaattttaacatataacaaagaaatagtctttttcatcttacccccaaagatattgatcttatctactgtttgatgttgatcagtggacaagccacagaagtgtagttatcccttggggtgaggaggatgacatatttttgtacttggtaggactcagtcacctgccctcagatttgaccagctgggagaacaccctgctcatggaaacacccgaaagatcatccacaccggtcatttcaacgcctgaaacagttgtgtcgaggttggtgaagttgttaacttgtggggagagctccccgatcacattggtactgttttcttcaggatcaccaagaattactgcctcttgaagttgaagagcatattccaaattccacaatacatctcccattgaaggcctatcaacaccatagtcagcaaggcatttctctgctgtttcagcaaactttctgagtgaatctggtctaatctttcctacaagagtagagtctatgatttgatccaattgcccttttgtttgccatttcattgcccattcagctaaattgaccatttctcttgggagtgttggatctatcactggccttgcacaaaggacttcaaacaaaaccaccccaaatgaataaacatctgatttttctgttagttgttgccttctgaaatattcgggatcaaggtacccaaaactccctttcactgcagtactcacatgagtttgatcaatttctggccctgctttggaaagaccgaaatcagcaactttggccatgagattttcatcaaccaaaatgtttgcagacttcacatcgcggtgaataactgctttagcatagccagtgtgaaggtaatggagtcctctagctgcaccaatgcatatttcaagcctttgtttccaacttaaacttggaagaccggaaccgtacagatgactcttcagtgtcccgttctccatgtattcataaaccaagatcatctcattcttctcatcacagtatccaatcaatgaaacaagatggcgatgacgaaactgagaaagcatctcaatttcggtttggaactcagcaagcccttgttgtgattttggatttcctctcttaacagccactttagtcccatcactcaaaacacctttgtaaaccttcccaaaaccaccaataccaataacccaattctcatcaaaactgtgtgtagcctcttgaagtgcattaaagggaattcgataaccatggttggaagcaatactagtggttgttctagtggaatatttgcttcccatggtgtgggaaccattaatggataaaggaatccatgtcttggagtggccttgttcagccattcttctccttcttctacacaagagaaagaaaaccaaagcaaataccactacaacaaaagctcccacactcacaccaacaattaatcctacattcttctttgagctcgaacccgaaggagaaaaatcagaattactgagacttcccttggaattgctcattttcatgatctccaatccattcaaaatgccattggggtcaacatcaggtaaagttgaaggtccaatactcacactaagattattgctaggtgctggaagtgtaacgaaatccgaataaattgcagtagccaaaacattaaatgcagcaccagtgagatcaagattaggagcaacattccaagagtccacatacacattgaaatagagtgaattaggtgaagaactaactatatcacaaaagtgaaaccttatgaagtaacgaaatcccggttccaccttgaacacccaagtcacattgtaattgttgtgtggatcattttcagcagccatggctgttgctgttccatagactgaacttggagcagtatcaggggttgccaaaccatcagtatacttgacagccttaatatttgagacatttcttacaccatttttggttacaagaaaattctgatcaggaacccaagttctccaaagggtatcattatcaaatgacaccattgagccacccatgttaaccctggcaacagtctccaaagccaaagaggtcaaaccattaaaatcttgccttgtatcagctgtgttggcatcatctgttataagcaaatcagggactgaaacaacctctatagcattcaagaaggcaaaggaattctctaaaggtgttaaggtgataacaagactattagaggttgtatttactgaaaattctttcacagaagcaccagaagcactgaaatggtttaggaggacatggttttctgttgaaacagcaaattttgctgtgttcaagttgtaagaattgtaaacaaatggaaagaaataaaggcggatccagagtctttcatttggggtgacagagaaagtgtattgtgaggtttcagtaaagactctagctgtttgataaagaggagaatcactagaagaagtgattgatttcaagttggtttttgcaagaacatcttgagaggttgataaatactttaaaccagacttatcagatacaaaaacacggctaccaactttagtatctgaggatgatccacagtctatgaggtaattatctgttggagtaaatccaatacaaaggcataataaacacaaaactaaccaaacccagatgagaagttctacctctctaactctacaacccatcatcaggaagaaaaatgaaagcttgaaactttacacacaaacaaaagaaaaaaaaaaagattggatttttattcttttgttggtctcttgggaacttaaaaaaaacaaggaagagaaaaggaatcacctttgatgaaatgactgtaattgagagagacccagatgcgtttcccctttaagagaggcaaaaatgaactgtgtataggcttttgagggtttgcagacagttttattgcaaatggggaaggtcaatcaatcattatgaataaatcttgggaaaacattataagctcagctgtaatgaacttgatgacaaccttagaaaccagatatgacaggctctcatggttctttccttttcttttttctttttt

SEQ ID NO: 185529 - DNA, 1841 bp, Cannabis indica
attcatctcaaaggattcctcaagttggtaaggctaagattgagatcagtaaaaaggctagaggagaaagggtcagatttgagaaggaaaattctcattccagcattgaatcagattctagaagctccaactttttctttacacagggttcaaatgtgagtagtaatggaaaacagattggaaggtcagtgagttatgacggggaaaatagcgaagatgctcatgcaaacgaacaacgattcggtgaagatgttcaaactagttttagcaagaagaatgtgggggaagttgaagatttgcaagatgattcggttgcagaaaattcttggagggttaaggatggaaaaagtgggaacaacatgttctcaacaggccgggatccactagttcaatccatgcttagtctgcagtctgtacaagaagcacttgaaaaaggttagtctatgttttctcagataactttcatttatgcttctttatagtatttaggaaatagtttattaaataaatgtaagaaaacgtttctttcaacttcccaatatgcagagcttatgtgttcatttatttgcagctgagcttgaattaacttgatcggtgtaaatgctttatttatttctttgttttttctaatttaggtaacccttctagcaaaataaacttatattctaatctttaccatttaataagcaattcatccctagaaccaattgcattcactttaccttgtgctttgtgtaaccctcctttttattttctttagccactttctcttttcattgctttgtttttcctgactttatgctgaccttttatagcaattttaacaacttttactttcacttttgagaatgcaatgagaccttataatgtttgactcgttcttagcacaacccctcatcgtttgaatcggttattagaaactcattaaattacttattttttggaaaaaggctgaactttctcaaagaaaaagaagaaaaggtaagtttttttagccgcagaatggtcagttggttgtgaggtccctaacaatcccagatattttctttttatatgtttttttaccattttctgcttttggttaactaatctaaaggttattgatgatactcaatctttactaaaatttggatgtaagtttaaagaaaattcatttgatggagagccatttgtcattttgcagaagttcagaaattagcagagattaggaaggagcctatattggctgctagttcgatggagggtggttccgactttgctagtacaggaattcaagaaccttacctatctagccagttaacttctgaaaaacctacacaattggatgttgattccttgcaggcgaaggttttgagcctggagcagaatgtgaaaattctggaaagcaaactggatgagtccaagaatttacttgtatcgaaagaaatcaaggtagccgaactcaaagccaccattaacagcaccgagtttctgaaggatgaatcaggtagcacaacagatttacaggagaaaaggcatagacagatagaagaagagatggagggcatgtttaagcaaaggattgaagctgaaatcgagtttttgacgatttcaatggcaacacagaatttaaaggtggttgcagaaaagcaaacaacactctttgaagaacagaaaagcattgcagaggaacaagcccagatgctaaacaagctcggaaatgctgaaataaaagctgcaaagctagagaaacaagcacacgaattagaaaaccattgtggtgatattttagagatcgaagaggtttcagttactcggaggaaagtatataaggttacatggtgtgtttgtacacaattaat

SEQ ID NO: 185530 - DNA, 2276 bp, Cannabis indica
attatataattattagtgtttatatatgcatactactcatgaatggacaatattaggaaattttgaatttttatacttaatttttctatctaattagaaaattttcttatttttacattatatgagttgtggttgttccatgggctgaaaaaaacaattaagagaaaaagtttttcgacaaaaaaaaaagataaagaaaagttaagtttgatttaaattaaactcatccgaaagttcttgtccgggagtccctcatctagacaatctgatcccacctggaatcttccttctcgaaacctcaaaattggagctttcctgaaacaactccctaaccaaacataccaatgtctgaaacctactcgaccagaatataacaatcataacccccacttagaaccaatatctagaacatctaccaaccacataccttcgtctaaaccttaccacattcatccgagatcccctgatctgaatactaccagccaggttgcacctatccaggaaacttacacttcgagagctttgtatataaacatatttttgatatagtgtaaaaagagatatattttaatattttttttaattaagtagctaaattaagcataagatttcaaatttttcttttattattcatcatttgatcaaaatttaaattaatatttataattaaatttatctaataaccaaagtgttctatatatatatgtgatttctctattatatatatatatattataatctcttaaacatataacatatttcatgactatgtttactcttatatataagcaatttaaactctctaaaattaatatagctagctatatattgatgttcatacattgtttgattcttattaattactttcttcctctctacatgcttttctaccattaattcacacacatgcatttttgttctattcaaatttcaagagaagggtctatagtgtttgtttcttaattaaaacatagtttgacctaattaattactatatatatgcgtttcaaatgaatatatataatttcaaagttttcttcttacaaatatatccgttactttgtttttctttgtaaagagaatcacaaaaataaatatgtattatcactcctactcatataccataattgcatcttaaaaccagctaagcatataacataaaataaaataaaataataataattgtaaaacacatattcatctctcttaactaaaacaaaaacaccattaaaatttcataaaaatgactccaaacttacacaaactcatacatgacataaaacatagaacataaaaattaatgaatagtaatatctctagaaaaatattactttcatcaatttgtgtttattattagcaacataataatgataataatagtaataataaaattaaaattgtttagaaagtatcattagatatcatcatcaaggttgaagaagcctccaccacatgctttctatcatccacttcttccttgagaatttccaactcttctttcaacctcttcatctcctcattctcatcatattttctcttctttctcttctttttctctttttccaactccatgtcgccgttgttaacttgctcgctgagcttctccaactcctttgttttgcgacgagaggtggaacgtctcttcttagtactcgaaactccatgctcttgctcgtgcaggaaacgatcgattatggaagtaacattaggttttccatatgagtaaacttttccaccaggagagaagacaataatcgcgatatctacatcacaaagggtggctagctcgttcgccttcttgaaaaggccatttcgacgctttgagaaggtcacttgaagagcacttcggtcttgaaccttaaccatctcaatcttacgacgccccatattatagtgttttttttttctttgccctagtaagaaagaaaagtttttttcttgataagaacaagaaggaagaagaagaataataaagttattttctatttaggatttctctctaaatgggaaaagtatgaaatggggtgaggaaaatgatgtaggaagggctcacttaaatagggtttttttgggggagattttttttttcaatagtggaaaatacgtttggagtatttttggaatcattaattttgaaggttacgaatatattggttttgtagaatgaaatagattttcaaccctactttaaatggttttaattgttttttttaaaaaaaaaactttaaggtgtaagtattgtttacttgtcgatcacactataagacttcactgat

SEQ ID NO: 185531 - DNA, 1575 bp, Cannabis indica
gatgacagcaaaaataaaatattatattctgagatgctcttaagggctatcaaaaaaattaagattggggacaaatttgcaaaagcaaaacaaaatttagggaccaaaggctaaactattcctagggctttatttttcttttcccccaagttttccctagggctttttactctcaatctttttatcatctaaaactaaaactaaagctaaaccttttcttcttcattgtctgcgtgagagcaatacagagctcagctcaacaatggcagacgatacaacgacgctatcgtcacagctcgctcagtctaccatgaacgacggagtccccagctacgaagatttgaaagctgagttctctgaccgagttttaattcgttccattatttcccgatccgatggcggatccggacttgctgggcaacgtgtacgaataggtgggtgggtcaagaccggtcgaaaggcggacaaggacgcatttgccttcttggagctaaacgatgggtcttgcccagggaatctccaggttattgtggaggcggacaaggctgaccttggccagctcgtgtcaactgggacttgcgtgtctgtggatggcgttttgaaacttcctccggctgggactaagcagaaagtggagctccgggtcgagaaggtagttcacgtgggtccagtcgacccggccaagtacccattacctaagacaagactcacgcttgagtttttgagggactttgttcatcttcgtcccaggaccaatacggtatgtacattttcctacttacttaaattatggtaaatcaattcttgtttatgtgaaatgatttaaacaaaaattctcattggtttatgatagaaagaaaaatggactaattctgttgttgaattcaattaaagtaattattttgcattgtgtttcgactggaattttaatctttggtacatatttccagatttctgcaattgcccgtataagaaatgcccttgcatttgccacccatacattttttcaaaagcatagttttctttatgtgcacacaccaattataaccaccagtgactgtgagggtgctggtgagatgtttcaagttactactttgattaatgaagctgaaagattggagaaggagcttattaagaatcctcccccatcggagtccgacttagaagccgccaggcttgttgtcaaggagaaaggagatgctgtctcccagctgaaagctgctaaagcaagtaagcaggagattggtgcttctgtggttctactgaagaaagccaaggaagattatgcgaaattggaggagagatctaagcttaagccgggtattcccaaaaagatggaaagattgattatacacaagatttctttgccgtcaagctttctgactgtatctggtcaattacaagttgagtcatttgcatgtgctctcagtagcgtttatacgtttggacctacttttcgggctgagcattctcacaccacgaggcatttggcagagttttggatggtggagcctgaattagcattttctgatcttcaggtatgtgaaacttgtatgcaatttttttcctgtctgg

SEQ ID NO: 185532 - DNA, 2166 bp, Cannabis indica
ttttttttttcaaaaaacatgagctatggaaggaaaaaattgattttaaatcaccttaagattaaagattcgaatggggaagaacgtcatctaggcatcccatttgttttcaaaagaagaaaaagagatgactatcggaagcttgtggatggtatgagacaaagtttggaaggttggaagctgaaactattattgtacataggcagactcactttgatcacatcggtaactgcctctttgccaatctatgctatgtcaacaaataaggtccctcttgctacttgtcaaagtttggatggcctggtgaggaaattctagtggacaggtaatatggaaaaagaaagattcatgtcctttagatcgtgggatctcatctatcaatcaaaagtccatagaggtttgggtttgcgtaggtttgaggatatgaacaaagccttgctatcgaaacttgcttggagtatggtaatgatacctctaagccgtgggttcaatgtctcttgcaaaattattgtggatcacaaaatttttggtatgtggagcatagatcaaatgagtcgactatttggaggggtatttttcactctaaggatatcattctcaatggttcggtatccttggctgctgctggtgactctattgatgtatggaaccaaccttggatcccttggttggattttaaggacttccatgaactaatgaagaacttgagaggtaaaagtttcaccataaaaagaatggcagacatttcaactgataatgaatcaaattgggagttgatttcccaaatctttgggccgaatattggtaaaaaaaatccttgatatcccaagagttccattatcttttggtgaccaacaaatttggaaacacaatagaaatagaaaattatcggtaaaggatgcctacttggttgatcaagctgaaagattttatcataagaaagatctgtggaagtggatttggcacccttctatgcatccaaaaattacaattatgctttggaggatcctaaacgaagcgctccctaccaagacgaggctgccgcttattgtggataaaaattgtttcttgcgtgatggtttggaagagatttcccttcatcttttcaaggaatgcagttttgctaaagccatatggttctcgagtcctttcccttgccgtattgatacatttcctggagactctcttctgcaaaccttagaggtaatgactcaaaattctcccaatagttgcaaaaggcttatcatactctattttggttgtgtggctactgttatttggcagtatagaaatttgatttgacttaagggaggtgctatcgatttgggcactgcaattcgaaaaatcaacaacctcttcaatgaatattctgagctggttactactgatctgaagaaaagttctttgaccccggggtgcttggagaagcccatctgggatggtacgaacattgtgatatgtacaaatgtgtcttgggaggatggtgtggctggtattgcagctgtgatgacgaattgcagtgatggaacttgggcgcattattctcttcgaacaactgctgaaactgctttggaggctgaagctctggcaatcaaaatggcattaacttgggctgctgcatcttcctggagtaatattcatgtgttttccgattgtcaagttgctactcgtaatttttccttaaacaagtgtatccctgattggagactcttgcgtgtgtcgttttctattttagatttagttaagaatttcaaagtctataagttttctttcttgaatcggtgtttcaacacctttgcgaatagacttgctaaaagtgctaggatctctagtattaatgctggtttgatatttggggagggaatttcccctgtaattcccatcttttttcctttgatttaatgaactaagtttcttttaaaaaataaaataaaagcccaaacattcttatatggtcttcgttggtgtccaaatatgctttaggcttagacatggaagaaatttggattaggcgtagacctgtttattgtttattgtttattgtaccctcagatgattttcttcatactaatggataggtgataagacccgagaattctaaactcaagcacacaatgaaataacagcaaatagttaaaaataacagcaatagtaacaagagaatag

SEQ ID NO: 185533 - DNA, 1407 bp, Cannabis indica
ttagagttttattaactgttttgcaagtgggtgcttttgtgttggacatatatgatattacccgttttagttatagggattcaaataaccttcattatatgttattgtagatctgtttgtaaattgggtgtttttccatttcaatgaagtttctaattactttgttccttacagacgtgtttgagcaaaggtggtggtttccatttcccatcctgtcacatactcaatatttgtggctttaggattttgtttgatgtcccattggacctctcagctcttacaatcttctctcctgtaccaaatgatttcgataatttagatgaagagaattgctgttgcctggagtctgacaaacataggacaccagaaaaaaccgccccaaatgcgagaaatcttgtttatgcagagccttgttataaaactgttaaaaatctacacttgtggaatgcctctttcattgatgttgttcttatttcgagcccaatgggcatgcttggattaccgtatcttactcgaatgaaaggtttttctgctaaggtacaagataatgtgcttggtcttgttttaacttttcagctgatttcaatataatttatttttggatgttttattttttcatttgttaattttctatatggggcagatatatgtaactgaggccactgctaaacttgggaaacttatgatggaggaccttgtgtcaagtcatatggaatacaaacgattttatggagacaagagtctgtttgccctcaagggatgaagttcgaagagcttgatcaacttttacccacactgaaggagattgctttaggcaaagatggagaggatttgggtggttggatgcccctatacaggtgatttacaatcatatcttatttacatttgtgatttgaaattgttgaataaatagctcttgtattggaggatataacaaaaggaacttcacagtgcagttgatgtgaatgattgcttgaaaaaggttcaaacactaaaatatttggaagaaacctgctataacggcacattgatcataaaggcagtaagctcaggggcagaaattggagcttgtaattgggcaataaatagtccaaaaggggatattgcatttattaccagctccatctttctttctgggcatgcaatggattttgattaccatgctcttaaagggaatgatttaatcgtatattcagatttcactttcatgcatgccatggatgacctagatagtggattcaattctgccccagtaacggattctatcaggtatctttttgttttgaagtttgaatttttttatcagcatcacctcatttttactggatcttttctgaattttatcacaattttacttgaaccccaactccccgccttaaattgtataattatcaaatagagtaactg

SEQ ID NO: 185534 - DNA, 1289 bp, Cannabis indica
ttttggtgaacattagaattttcagaggtttgtgaattaaatgcataaaaaagatagaaacatcgatgcattatttggtggcttccttctgagttttatattttttgacatccactaaatttgtgctcaacactataatgtaactgtattgttctgtctcaaagcccactcgtgtacatgcaggtagcaacagatgtggcagctcgaggattagatattccagatgttgaagtagttattaactatagctttcctctgacaacagaagattacgtccatcggatagggcggactggacgggccggtaagaaaggtgttgctcacacttttttcacccagcaaaacaaggtactttgaccatcttacaaactcgttcaatttagacaattctcatgtcatattgcacattagcttagaacttccattatttcaggaatacttgaataattattccttctgtgatacttacaaaattcttttataaaaaaaaatctgcaatcatttcagggactagctggggaactggtaaatgttctcaaagaagctgggcaaattgtaccagtttccctattgaagttcggcactcacgtaaagaaaaaggtgcatattctctcttcttcaaagataattttctttcaatcagccgaactttgacttttttagttgtgttattatagatgaaaaagaaggaaagcaaagaaaaaaaaaaggcctagtgttttcatagcatattaataataatcattatttggaaaaatacaggagtcaaagctttatggagctcacttcaaggaaattcctgttggtgctcccaaggccaaaaagattacatttaataactctgacgatgaagactgaatatttgattcaattaaactctttggctcagtaggaaaatagccaaaagaatatagatatcctagttgcaattagccttcttaaattcacgttttctcccccttcatataaaatttgcaatattatgtttctggaactcatgaacttagctttatcaaagctttggtacgaattttggctggctaagtgtattgtaatgtttcctgtttttataatttttttatataatataaaaaaatcattttttctatcttaattggaaccattgcatttggtgatgtgcttgtatagtgagcattatgatatgacagctcccttaatgtcaattacatttgattttttttattagagactagggaatagatccgctctttgcgcggttttgaataatttttttaaaattatacattaaaaaaattaatttattaaat

SEQ ID NO: 185535 - DNA, 2482 bp, Cannabis indica
aaatgtcgggtgtttgatgaaagccgagatctgagaataacaaaacttgttcacaaatttaaactgaaacacaaaatcagcaggtaccaagaacaagatttcctctaatatttcagttggcaaatcataaaagcttgccgtgagtagcatcaaccataaatagactttcatatattaataaaatgttgcttaattaggacatatgatatgatgacattcagcttgttgtactactactttttagaccaattcttaatctgcattgagttgtaaaactatcctaaaatcataccaagaactagaccaagtttcaaactcttgaaagaaaaagactattaattttggtaaattaatgaagaaatatctcatcatatatctacatttcactcagtcaacaaccacaaacaaactaaaacgacattgttattataataattgcaaatgcagaaaacataaaatttctttagaattaagaacaatttgaatcaacagccaaaaacagcataattgtacagagcatagcatcacatttttctcataattataaatcttaatcctcaactttcttaattttttttcaaattgtattttgtatctaaacaggggatttggagttccacaaattactaagataggtgtatatttgaaagaatgtgaaaatttatgtaagtcgatatttccgtttatcaaacataaatgatcggatcaagaaaattagataaaattagaaagtgataatcaaagagactaaggaatttgcatagaaattggttttcctcctttatagattgtattgttataaatcagagagattaatcgaaaagaagaaacaacaatggaaaggactatctcgatttcgataataccttaacaaaatttcgcagagtagtcgcagtagaagaatgatctcgattactccttccgccatttttgttaacagcctgagctgaaacttccaagtaatcttcagatttcacagagatactcttaggcaatcgcgagtatatatccctatcgtttccctcctcctcattaccaaaaccaaaaccaagacgattctgtaatgccgattgtaacagaagacggaactgctttttcaactccagattaatcgttctgagattatggctattctcattacagagagaagtaacatcggctgagttatgtgtgagctgattaagacagagactacgtcggttcaccatttcttcatgttcttgaacaagaagagagttgtagtagaatctggtacgacgatgatgatgatgatgatgatgatgatgatgatgatgatgatcgtcaatggaggcggtggttgttgttgatgatgaatctgagtcaaactcatcatcgccattgaggaagaatgatgagtttgaagaaacgatgtcgttgttgatcgagtattgcctttgcatcatctattcaaacaaatcaataaagaatgctgaaagaatcaatggtacatttaccaggaaaaatctcagagacacagagaaagttttttatgaagtgagcaaatggtgaagagtaaaaatggttttgtctttttaattatttattttgtttttatttttggagggaaagagagagaagtatgtgagagttagttaggcttgaaagagagagggaaagtttttctatttttttcttctttcctattttacccttactgttatatttcttttttacactttaatgaagggtattttggtcttcttaacgttttttttattggtaaattgaaaataataggttgaggtgcttggcttggatcttgttgataataataatgataatcatatgtaagagttaattttagtctttccattatagtagatatggtgcttaattaattttggtaaaattattaagtgtctcaaagatttagtccagtccaatggaagaaaaaaagaaatattctaacttattgaacaaaaatatatactatgtttgtattaatttactagtaaaatttggataaaccatgtaattatctatataaaactaaaaaatcttaaagggatttttacactatatgtcaaatttagtactttttttacatttttattcatgtttgattttttaaactttttaaaatacatttattgcttatgtttagtctcttttacatgttaactctttttatctctttttttttttcataatcgttttttctcttcatttttctctctctttaaattaaaaaaataattgtaatattaattaaataagagatatttactcaattcaaccaaaaatcacatattattattacttttttattagtgaggtattttgaataattttaacattgattatttttttatacatttttaaaagtttaaaaaataaaaaagaattacttacccattaatattgatataatgtaccttttactattttttttcaagttttacttgttagacattgtttctctctcgtcagtcaaatattcattttttttgttctattcttt

SEQ ID NO: 185536 - DNA, 1483 bp, Cannabis indica
tcaatatataaatatatatataaaaaataataataaatgagattattattattattcttatctgtgcatgtatattttagaccattaaatgttgtagttctccttacccaatataatctcctgatctcagtactcataactctctttctctctttgtgacttatgagtagtcaattctttacaaagggctttttgtcactaaaattatttaaaaattatattttgtattgtggtaccacttttactcatatttatttataataacgcattccaacaaaattgaccaaagtcaaagatgtctactactactactactactctcactactagcctttattattattattattataagaaactagggcatgtttggaagttaggataaaaactagggaatagacaaaatagtcccactaatgttttgtgagaggaattacattacattgttttaaacattgctattacatattagtgtgcactcacatcaatttttctattctattttgagtaatataccgtataaatacttaagtttaacttttaacgataatagtatctaagttataattctgaaacttcagtgggtatttagtttttaagtattaagtaaaatatcacgtgacaattcttgattgatctaggtcattaagttatttatttttttttaaaataatttaaatatataccaataaaaaataacacgtaaatatgataacttgacatttaacgactaagtatacctacgactaggtattaccgtcaaatattaaattaaggtatttatttacaactaaaaattaaaatttaaatatttatgtcgtaaattactcttctattttttgaaatatattattagaaatttagtcttttagttaaatatatttttagttaaaaatatatataacatataatagatgttttatcttacaacaatgagtaatgcttctcttaggaccattttaagctacttggagcttaaatctaaatattatttttgagcctttatataaatatttttctagtcatatagtataaagtagagatttcacaaaaataataaaaaaattataaaaatacagttgtacgaaattttaatttttttttataatttttaaaattttacatacataaaataaagttttttcatgtattttatctcataatttttacattttattaaatgaaattctataacttttattaaaattttgaaatatcaacataatagaaaaatatataatcgttccatctcaattttatttctagcttcgcacttggctctcttggctctctgagagggatctatgttgtaaagaggggttgccatcatgacccccctcaactttaaatatatatatatatatatatatattattttttttattatattttctctttaatttcttttaaaagttatgtttaggtcccccttaaccttttcttttgtctattttggccccctatttaatttgtagtttttcgt

SEQ ID NO: 185537 - DNA, 2760 bp, Cannabis indica
aaaaggaagagagtcaaattgtttaggcattgatgataagatgccattcttcaaaacccctttcaatggctactcagtcaaattcagtcccttctacgagaaccgcttagccgtagccaccgcccaaaacttcggaatcctcggcaacggccgtcttcacgtcctcgacctctccccttctcccggcggcccaattaccgagctcgccggatacgacaccgccgacggagtctacgacatcgcatggtccgaatcccacgattccttactcgtcgccgccatagccgatggctccgtcaagctctacgacctagctcttccacccacttcaaaccccattcgctctctcaaagaacacactcgcgaagttcagtccgccgattacaaccctattcgccgcgattctttcataacctcgtcttgggacgatacgatcaagctgtggactttagatcgacccacgagtgtacggactttcaaggaacacgcgtactgcgtctacgccgctgtttggaaccctcgccacggcgatgttttcgcttccgcttcgggggattgtaccgtacggatctgggatgttcgtgagcctggatcgactatgattctacctgctcacgagtttgagattctctcctgtgattggaacaagtacgacgattgttgtatcgttactggttcggtggacaaatcgattaaggtttgggatgtgaggagtttcagaacacctgtttcggttcttaatggacacgagtatgcagttaggaaggtgaaattttctcctcatagacagagtttgattgtttcttgttcgtatgatatgtctgtttgtttgtgggattatatggttgaagatgctcttgttgggaggtatgatcatcatactgaatttgctgttggagttgatatgagtgttcttgttgatgggctttttgctagcactggttgggatgagcttgtttatgtttggcaacatggcactgatcccagagcaccttaaaaatagcttctttttcttgactataatgtggctgagtttgttttgggcaataataaataatagtgtaatgataatgttatggtaatgtgttttgatataaataaaggtttgatttagtgcttctctctgtaaagaatacagagaaagacaaaagcttgattgatttcatatcattaatgaatatgttattgtttacatgtattctcctaaagaaaaaacattaaagttttaaaatagaaaataagtttagaatatatgatatgttaaagctgcaccaattaaacatcaattctcaagtatgcaagatagtataattttcctatcttactatgaaaaatctaaacaaagaaattctcatgcattatacaagttgtaattattagcttagccttttcataactagatctagcttatcaatacttacaaccaataagtataatttaaaaacagtacactcacttgaatgaacaaagacaaatttgttaaaatcctgcataaaattaattatattaaaatataggaattcatagtcattcaagacttaataaaattagttcatatttactctagctagcatactctaaaataaattataatactccagggctacaaataagtttttataaaatttagaggaataaaaaaagtaaaaataaatagaaaggataaatcctataaatgagtgatggagcttcttttgaccttatgcttgtacaactttgaattccccttctttaactctttctctttctgtactttttttgatgcagtaaatttcttcttaaagatgacagctaagaattgtgttcctctaaaatagtgtaatggagactaggttatattatctttctttttcacaaaaatatctttcataaaaatcaattctacatgtgtcctatgaatttttttaaaacttcatcacaaatcagttacaaaccacatgtatttatgacaccttacctattttttgctacatcaattaatgacttgtggcatcatttttttatacattaatttcaccattcagcccatgctacttttattacagcaaaatccttgcaaaactttacacatcaaaaatacaaggaaaataactaaatataagtaaaatacatagaatttaaattcaaaagcatgacaaataagtcttcattccagagttattacatatatgatttaaattaaatattttatgaaaatctcatatctctaatgtatttattctgttcttattgtttactccgataaatatttatataaatcaaacggaaaactattttcattagcaaatcttctatatgtgaagtgtttttgaatcataaaatgttacaaaaaaaatctatttttcctttcttttctaatatttaaaattccttttttttaataataatttttcttaaatgcctgtaatatctaaccgttgaatagtaaattttgtaaacaatatccaatcgaaatatctgtaatttaagaaagaaagcaaaaaattagagaaggctatatatatccttatatctaattcgtgagtctcatatatatatatatatattgaatctttgaagagcaagaagaaagaagaagtagtagagatggagttttgcaagcaaatagcaagagaattaattgtgaaggagatcaataaacaaaacatgatggtggcaacacattggagcagctcttggagtttcttgattcccaaggaatcaaacatttgaatcacaaatcttctctcattgtgtattaacaagaattacactatatat

SEQ ID NO: 185538 - DNA, 6014 bp, Cannabis indica
tctctgtcagcttccaatgccacgctattattggcttggtgcaatgcaatataagcagacttcaccgaataaaaactagtagcagacttattccaaaaccaggaatcactgaccacactttcactcagctggatagaaaaaataagctctttgtctctatcattgaagagatcattcagcacttcagcatcccattgtttcgaccctaccgagagcaaattagacaccaaatgaccctccaacgcagggtggttagagctaacataagggttttgcacatcggggatccaacaagatacttacctcattcccaccaccaatcgatcttcttgcaccagacttcactaactcttgggcttcaaagatacttctccaaataaaacttgggttgtgacctaaagtagcattaagaaaactacctttaggatagtaccttgccttataaatcttgcttaccaaagagtgttcattagttaggagtctccatccttgtttaccaagaaacgccaagttataatcacgaagatctcgaaagccacttccaccttcatgtttatgtctacaaagtcgcttccaactcatccaactcactcctttaaaagaagaattggactgagatttccaccaaaactttgacatcattccttccagattcaaacaaatctcttttgtaaggaggaaaacgctcatacataactaggaagcgcttgggcaactgattttgacaacacctcttttcttgcttttgacaaaaactggctttcccaagaaaagattttcttttgcattctatccttgagaaatcccgaaatagcattcttatttcttcctatagtgcacggcaatcccagatacaaactgttctccatagcttccaccattcttaacatttcacacattatgtgcctagtatcatcacctgtatttttcctgaaaaaaaatagatgatttcgcattgttaacttgctgtcccgaggctctttgatacacttgtagcagctgtagcactctagtcgcttcattctcattcgccttgcaatatacacagctatcatccgcaaatagcatgtgtgaaactcgaggtgcgccccgtgcaacttgacagcccgtcaaccaatttttattctcataatgccgcaataaggatgaaagcccctcagcacaaaccaaaaacaaataaggggacagaggatcgccctgtcttattcctctaccaggatgaataggacccatgaccttccccccataagtcacgttgtaagtaacagtagttacacaattcatcacaagagaaacaaattggcaactaaatcccatacgaatcaacatagcctccaaaaaacaaccaacctactcgatcatacgctttactcatgtcaagttttaacgccataactccttcctttcccatcctttttctcttcaaataatgcattatctcataggagaccattatgttatcggagatcaagcgaccaggtaaaaaagcgctttgattattagaaatcacactcggcaaagcaaccttcaacctattcgcaagaaccttagagataactttgtacaaaacatttcataaagagattggacgaagctcactcatgtgctcaggcaactttttcttggggattaagacaatattagtttcattaagcttgtttggaaactgaccagtagtaaagaaattccttaccaaactaacaatatcatcacccacaatatgccagaatttttgatagaagtcgggtgtcataccatcaggtcctggagattttttcaggatgcatctgaaataaagcttgtttaatctcctctgctggaataaactcaatcagtttttccttctgctcagctgtaatttgaggatggacacaatcaataacagccctgaagtcgacatcttcatttgtaaatagctgatggaaatattcagtcaccacagtaggcaaatcatcttcccatccgacccaatttccatcattattcttgagcttctgaattaagttattccgtctattcgaagtagggctgtgcatgggttgggttggccgggttgaaggtattttagtgggccaatccaatgagatcggcctattaaattctaacccattcatattaagatttatttacaaaccaacccaacccaacccatttttaatcggtttgggttgggttgggttgggttaaaacccttaattttttataattaaaacttgaaattttaagctaaatttccatgattaaatgtaaaattcaatagttcatcaaaagttcaaaggttaaaactcaattcttacagtcatccaaatcaaaataaggactaaagttaattaaattatccaaaatattatcaacttaaaaaaaaatacatcaattaataatgtcaataatcttctcctttggtgatgctttgacctttggtgtgttacctatcattcaaaaaataaagctactcaaattatttatattaaattagcataataaaataaagaacattattaatttataaataaattattataaaaagaaaagtaattattaaaaaaaatcaacaacttagcaatctagataaaactactaattatctaaaaacaaaactaacaactaaacattcacatagatcaaagagacaccaaaaatcataacatacactactgttttatttatcactcaaataaaataaccattattaaaactagcaaaaataaaaatagaatgaaacataaaaaaatcaataaaaaatcgttattactgaattattgcaacataaatttaaaaatactcacaaaaaaaaatcattactacatattcagaaaataaaaaattagtattactaaatattcatcactaatattagaaaaaaaaaataaatgatatcaagagtcaagaaataacctgacaatgaaaagtgagagccaaagtagcgtggtgtgcgacaacccttgcttaaacactttcagaaagtaaaaaaaagagtgagactaaaggtattgagattagaaatttgaagagagaaataatttcattgagcaaaaaaaaagatgaaaagaaaaagttacctccagcgagaacggaatgggaggagaatgggctcttatctgtgccgtgtgcgtgcatcggagaaagagcggatccaaacattctgtgtgtgtgtgtgagagagagagagagagagagagagagagagagcaatgagttgagagaaagagaaagtagaaggcggatggtgatgaggggaatgcatttatgttgtgttatgtttttagggttagggttagataatatatataaatatataagtaagagcccaattcaaattgtctaaatcccataaaattaatattatgatttttttttcaaaaattcgggttgggttgggttcattggcccataaactgcccaacccatttccgacccaaaactaaacgggttgacatttttcaaaccaatggatattcggcccaaaatcgggttgggtcggtcggtttggtcggcccaacgggctaaatgctcagccctacctggggatccttttagataacttaacaaatgatgcacggtctgcatatgtgtagtgtgtggcatggaaataaattggctaagggtgttgacaacaaaggtgatatttggccaagattgtaatgaccgcatgattagattatggattaataaaggcaattagcattaattattgacattttatgattatacatgattttatatttattgtgagttccattttcaaaaataggcactagagttgtaatttcttaattctgaaaattttattaaactctaagtgtattatatatgtcatatgtaaaatttataatttttatgatatttactcgttgacgatagaaaatgtgacggatggctgatttagtcacatgggttagcttagaacctttttatttagtggggtattcataagttaatatttggtatatcaaaattaggtgggattatagttttggactattttacccctaagtcattttaccatttaagattttaagtgaaggcattttgggtattttaattggaggtttaggtggctaatttattagttggcagctgaccactaactaaaatcaagtagagtaataaatggtaagagcccttgaacttacttccttaagttttttttttattttctcttttttttagcataaaattgtagaatttgttgctttagaattagggtttgttctttactgctttctgttgtttagtcaagttgttttaagctggattcttgtggttttgaatggttaatcttgtgttgaataagtttaagttcaagaactaaaacatggtccattgattgtgaattgtgtatttttgtgtgatacttggttttaccacttagaaatggttcattatgttgttgctaggtatcctggagcttagattcaagcttgggttggtttttggccgaattggatgttcctttttttctgcattgaaaaatggtagaaacggtctaccatttttactgggaaagacctagaaaaatggcttggcatttttacagaaatagcctgacatttttcaggcagtttctctgtttagttgattttctcgtgtgtcctcgatatttagggctttgacatgctataattgataggaaaacttttagtttcgagtttagatccccaaaaaggtttagaaagttgtttactcattttacgtgattgtgacatagggcctccgttcaatgcgtaattttccattcaaatgaaatggtggagttcttgatatcttttatccaatcaaatgacaatctattttgatgtgttttgtcctttcatgataagttggattgttagcaatatgaatagttgaatgattgtcgcagtaaatgaaagctagagttggttgtggaatttaggaatcattgagaaaatatctaagccaggtgagctcagtagttgtggcagcccatgcgcaatactctgcttcagtagaacttttcaagatggttgtttgtttctttattttgaaggatatgaggctatctccaagaaagatacaaaatcctgtaactaatctccaagtgattagacaagatgcccaatttgaatctaaaaacctcttaagtgtatagaagtggaagcagaaaaaagaagccctggcttggggattcttttagataacgcagcaaatgatgcaaggtttgcttgtgcgtagtgtgtggcatggacataaatttgctatgggtgttgacaacaaaggtgatatttggtcgagatagtgtgaaataaagaagtcatccaataagttgacggtaagtagaaggattgtctagcaattctccttgttgttcatctaacttggagcaaggatccattggtgctttggctggttggttgctagtgtaactcatatgtttgagaagtcgcagtgtacattttcattatgaaagaaatagattgtccttggtccaataatcatgatatcattcacatatattagcaaagtaatgaatgtgtctttggaacatctagtgaatagcatgttgtttgcttgtgattgataaaatccctcattaagcaatgcatctgagtgtttttcgtaccattggcgtgaggattgtcgaaggccataaattaatttatggagtttgcaaactaaattggtttctgcacaagaataagaaggaagtatcagcccatttggtaattgcatatacactttctcatggagatctcgtttgaagaaggcattgtttatatcaagttgcaaaatataccaatggtttatagtagaaatagctagatgtaatttgaaggtcaccgtcttggccatgagagaaaaagtatcaaaaaatctaggccctcttgttgagtgtatccttgtgcaagaggacgtgctttgtaacgttgcaaggttaagatgaagctcatttttcatctttaagttttgaattaattgttttagttattgaacaatttagttttaattattagtatgggaattatattctcaatttcatattattgcagacaatt

SEQ ID NO: 185539 - DNA, 2235 bp, Cannabis indica
tattaatttaatatttaaaatgttatacctgagaccaccattgtcaatttttagagctgtctattgaaatttgttttttatagaaaaataaaaaatgtattaaattttatgtagaagagaaattaaaaaaatatatattttaagatgatgtgttattttaggcaactataaatattgtcttttattggaaatgctcttagagcataataatggggcacgaccatcgttccatttttccatctatactctctctctctaagcatcaaaaatttgaattctctccgtacaagtccttaccttcgtccttcctcgtactgtggtgaggtggtagtgggcggctctgccgcatggcgcagggtagtggaaggctacccccaggtaccgtacatggtgctttagggtttaataccctttcctttaaggagcatgattacgattgctgcttttcacagccgctttatattatcctccttagggacccagaaacctctgtttttacccagaaatctctgtttttttctaagccgaagacgtcttctttgttgaaaactgcaactatactaaagcttattcgtatcactatggcggctatggcgggtactatggttgatgagctggtggaagagacggaaaacttctctttggatgacttctcgatccaagtcattccggatgataatacggcgagggatacgatagctcgtacggtggttggacgcttcgtcggaaagaggggagtagccatgggtactatgcgaagagctctttcaggcatgtggagactatcctcagggtggcgtctacaggagccactccccaaaacctacatctgtcgtttgaacaccccgaaagaagctaagtttgtccttgataatggaccgtggaaccccatgtaatgggtttctcttggtggctgccttgccggaggacggaaactggagaaatgctaacttgaatactgtggacatttgggtcaaagctcctggtgtgccgatgcctttcatgaccgaagagtgtgtttcgaacatggcaaagcggatgggaactctcctgcaatccaataaggttagaagaaatggtattattcttaatcactaccttcgttttcaagttagattaaatatttctaccccccttttggctggtgtgtcccttactgatgagagggaaaagaagtggtggtgtcattttaaatatgaaagattgcctctgttttgctttaaatgtggggtgattggccatgacgaggagggttgttcaggtaggaagaggacggttacggttcaggatggccggactattcctctgtatgggccatggctcagagagggctcaaagttggataatggttttgctctgttggaggttgaagatattaacgatattcgtcgcctggagaaggaagacccagctggtattagctttggggtcgtctctgagaaggtgaatggggctggggagtctggtctgggtggtgagaagcccactgtgggtaacaccttggttgagcgtgaaggcatggagggagtggtctctcagaaatcggataactcattctctgttgcgtataacgactatgttgatctatcaaagttcccttccaaacatgtattgcaggtggccaatatatttaaggagaaactcggtcctatcaagtttggggccactggtgatgattcgggttccaacggtgggaagtcggtccaagtccaaaagcttaagaaaccaaagttgatcgggccaaagggagtccctaaacctccggtctttgggcggcggtcggagatgggaaatcttagtggttccaagagaaagaaaaccacgaggtttgggcctcgtagtaatgaatttgtggccgaaagtcaggggccttgctgtcttctggtggttgataaaacaggggttaatgatgctttcggggaagccagtggagttcattcgaagaataagagcaatggagactcgggaagtggtgattcgggtaagagacgtcggattgacatggcaggattaaggtctaaagaaggttcttttagtttcttggagcatcaggcagatggggagcggtgtgatattaggccgagcggggaggagggtgtagtggggaatcatgtgttggtgcccccgggcttgggtacgctctcaaaccctttggttttggttccctctggtggtgttgctctctccaatatctcggatgctagaaccccgggagctcttcaggattttactgtg

SEQ ID NO: 185540 - DNA, 3663 bp, Cannabis indica
tccaaatcatattgtccgtacgtaatacaatctcttttatttattggattttgtgccttattagtatgtgattctagtttaagggttcatggtttgatgtagcttcgtgatcatgctttgttagtctccagttttttgagggaaagaaaggaaaagaaactgtctgcagcttaatatgctctgatctaatgctgagatacatacatgaggccttatggttaaagggtttaagaaaagtactctataatataatctaatatgttttgactaatgatgaaaactcagtacatggtttgagctattggtaagttacaatgaggctctgattttgtccatacatgaggctctgattttgttttattgtgtgtaagttagtttcttatgattgagttgatagttgtgttggcattttggacaccatcaatccttacattaatatgatattgtctgctttagacataaatagtcattaatttgtttttggagtctacccaaaaggtcttttactaatactaatggagatattgctcttatttgtatagccataaccttttccatttctaactaatccccgtttgtaaccatttgtggaacttgttttctgcagatactgcatgcgtgctaagcgaatgttaagtgaactagatcaagaaccttttattgttgagcttgatcttcgaggtatgtattcgctaatcaaacctctcattcttgtagctgcctatactatgcttatgtaaaactgtttttatgatggctatgaatcgtgggcttttgtagaggatggtggtcgaattcagaatgttcttatagatttagttggccgaaacactgttccacagatattcgtgaatggaaaacatattggtggctccgatggttagcatttagtcatatgatttcatctctccctgtacccaatgattggcattttataatgtttatggctgcttatgttttcagatctcagagcttccatttcgagtggtcaactacaaaaacttcttagtaccggttgagatattgggacattgagagactgcttttaagaactctacatgggtttatagttcataatggttctatgtcattgtgccaatgctaatgtctatgtggagaatttacttaaaaatatttataatagtttaaagaacataaatcaaattcttatgacatgcaaataatgaaattgtaatttctttgcttgagtgtgtatgaacgaattgcttatctctatctggttgtaatcaatttgagttgtctttttacttcccctcctgtcatcagtttatctggtatgtttacttgaattttattaactttatactcttcacagctacttttttatacttttgaagcaatagttttttctttagctccctctatagggatattgggaggcacatttcttgtgctttatttatgtcgagattcattttctcgtttgtattagaaatctgttcaaaggaataataataggccagaaaggggaaaaacaatatgtctcaactctttaaatgttcatatttaagttaacatttacttatccatacaaaaatctcccttcaaggacaatgtcctttatcaaaagcagtagagaaacatacattataatggtataataactttcattagctctattttcaagaccatgcactttgacttcaatttgattttgtataggcattctttttttctcactgtttgttttctaagaacttaagcactgaacagatacaacaggtacatctatcttgcctaattgcagcaaattctatagctattaaaaaacagataacaagctgcaaatgggtagcccaaatgtcaggtggccgacgaatcagtcgccctgcagcagatgataagaagaaaacacccttttgtccaggaaatcaggaagacatagcatatgtctttggtcgccaatcccctttctgtgcactaagaattccttcctgattcttggaaaaggttaaacgaacctcccaatgcagagatttcaacaagttctcaacttctcctattgcacgggactcatcccggacaatcaatttgcctcccggtctaacaatcctatcaacctctgccagcaccggaccaagtttgcacctgcatcaaaaatccaggcaacatttaatgtatatataaatatctatatacctttgtgaaagattagtatcattatgttcttaatacctctttgttaactttgagaaaagatgatctgcgtgaagaagatcatatgttctagggtatgtactgaaggattcacaccaatcatggtatattccgaaaagacctcgttcatagattattggaagtgtatctggagaatccacattcaccacattcatcacccaaattttaacgtccttcatagctgctgcaaacctgaatttttgaccagcagttatcctaactagcttaccatatagaaatatattatgaagagaagaacatgaatagattgcatcaaatcatatcatattattagttattcgtaccctccataaacagccctcatgtccatcacattcctcacattagaccaactgatgcctaatctgctcatataagaattattcacgacacgtttccaatgctcgtaatcagcagcaaaatcttgagacgatggcttcccatagatccccatttgggagtcattaagccaatatggtggtgtctgcagtcggcgtggccagttctcaggccattgagttcctctctcggccacatcaactgggactctgtgcatgcatgtctgtaaaggtacgtacctaaaaaagatgaacaatatacacaaataattagcctacatattgtcattagattggctctgaatgaataatacaaattacttagttaccaggcagcatttgcatcatcgtcatccttacacatcgaaggctgcttatgctttcttctatcataacattcattggatgtgggcttgcggtagatggcagcaccgatcgaattcagcttgtccttcttgatggtcacaagctcccaacacatagaggccgtcagtgaagacattgctatattaacataagtgcatcaaaactgttataaagtttaaaccactctgctatgaattatagtcagctaataatatagcatgtttacctttccagatttctacatcttcttcaagcttctgatacactggtgtggctgaccagacaaagtatcccccgggtctcaaaacacggttcaattccaaaagaagcgtacctcctataatatagcagttaaacatgtagtggattaatatgttggtaattttgttgcaaaaacaaatgaatctggaaagtgatcaccttcagcgtgccaggggactctgcaacgagcgcagtgaacaagatcgaaaaccctgctggggaatgggagcctctgagaacccatgacagccgaaattgcaggtattcctctttcgagggcgaactgaacttgagcttcgtgttcatcttttggagcaaaagacatggcgagaacatctctgtcaaatagaaaccccccaaagctggctactccacaacctacgtccaataccaccctagtgcgctttccccatgcaatatcttttactgcctgcattttcattaatattaaaccatcaacacaccaacaaaatagtaacaacaccacaacacaactaag

SEQ ID NO: 185541 - DNA, 10772 bp, Cannabis indica
aaaagattggtgaaagaaggtattttgagctatataggttgttggttagttacaaattatcaccatatattttatatattaatcttaaggaacgtccttactataactaaagaagaacgtgaaaactttaaacgatatagataaatagtagagtaatatatatatgtatggcaaaagtagaacattacgttccaattagattttcctgaattaattatcctcatatatgtatatatatttataataagaggacacgtgcaagtcacacgtgagtggaagatgagttatatattattattaattgatcaattaatttacaactttttgaagcgtgtgagaaaggtagggtgggattcacgtgagatgatgacccaaaaaaagacgacacatagagaaattaaactaagaagaagaagaagtagaaaaaaggttgggctgtcaattctaaatttggtttgcagttgaaaagcaagtttttcaattttgtctcgacgagttttttaatttatcatcaaaaattaataaattaatgctgtaacaaatactcaacaacaacaacaacaacactttcaaccttaatttataatatgtctttcttcttgactgatcatttgatcgaagaaaaccagacaattaattcaattatattgctgtgtatatatatatatatatatatataacacattcaattataccatatatatgcatgttattattattgcccattacgtacgactctacatactcctatagcaaaagtaactagttttaatcactttgaattttaactggtaatgagtaagtattttatgtttttatgtatcacttaatatttttatatttaatctgatgtgagataatattgtccaatatccgaatgaccctaactactatgtacatatatgtacatggtaatttaattataaatttggacaatttttttaaatatgtcatggaattttattaacaggacttagctaaaatattagcttacaatccaatcaggatattttttaatcaatatcatttgacaaaaaattaaaataaaatcagataaaaatgattgcagcatcacagttaacttaagagcacctatattatgtttcatccactgctcaaaagacacaacagtagaaactattgcagtaagtttaacctcatagcttgagcactcaactattgtctaaggtatgtaactgttctactaacatcttcccgatcacaaaaacttgttattcccaaccactaacatagcgatcgagccattgaagagcaaagcatgaatatattttcttatatgtatagacttagggttctggcatgtaaatcttgtcatgcaaggggtgttcacggtgcgggtgtggtgcagtttttgaccatttttcaaatcaacccgcacatacatacagtttttctaatttctcaaaccgcacccgcactgcaaaactaaaatgcaaaaaccgcaccgcaagaaatggtgcggtgcggttttttcaatttttgtagtttggactatcaccaaatatttaaattatcacaaatacaaaaaacgtgagcaacacttgtcaaaaataccataaagcttgaaaataaatatgaaaaaaattaagttttaacaatacaataattagtgggctttgagttgaacattcacatattgaacctaaataaatataaaaaattggtatttttataatgtgcggtgccgtgcggtttgaactgcatattaacaatttaaaaccgtaaactacaccgcaccgtgcagtttaggaaaaatttaaactgcgaacgcattgcaaagaatttcaaactgtatttttttacagtgcgggcaatttgagcagtttgagtggtttgatgaacactcctattgcccactaatggggtaaatataaataacttattgacttcgggttcatctcgtgaagcctgacccatgaggcattgatcttcagctggcgtagatgccacgtcatgttgatagttatcaaaatttatactgcttttgtagataataaagaaacattaatacttgattagtaattatcttacttcctaattcaaaatatcaaattctcggataattaagatctttgaaataaattcttgatattatgagatttaataataaatgaacgtaataatatgctcaacattcagaggctcattaactattcttttagaagcactacttgctgctatccaaagatcttttttgctacatctttatttcgcctggacgagtcatatgtccatcatctgaatgacttgactttaataaggatttgatctattatcttgattggacctacgtttggacatgtagtatctgaactaagaaatcttagaattacatatgtcttccttctggaaacacgaataatatttaagccccaaacttttggaactctggggttttagaggcttgtattctttcttccggatggcatgaggatatgtagattcttaaatggtgaagaccttttcaaattctaagtaaacaagttgtggttgacaatttcttattttttgaaatggaatgacacaagatattatttctttggttcatgcagattatgtttattgaaagagcgcttgcagtgtcgaattgtaaaacaatagctaaccatgtcagtgaatgtcctgaagagaatatcatcttttgaatatcacaattacaagcagcgcattaaatgcaaaactgacagcttttcttggataaaatatgagccattgataaacatgcacgcgaattaccattttttttataaataaagtaaaaattatctgtttaccacttttgcccatttttcgctttgaatttgaattttctaagaaggaaaaggtgaaaattgttttttggttaatgaaccattacttcgacgagtgtcttcaccttcttctttggattagtgcacgaaaaaatccaggagcaccactgtcagttctcaccattgattccttaaagccgtcagaaccactagatcttcaggaggagatcgaagcacttataagtaaaaattgctccctttgaaccgggattgtgtgtcttgatcgacctcccacagtaagaatctctttacgaccgatgtgtgacattctaattccttaccgaaattttttgtcttcatccatagattctttattcctcatgtaggtatcttttatatttctaaaatgtgtttagattttgtttttcctctttgatatttgcatgatttccaataagaagtaaacgaataagatttaggcatttgggtacttttggacatttttcaaaacaatgtcattaatttatctttatactgcttgtagtcaataatagattttgtgaaattctatctccattagtaatttttttgattagatagccaaacctcagcaaaatacattcaaggatgactaaatttaattcttttattcaggattcttatggttttggatgacatatcttgtgaatttttacttaattctctgtgtacaaatctgatcgtcttggagcaatgttaactgaggatcatgctttcggatgtagggttcagtggggacctctccaagtactttttggggaggactcttttgtacccttgctatcttctttagtgtggatatttaattacttggcttttttttttgttcttttccagtttctatcatggctgaagctgctcaaatcgacgaggtgtagattctagagcaagaggaaattgaagctccaaaagtggtgtgtaatttattttaatgtatcaatacaaaaataatttcaaaatttatgaggcactttgaacatatgaggaagattgaggcctcaagaatattcctagcctgtgcaggaataggctttctgttttggaggaatcaccatgtcgatgcgcagatgccttcgacgtttggagctgggctcatacggagatgtgagcccatcttccacttagaagttactttgcatgcttcttcatgaaagtaggcatctcccccttcaagctaatcccccaagtttataagctattggcaggttggttcgttctttgtagagccaagaaggtggaagtcccatccccaaagaaaatcctttatttctactaagtaaagtcaaatctcatgtggaagaataggagcgaaattggtttctaccagcttgagaaatgattcaggacgttgatctatccaaccaacactgtaaaatacactcatgacttataggattactagtttttcaccattagctttccattgaagagggttccaaccctgtctttggattttagcattacaagtaagtaatgtcacattttttctttccagctttcgttcaattttttatttgaacatttgattaggatttcttttcaatatttttagacaacattgtttgttcagcggctactcctttgttgctcgagagagagactttgtacaaacattttcctcaagaagaactaaaggcggagaagttagtggcaagttgttataattgctcctcaccagagcattgatgcctaccacatatgtgatgtccatagagaccctcccaaagttaaagaaatccttgcggagatagtcgtagatgaggcgaggaagaccatcaagagaggacaagcgataactggaagtctggactcgactacatctggagtctatgaatgaagaggtgaagctggaagttcgtttcaaagcaatcattccgtggaggtgctctggatgccagtacgtcctcaagagataattttccctaccgtcattttttcactccacgcctgaaagaattaggtcacgttgatcagggagactttgatctatatttttttgaactagacaactaagatatcctatgagtcattattatgacaggatagatgaaatagtttaaagtccaaactattttcttctgcactcccaatgtgttagagtagattcgttcgtcttgatgaaatatctaggcttctctcaatagagtagctttttaggtaggaggatgtttcattatttgtttgcgagaatccaaaacaccatagtgttaatagttagatcctaacgtaagtttttaacttgtttcctgctattgcttttttcatatgtcttcattacttccatatatatatatatgtatatatatatatttaatttttatgtttcttttaccaaaaatcccatactacctagataggcattctcatcgacttcttaagcaccatcatcgtccaaaagaggccagggaccttgccaagctggccaaaaccaagaataaatttagaacatcttctcagaccaaagcaaagcaccagcaacccccaactaaggtgccagaggctattctagatgtttaggtttgggaagctacttttggatctcaagtccaagaggtggcagtggaaggtcatgcctaggaggaaactgctcttcatgtggaacctttgcatcaggtttcacttcctattcaataagtcatcactattgaaaaagatgatgaagaggatggaaaaggaatggtcttcaataggaagaggctagggtccaacattgacaaggaaggcaagaaattaaagggggaggctatttaacaactaagctaacgccataaaaataaaagagaggaagttgaacggagagaggcggagcagagggaaatcaagaggagggacgcgaagaagaagaagaagaagaaaaagtcaaaatagaggaaaatgtcccatgttaccaaggagattactaatcccaagtcttgggaggctagacctagtttcaggacacacattcaaagtcctttcgcaaagctaacacttcctctacttccttccgcaaaaattaatgacaaaatacatcgataatctcttttttctcatgaaccgccaaacctaaacaatcaaggataaaaaataccattctttcttcttcttccagaatcacacttatggaagtaagaagaatctttgttccctaatttcagccaagaacttttgccacgagaagcccaatacttttctttttttttttcattaagagcatccaactctttctcaattttcctcaaatccttgcaattagattgattaaggtgagagtcaacaagtaccagctctttcttttttgagtaatggctttttcgtgacatagatgaatattatacccaagagtaaagcttggtagccacgacaccgatattgctagacacattaagtagagggtcgacgtgcttcactctccattcttgtttaataattttaatgagatcttccttattagcccatgaattctcaaaatgaatgcaaaattaaaaagactttttttttagaaaatgacacaggtctacccacggagaaaaaaaaaaaggcctatgatcagaataaacattaatgtgttatattttagatcaaaataaatattttggataaagattagaaaattattctgggtttaattgtaataaaatatgatcatatttattttttgatttccaatttaaattcaaatatataataaaatttttatctaaaaatataaataataaattagtaattaatgaatccaatttatccaaaaaaatccaagtttataatatttaaattataattattattttttagagattcatgattcatgtccaacattattggacatgaaatataataatattaaattattttactttatgtctagcattgctagacataaaatgggtttcagttgtgggtcccattgtcacatccaaaattgctaaacgtgaaaaatacacatttcatgtccctacactactaagaaattcagaattcccgatggttttacaccgtctagtaaagaatctcgatagtctataaaattgtcgcctatacaagtgtcgcaaatactggcctataatagtcaacagtggaaaaatatcagggaaaaagaattctcgacgttttaaaactgttggctatagtcgacactataggccacggtttaaaaccgttgactatactatagtggattgttccaaaaaaaattatcgtcttcatcctcctcgaaaccacttctcgcatatgtcgcagccgctccaaaacttttacaagcttcatcctcctccactgtcattgtgcttgtctcatcctcctcgaaattttctttttacaaactttgggttacttttcacttgacaaaatcctcgtaaatttcttcgtattgcaagcttcagatttcttttgcacacaaagagatcatgattaagaaactaaatcatggctaataaaaatttaaacaataaataagagaatattctgcttacctttgtgctgacacgagagagtggagggaagagacaaagaggaggagacaaatggtgtggattgtgcccgcggaggagagagagccgggaaataaaacaaaaattacaaatgactttgaaaaaatgagatataatttttttggggggtgggggtgttatatataaagaggcgggaattgaaattttaaagtttaagatgtggaaaaataaaatttcatatctaaaacgcgttaaaaccatcgggcaatgtgccgtcacctatacattgctcgacggttataaaccgtcggcaatttccctttaaaaatacacgtgattttttttgcgcatgtttaaaaattgttgtctatacctctcgatagtttaaaactgttgggaatacctaatttttcccgacgattttaaacacttacttaattttttagcgacggttctttaaaaaatacacttttaggactgccacgaataccccttttgtagtagtgctagatatcatgtccaacaccaaaggggacatgatcaaagacttatcatattcaactttaatggccataaaagatatgtttttgtagtagtgactaccttgtatgccaaaacaattctataaaccccaatccctctttttttttggtttacataaatcttcctcagccacattccttagccttgcaaacccatgctttacatttccacaagaatgctcggcaaatcatagttatttcttttaacactctcttaggaattaacataatttgtgacgagtaaatatgaatagtgaaaaaaaaattaatgagagtgactcttcccgcatatgagatatttcggatgcttaattaaattcttatccttcttgtcatttttccaactaataatattttacacaggttagagataataatttgagcccctgtagcatataatatatggattaaaaatcacgatagccaatcatgaaatttaaaatcttctttttggtccaacttatgcattatacttgttaagtactccattcgaaggacaaagcaagggggtgggatcttataacattattttgttaattatggatattataatatttattttgttgtttggatttcagatttggcgcggagtaatttgtggccaagtctaaaagtttttttggtggtgtcggttctaaattgacaactatggtgcaaaaaaatattttgtacctgtgttggtttagcgctaacatatatgtccaagagtattggtgtcagttctgaataaacaccaaagaatatactttatatgttgacggtataagtgtcaattttatcatgaactaatactttagatataagtgtcggtttgaaactgacaccaaatgcaaaatttgtattagtgttattttttaattaagtgcacatgtgacatgcatatgttacattaataattttcatcttgaaattaaggttcgacttccatcaacaatcattttctgaattgatttgtaaatatttggatatatatctatatcttgtatggtagttagtaatttctttttaaaatgactactttgtaaagtaactagttaatcgacacctttaacacaataataaatacaccagaatataaaaatatatttttatataaatatatatacatattaatttaatttaattacttttgccttcaacattaatattatgcaatcaaataagagaaaacatcacatctatatagaacctatatatatatatatatgcatatgaaaagtgtgtattgtatatatatcttaataaacaaattaaaatcaatctgttaatttgtccaatttatgaaataagatgtaatgtaactgtgtataatacatgtgaaagctaaataagaaatttctctttcaaacagttcgacataataaatcagttaatatttcgttataatcatattctttctatagctaaccaccacacttaagtacatgcatggaagttaaaatttcttaaatgatagttaaattaatgaatcaatgatatgtgttttaattcacttttgttgtctttgttttaagagatagatagcctatatatataacattatctagtcatcatgtcacccagcagctgggacttcataaacaattaaaatccacataaaaatctttataatgtaattaatataaatatatatatatttgtatattaaataaagcgatctcttattaattaattaattaatttcttatatagattaagatttaacaaccgacgttcaaaacttacattaggtgcatggaaggttcaccggccggcctctcaagtcatcaattattaacatctcataactcaataatttaatgtataataatttaaagtaaacaaataattatactttattaattattagtattttggagggataaataccattttgaattgtgttttgcaaaaattatgaattggactatctattttgttaaatgaaaaaaatagatgctgtatttttcaaaattgtacaaataggactctgaactgattttttgttaaaataaaatatagtaataatccgatttacagatgttatgataaaattggttatattttctgtaactgttcgtgtaaaaaattgtcttaaagttagttatattataaaataaaattgttgaaaattgagctagagtcctatttgtacaaaaatatagggttccttttatcatttaacaacataaaaagtccaattaataacttttacaaaacacagagtccaaatggtatttaccctatataatttggggctataatttattatttataatagtagaaaaacagaaaaagtacagttatgctaaattcttagagaatattaattaaaaaatttcttattattatccgagttcttcaaattctcaaacaatttatattcgtactaattattaagaaatcatgagattgatgatgattacacgattagaaatatttttataacaaatatatataattttgagatggttggaaagcattttgagacaattaaatccttgtatatacatagtaatatatagtgtggttgatcgatgttgatcccaagtaccaaatagcatgcaaagttaattattgattaagctatatgtatacatatataacattgtgtgtgtaaatgatgatgatgaacattaattgaaagcaccaaattaaaagaaagagaaaactaaaagcaaaagaacaacatctgtaaaatcataacaaggacgtaccaaaagggtaacaacagaacatgcccatcttgacatttccccaaaccataaagcggttatatgtggttttcaacctctaataatattatacaaatatctcatctctttcactttattttattatttttacaaacctaattacacatgccctttctttgctaccccaattctacccccattacttaggaacctctttgtttttgaatttagaaaaattataattcaatttatataaatatatataacattacacatagtcataaaaaaattcctaaaactaaatatttttttttt

SEQ ID NO: 185542 - DNA, 2016 bp, Cannabis indica
ccaacacactgtactaattaatgaattttgtttcatgttcaaaaaaagcctttatctttacattttttaaacttgtttttgagccaagtctctttctctcatctactttatggtttattatatatattgtgtgctctaaatagaccaattctggcttcaatggcagactgcaataatgaggcacagaagtgggccataatttacaagatctcacttggtatagctaaagggttagattatcttcactctggctttcagaagccaatcattcatggcaatcttaagtcccaaaaacatactattggaaccgctattttccaaccccacatctcagattctggtttacatcttctcctgaatccaactactggccaagaaatgcttgaatccttagcctctcagggttacaaatcccctgagctcattaagatgaaggaagcttctgaagtgaatgatatttacagtcttggggtaatcttacttgaattggttacaggaaaagagccagtcaatgagaacccaactacaccagatgaggatttttatttgccaaattatcttagaaaagcagttcttgggcacagagtcactgacttgttcaatccaaatatactaatcacaagcaccaatgttgatggtgatgatgaagtcccagttactgaagaaaagattctcaagttttttcaacttgccatgtcttgttgttcaccttcaccttcactcagaccaaccatcaaacaggttttatggaagttggaagagattggaaaatgaagatatgggttcttctggtgctggttctgagtctcttctccaaaatctgccatgaatgaaaggacatgaaaataacaactacacagaagctgatgttgacttgtatagatatgataaaaaagaacaaactggaagaggtcattcattcttcaatgctaaaaaaaaaagtgagaaaaggcataaaattttgagtacccaacaagggaactgagagattgttgatgttgatgtctatagaaaagaggtaaatacatccaaactcattcacttttgccaatccaacaaggatcacagaatacgttatttggttgattggttaatttgtttgatttggacttgaatcagccaatcaggatagtgagatagtaaagtccccctcataggtccccaaaactattactgcagttttggcttaagtgttgacacatgaagtttgataattgtattatttgcctggtatggaatctcaattgacataagctaatgatataattctatagcttttaaccatatttatttatttattttacttcattaatttttgttcaagtatgggtgtgtgtgtcctcatcatcagttccaatgtttctcatagaattctatgtacttagaagttgaagtaaatgttggagtgactccatatttccatgttaataataatatcaaacattgtcttttatttattcattcattatataaatttagtttcttgtttattccaagaaaacggcaacattaccatgtgagggtttgggcagttgagcttcaattccatttattttataatactcaaagcttacccctcctacattattgtgtattgactctttcatcaactttatttatttccatctccattagtagtttatacaaaactctatctatacatcttttaatgctttcttgaatttatataaattatatgtacataccaaaatatctagattgtattagaaaaactttctaatttttgttgctctttgttaatcttaagaatacctacaatataagtgtttattaatcatatcagattaattttgtttttatttagtactatatttgatatatattgacttgcatatacaatattttgatatatatcaaaatatttcatatattttgtataaacaataatactatacaatataatataatttaattcaacttactaaatgaatcttttcatgatgagtctcatcctgaactacgtggtagtacgaaattgatagagttggtgcatag

SEQ ID NO: 185543 - DNA, 2963 bp, Cannabis indica
aatgacctggactaatcagggactgtcatgtgatcattgacttgacacttaacggtcaagtatctacgaaagtttcagcaatatagtttaggtatatactgtcaaatattaaacctaggtattaatttgtagccggaagttaaactcaaactcaaatatttacactgtaaattactcttgaaagaaagattgaacttcattgataaatgcaatcgaaagctaacaaaggcaacaagtcagaaggacaattgtccactctaataacacggtcaggaatagaacacgatgctcgggtgagccaatgagcaacaaactgcttaacaaagcaaagagaaacattttcaaaagagaaaagttcaaaacaacaattacttgaaaatatgtttctactatagcgtgaacaccagggtgctccttcaaccaactcaaagcctccttaacgctaagaacctcagccatttcaatccactaatcttaaatcttaaatggcagtcttaacatcataataagactcattaagcaaacaaaaagtcaattttgcttactagcaaatgtcaaattttggggacatttctcaaatggtttccactttccaaaagacatagagacataaacttgctacttggtaaaacattcatatgggcttacattattagtaatgaagatttaaagatttggtacctgcattaatacaagcaccaaccacaagaaatgagtaccctaagctgagaagtagtgaacccaagttgatgtgtctgagtgaatggaaggtaggaagttgagacaggaatatcataaccacagtcaccattgctatgaagtggtacaatttcagtgatccattgggggaaagctcatcatacatgatctaaccagccaaaacatgaaaaaaccaaagtacttcaataataatcatgtgtggaaaattagaatagttttcacagcaatagtctgaaagatcatgatcatccattgatgtggggccttatgcagaataattagactcatttggcaaaactcatcataatatacaatgaagattaggaaaaaaattgtactttactcaaacagtggatcaattattattttagctgccaaaagtctactgctgctgagacaagcaataaattgatgatgaatttcgaaaggggagcggggtaagatgaattcaattcaactttaaataacattctgacaatctaaataccgaaaagtcagactgtggctaaatggtgtccaagttgcattcatagaattatgagtcttgctacttgtcccaaagacaagacaagcaacaacacgtgcaaatgcgtgacatcttctaattggtcggtaacctgcaaaaattgctaagcaatcaatatttgcagtctatcgatcaattggaagatgctacatcagctcgggacaatccttaaattgttgtttttttaagtaaaattcatttgttagttcttaccaaataccaacttagtttccataaagcaatggtcaccatttttaggggacccatcataagctaagaataatattttatacaaaagatcttttggcattgtaggaccataatcttgataaaaataagtaagactttttttagtttcacattataagtgttttgacaaaaatggacagaaatcactgacacaaaatctaattcaatttatacaaaatcacatggcaatggcagaaaaccatatttataccaaactcaaaactatacctaaaaatctgaatatacataacttcatagtcatttatatcagataaaaagcaaaattatatacctgaatgcattgccctgcaagtaaaattgctcctattccaaccccagtatttatagctgtttgaataaatattacaaagtaaaacatccaacctgaacctgtaaatgaaaagaaaataaaaaaacaaatttttatgtcttatatagcaaaaataagattaacccatcatgaacttgatattatagtttaggaaagggaaaaaaaaaacactaaaactcactgccaatctttcatacttggtgattaaaattagaataaaaaaatctaaattattcggaattttttaaaatgtttggtggttttaaatatttaccatatacacaattataaaactatttggaattttttaaaagtttacaaatgattctgaataactacaatatatacgaataaaaacaacaacaaaaaattgaactaaaaacctacgagaacatggtgtactataaaactacccaataaaattaaccaatcattaacttggtattctagtttagggaagaaaagagaaaaaaaagactactaaaaaaatacaaaatcactatttgcatttgacaaaactcctaatatacacaattattatatagactaataaaattgtgccataagtaaatagtatccatgtgaacaataatatttactggtaaacagtttaatatgacacttaacaccaaaaataatagaaacacagaattttgaaagttttgctctaaaatttggattttgggaattacttattaacaaagtaaaattattagagattttaccacaatttaatctcaaccctatccaaacaattttattttagtgacactttcttctaaacaagtagattttctagaactgcaaaatgctaattttcttggcaaccaaacaaaaaaataaataattaaaacagatcaaatccacccaataacatacacgtggcaaaatcataaggtctagtcttataatatcaccacattcttcccaaatgtccatgaaaatgacccttttaccttttctaattctgacaaaacaagaaaacgacgtcgttttctaggtttcttgaacgcaactactttataaagaaaaaaacagagcaagcatttaaaacgacgtcgttacctagaacgtcggcggcgagttcacggaatctgatatggcggcgaccagctttctcacagtgatcaagaacct

SEQ ID NO: 185544 - DNA, 2950 bp, Cannabis indica
attagagccgttagaattgccgaaacaatagctcaattcaaaaaaattcgaccgttaaagatcggtctcctctctcattcagcccctaaaaatttaatacccttcaaacctggagcactgttctttctctcctcttctttcgtcgagaacaatcccaaatatggggagcgaagccagattagtgagtccaagaaaccctaagaacgcattgggcgaatccaccaccaccatcactaccactactaccaccaatgccgtcttcagtcccagattcaaatcagtggcagccatggctggttgggacgaagaaacacttttgagtgccagcctcatcgttgacgacacgcctgatcgcatcttcaagcacaagaaacgctctgatcttcaatccaagacctcaccggcgagtacttcaagaaggtacccactcaaattttaattttaattatccttttaatgggggaaattgagaaagtctctaactttactgtttcttgtcacagaaaacgaagggttccaagtagtcctatttcgattcctatggttactcttaatcttgatgatgaagaaataaaaaaagatggtatttttaatgattattctattttgtttccctaaattaatttcagttgttgaagtggtttttaatgaattgtttattcacagagactaagaaagatcattcagaacagaaagcttctgtggctgaagagaaaggaaaaacaggagaagcgatttcggttgaacagaattctggtgttgttggtgccttgagttcgggacttccttgtatggataagctcagggaagagctttcttgcgcagtaagattctttttgattctctgtgatgtaattctttctttgttcaattttcgattaaagcatagtctaagactagtcattttactgtatgtatttgcaaacttgacagatttgtttggacatttgctttgaacctactacaactccttgtggacacaggtaaactagttgattcattttctagctttatgaaattatagatgacccaattcatagtgaattaggaatctttaatttgggtttcttaccaaaattgtttatttctcttccttgtgtgtagtttctgtcttaaatgtttgcgatcttctgcaagcaaatgtgggaagaagtgtcccaaatgcagacagcttataaggtaatttctcttttttaaaccattcacataccaaattttgagtcaattttcttttagattattaatatcattggtttgaattcagtaatggaaggtcctgtacagtgaatactgttctttggaacactatacaacttctttttcctcaagaagttgctgcaagaaaggaagctggagccttgaacattcgagaatcagagcgtcgagtcactgaatccaccttttacaacagtttgaggagtgaaagtccacaagattcaccattaacaacgagagctgaaaccgcaaggggaagaagaaccagacaagctcagattgagatcagcgctacactgagttcaggaggagacggggtcacttcaaatcgagctactagggtgtcaacaagagatagaagtaccagaagtagcagtagagggataccaagtcaagatgaggatgctgccttagctctgaggttacaaagggaagagttccttggggttgttaggggtactactaaccattcaagtactttcagttctatttccttagctagaccaactcaacccagtactattagtaatagctctctagctagaccaaaccaatctagtgttactagtagctcactttcttctgctagagaaaaccaatctagtactaattccttttccttggctagagccaacttgagggccatggcatctagagccattactcttcgagttagaggccgacaaaacagttaattttagtgtctcaggggtgtttctttattgctcttactcaatcaatcctattgagtgagttcttataacaaattctcaagttagttcagttcacacttcttgttggtctactcaatataacctattgagtgagttattgcacaaaatcagggttgttcattctttaaaactgttatttttttttttacaattatgtattaagaaatgttcacatcataaatattgatgtttatttctttgggcaacactgtttatttctgtttttgtttattgaaatttggtttctaaaagtcaattcaagcaaggtaaataaaccccagactgtttcaagtttttgagttgacaagtaacaagtttttcaaattttcataaaaagtcatctaattatgatataaaacagattaagtccacatccagtattttttaactaattattttagttggaatgtcagttaatgattataacatctatggtaccatatcaccaactaccaagctaagattagcagcaaaatatgacattttcacaccattcaaattgagaagtttcctaagaaacacagttatgactttttcttctatgttattatcataaaattattatgcattatgagtcacataaccatgattttcttatgtttaacatgaccaaaatttcaaactttgatgacataataagaacaatgacattgtaacttaggttaaccatgcaagttatgacgtgtccttaaccaaactctttctataaataaagtaagtaatgtggggactaagcataataatcattgctcctaagtaactaagtctaacccttttgaaatggccaaaaatacaccaaaatgggctccatttgccttgttttggatagcattttccatgtttgtggctgttagtttggctgactctatttggccctctaatggggttttacgtgccactgagccaactccatctccggagaccggggcgggggctgggccaggagactccggtgccattggttggactcctccaagtctactcatcacaaccatgttttc

SEQ ID NO: 185545 - DNA, 3606 bp, Cannabis indica
aacatctgcaatggtaacaagctcgtcaaactcatcctcttctccaacaggttagtcaactcgctccctgactcactggggaattgcacttccttaaatcggctcagagcccagaacaacaacctcaccggttctattccttacgggcttttgtctttgcccaatataagcttcgtcgatttgagtaacaacagccttttcggtcccatacctgaagaacttggcaatgcggagggaatcgaacacttaaacgtctcccaaaaccctttgaactcaactctccctgataacatttggaattcaactaatttgaagattttttctgctatttcgtccaagctcctaggcaaaataccagaatttgttggttgtagaagtatgatgaagatcgaattgcaagataatttgttccaaggtaatatcccttgggacattggtcactgcgagaagctactttccttgaatctcagcctcaattccatcaccggtataattccctgggagatttccacactcccttccatcacaaacgtcgatctctctcacaacaatctcactggaacgattccttccgattttggaaattgtagcaccttgtccaccttcaatgtcgctttcaactcgttaaccggtccaattccgacgtccggagtcctgttcccgaacctccatccgtcgtcgttttccggcaacgaaggactttgcggcggagttttacccaagccttgcgctgcagacgacactctcggcgccagcgccgtcgaggtcaatcagcagcgaccgaagcggaccgccggcgctatcgtctggataatggcggcggcgttcgggatcgggctgttcgtcctcgtcgccggaaccaggtgtttccgcgctaactacagccgtcgattcaacgacgaccgtcagatcggaccgtggaaactgacggcatttcagcgattgaacttcaccgccgatgacgtactggagtgtttgtcgatgagtaacaagattcttgggatgggatccactggaacagtatacaaagcggagatgccaggtggcgaaatcatagccgttaagaaactgtggggtaagcaaaaggagaacatcagacggcgtagaggggtacttgctgaggtggaggtattgggaaacgtgaggcataggaatatagtgagattgttagggtgttgcagtaacaaggagtgtaccatgttgctctacgagtacatgcctaatggtaacttagacgatttgttgcatgggaagaacaaggctcagaatttgatagccgattgggttacgcgttacaaaatagccttgggtgtggctcaggggatttgctatcttcaccatgactgtgatccagtcattgtgcaccgcgatctcaagcccagtaacatcttgttggacggtgagatggaggccagggtcgcagatttcggtgtggctaagctcatccagaccgacgagtccatgtctgttatcgccggttcttatggctacattgcgccaggtacgttctttgttttgaattgtatgaacagtgttaacggggttgaccttttccggcgcacgttagttagattaatattaatatgtcatagtaaaatatgcttggtatggtaatcttttgttttacttgctttttgttttctatcttaataatgatgattaaagctttaatttaccctttgaaattaagactagtaattaattaagaatgagccaaaactatgtaatgttgttgagtgggacaagtgttggagttatggtttgtctttcttagatctttatatatgtcattgtttgtttggattaaataattatatctattgttgcatctactaataaggaggtgtggatgcaaaaaaatagtcaaaattgtatcacaaatactttcctttttgaagatatgcaatagctactatatagatcttttacaaaatatatattgaaaacaggatttaattaaataatttttcagaaaagaaaaaggttaatttaacatgtctcgctctcatcataaatggtggggtttaggttataatgagtgtatatctttgccataattaaaaacatatgttattatattattctctatctattcatcacttaatatagctttcaaatatttcatcctaaaagaaaaagaagagaaggaaaaaaaaaaaagtcgacatgacattttctgcatacataccaaaccttaggctattagtttcccacgtcaaccgatgtgattaacacacacaactaatacttcattacaaaaaaaacacagtcattattatgaacatgtcactgaaaaatggtggggttattaagttatgtgattttaattaaatagggacagagtcggccagcagcctagtgcatgcgcagtacactcacaagtccttttacttcttcttttttgttagttttgtttttgttcacaatttctttgaagcaaaatatattgttttttcggtgattgtagcactagcagtattgcgcgcatggtagcagggtcatatataacttttcctttatttatttctcctttttctttttccatatagatcctttttttttgtgtgtgtgtgtgtatatatgtgtacgattatttgttatcatactatgaccccaccttagattttgtcccaaattgacttcccatgcatttgtattatttacttttacgttaactgcagtatatatttatataatacaattaataataaaatcattaattaattatgtgcagagtacgcttacactttacaagtggacgagaagagtgacatatacagctacggcgtcgttttgatggagatactaagcgggaaaagatcagtagacgcagagtttggtgatgggaacagcattgtggattggatgagaacaaagattaagactaaagatgggataagagatgtgttggacaagaatgctggggcgacgtgttcgcctgtgagggaagagatgatgcaaatgctgaggattgcgctgctgtgcaccagccgcagccccgcggaccggccctcgatgagggatgtggttttgatgctgcaagaggccaagcccaagaggaaattgccggagcttaccacaactacaactactactactactcatcatcatcatcatgtaatatgcattggtggtggtggtgatagtgggagcgatcatgatagtattcctttgccacaaaaaccacccgcggccgattgttaatatatgattttactaattttatatgaaaatgggtttttttttccttttttggggcttttttttgttatttttcatatgtgggggggaattggtataggagaagtgatttcttattttacttttcaatggaagcttaattatcaggtgttctattgttttggtaattcctttttttttttttttttttaaatgtgtgtagtgtatgtgtttataagttataactatatatcagagattaacataaatatggatgctcgtaacatgagtaaacaggcttaggcatgtaatcaaaaaaaaaaaagcttaggcaccgtacgaatacggagtagatgatgctcacaagacgtacgacatataaattttgtttttagggaagtgttaaggaagattttaatttaataa

SEQ ID NO: 185546 - DNA, 6078 bp, Cannabis indica
aaaataatttccaacacatgtaaacttcttcgtgtaggtcgccattgagaaaagtgttgttgatgtcaagttggagaatgggccattgtttaattgtggaaatggccaatagcaacttgaaagtgaccattttggcaaacagagagaatgtgtcaaagaagtcaagaccttcttattgtgtgtatccttgtgcaacaaggcgagctttgcatctttctagtgaaccatcgctattatatttgatcttgtaaacccaacgacaaccaatagctcgtttatttggaggcaagggaacaacaatccatgtcttgtttttgatgagagcaaagagttcggtttgcatagcttggttccatatctttatgtgcactgcttggttgtatgttgtaggttcaaagagagccgtaactgcaagcataaaagctttgtgagagtcaaaaagtttatggtaagacaagaatttatcaagtgagtgaggggtagaagatctgtcatgaatgacagagtgacattcgtaatcacgaaggtatccaaggggtttggagattctactggtgcgtctcagtgtggtggatggactaagagtgacacgattagaaacttaagaaacatcagctggtgcatcagatgaattagccgtaggagtgtttgctgtatttgtttatgtcaaaaattgcagatctggtgtgctagtgtcaacagtttctggtgtgcattcctgcatgatttcattagtactagaagtcctaacatctcttataggaaaatcttaaaaaggtgttagagaaatattagatgaaagcagtaccatattagagaaaggatctgtcatatttatctcaatattcaatttatgaaaaaggatatacattgtcatgaaaaataacatttctagagataaaaatttgtttagtgtttaagtcatacagtttataccctttaatcccttggggataacctatgaaaacacatggcctagcccttagttcaaacttggttctgtgggctgtgagggtagaagcaaacactaggcaaccaaaatttctcaagttggtgtaatcaggtaaatgattaaaaagtaattcatatggagttttatttccaagatttggtgttggagttcgatttatgagaaaaacagacgtcattaagcaatctatccaaaattgtataggcaatttagattgaaaatatagatcacaagcaacatttaaaagatgttaatattttctttctgcaacagtgttttgttcaggtgtttcaacacaagtgaaatcgtgcattatgccatattttaagaaaagatctttaaaaaccagttcaggagcattatctgatctgaattctttgaaaacacaattgaattgggtttgtacataggataaaaattgtggtataatagtaacgacatcaaatttatgtttgagcaaatatatccatgtaaatcaggaatgatcatcaatagagtaagaaaatatttatgattcgaatgagaaggaatatgatatggaacccaaatatcgcaatggatcaaatcaaatttattagtagaaaagttgttattatttgaaaaaggcaatctctttttcttagctaagggacaaatgtaacatggctggtttttatgcagggaatcaaaattacaattcagagtattgctaagtaaagacaggcgatttctagaaggatgtcccagccttgaatgccatatgtcagcaggaatcgtgcacacataggcatcttcaggtgtatggtccaacatgtagagaccattcttgatcctacctttgccaatcattttctagttgagagtttcctggacataaaaccattagaattgaagttgatagaaactgaattgtcataaatgagacaactaacaaatataatgttgaacttaaatttaggaacataaaggacatctttaagagttaaagattcatcgattttgatagtgccactgtgattaatagcaagagtttcattattaggcaatattaaattagtagtagtcacaggacatatgcattgaaaaagttttacattgttgcaaatgtgtctggtagcaccagaatcaagtatccaagattgtttagaaactgaaacatcattgcaagttaagatcatacttgagttacctgttgaggaactcagatcaataggtgttaaattccattgttggttagccaaaagattgagaagctgctgatattgagtatcacttaattgtggaagaatggtgttgttgtcttcaacatttgttgtattttctatgctggtttgcacttgattagcagcagcctccttttgtttattctcgttgaaaccaggtgggtatccatgtattttgtagcacctttcaatggtatgacataggatgttacaatgggtgcaaaaaggtctatttttttaggtggatgattcttggctccttgattttctggtttggtaacacctgccttattgttctgaaaagcaaaatccatgctcgagttgggatcggttgcaccagcaagatttcccttatgattttcttcttgtgtaacaagatgaaacacacgattgacttcaggaaggggatccattaggagaatgctacctctaacttaaggagaattgatcagataatcccatgagaaaagaaatgacacattccatgtgatggtgtttttgcaaccttttgacaccaccacaagtacaacaattacaggtacaagttggtctgtaattagacagctcttcccaaatggttttaagcttggtaaagtacatgctgatgctttgattttcttgccttaaattcataaggccctttctaagattgtatatgtacggtccatttctttgatgaaattgaaccttcaaatcagcccaaatggcagcaacggattcatcgtaaagtatactggaagaaatatcctttgaaaccgaatttaaaatccatgatataacaatattattatttctaatccaagcattgtaaagaatgcaatcaaagggaggcggtttaggaattgtaccatcaagaaaacccaatttgttcttgactgaaatagagagctgcatagctctactccaataaatgtaattatcttggccagttagtaattgagatacaagaacataacctggattatctccatggtggagataatattggtttgttggatcttcaagaggacttttcacgcctccaatctgcaaaatcgaatttgtttgtacggcgggactctgtgttgtagagggagtagaatctccaacttcggtttgagatggggattgatcttcattagacatcgtgaaggatcagtagagatgaatcgcagaataagaggctagttacgccgaggtgaatagctcagggaagaagaacagaggagaagcaacaatggtgtcgccgaaaataggggcacgacaagtgacagtggaagaattggatcgatcaagggaaagcatatctttcccgctctgataccataatgcggaatgaaaaaagaatctgaatactattttattgaattgatctgtacaaaataattacaactatatatagtgaaagagaaaacaggggagagttaggcaaactaactctagataagataatcaactcagctgcccaaactatagttaaaagaaccaaccaaattattaactaaagcaagaaagggaaaagaacagacaactaacataactgactaaagttacaaacagtaataacggtcataaccgtaagaacctacttaataattctaataattctaataccatgaaagcctaaacaccgagagtgattatgataaatctcttgagaaaatcgtcaaggactcattggccatgttcaagaagcccttccaagagctcaagtcacattttgctagcctaggaaatcaagcccacctcgaggagctggataaaatatacaggtcaggtctctaggtcccaaacttgagttactgtggacgcattaaatgtgacatagataaaacgtctacgagtggttatgaaagacgtgtcatagactttaaatccattattgtgtgattgcacactatcccatgttccttatgatgactgcataatgaactatcacatcaatcaacaagggttaatgacctatctcaccaaacacctaaagaaagcctacgtatcctaccaaatagacaaacatgtccaattatctaaatataggaatttgtgcaagtaatgctcttacaattacaacaatggtaatctttttttacagaccgttgtttacatgttgttctaaaaaactattgtttacacgttatctttcacgttgcaaaaatatagtataacactacgacaatataaaaatatctttaaaacaacacaaaatcgtacaaatataaataaaaaatcgtaaaaatatatataaaaatttattttaaagtgtattaaataaatttctcatatatttttatcttctacaatgaagtcgattctcaaaagaggaatttatggctcaactaaaaggtcccgttcataaattttggcatgtctctcatttttattgtgaggctattttttgtttgcttgactattctatgaggcgttatttttccacctctataatttattattcaaaaacaatcataaccctttagcgctgttagtgaaaaatttaatcacaattttaaatttttatcatagagtaagaataaacaaattatttcgaaacaacatattttctcgttaaaaataaaatcattagtagaattatactagtcaatcataatgctatgaagaattaaataaattttgaaaataagaacttaaaaactgaaaaagctaatgatatttatataaatttataataataataataataattaattataaaactttgatctagaaaaaaaaagtgagagtagataataatgtacacaaaattgattagatatgttactaaatatttaaatgtaaaatttacaaaatatggcaaattaaaatttagttttacaatttctaaaggcgtgtgtagctttctctctcttccatggggaaggggaagaagattgttcgaaagccattcactcagttgtttgattgcgaatcaagttttaaaattcaagaaaagagagacgagattgagaataaaggtattgattctttgattggattgtctttaattgctgaagctctgaatacgatagatgtaattcgaaataagaaaagtaatgatccggacaatgtgattcctgagaaactaaattggacgaaagaggtagaagacgaggctagttctgatatggagcagaagcaattccaagagtctgcgaagagtcactggaactcctttgcgaaagagaaactgagctatgggacccagagttatcttataccgaacctcttcttaaggattgtattaagatagcccaagttgatcttgaggaggttaaggaacaagcataaatctggaacacaacagttttctctatggttcttggagtaaatcgtccaatgcctgtgtttgaggatttcataaagtgagtttggggtcatcttgggatagctcagatagtttgaatggctatggggctaactatgattaagttcaatgatgaggctactagggatcaggtcttgaagataggggttttgtaatttgataggaaaccaatgattgtaagacatcggtctactgatttgaatgaactgaaacttattcgattagttccattgtggattcgtcttcgagatccagggctacaataatgggggaacaaaagcttgaatgctttagttagtatggttggaaaatctattatggtggactaacatactaaagatcgcattatagttcaatttgcttgggttttagttgagatggacaaaactgatttgccttcgagatcgattctttgtctcaatgaatatgttcaattgatggagtagagtatagactatgagcagctatctgtgaagtgtaaaattgctagggatttggtcatattatgatcggttgtcgcaaagttgaaattaaaagaaaagaaaaaactgatgggagaagactgtcattgaatctaatctcagaatgaggactctgatttagttgaa

SEQ ID NO: 185547 - DNA, 2143 bp, Cannabis indica
ataaaataaaaagaaaagaaaaaccattcctttcctgaactcaaaaaccttttcttttttattaactcggatgattgactcagtgtgggactcagttgactcgtccattctaaaacccagtaaacctattttctcgcgaaagaaaattacagtgccgactggcgagaaacgaatcgtttttgatggcttcagaggagaagcgaatcgaggacgagttgtcgtatccgatactcttatcggagcgagttcggtcggcggtagatgaagccgaatcgttcaagctcgagtgcatggaagtgggtaaacatgtcgaccggattacccaaatgctccgaactttagttcgattctcgactacaacgccttccttgtacgagcgtccggtccggcgggttgtcgccgaggtttccaagaatttggagcgggctcttactttagtccggaagtgtaaacgccagagcgtgctccgccgcgtcgttactattaccagcgccgccgattttcgaagacttttcgtccttctagaatcttccgtcggagatatgaaatggctagtcggaatattcgacttcgataacggcggtgatggactcggtggaatcgtttctcttcctccaatcgctagtaatgatccgatcatctcgtgggtttggtcatcgatagcttctattcaaatgggtcaactcccttatcgaattgaggcggctaaccagcttgcttcgttggctcaagacaatgatcggaacaagaagattataatcgaggaagatggggtttcgccattgttgaagctgttgaaggagagttcttcgccagaggctcaaatcgccgccgctacagcgctttgtaatttggcgaatgagcaagaaagggttaggagtattgtgagtgaggttgggattccagttattgtgcaggttcttggggattcacctatgagagttcaggctcgggtggcaagattggtggctaggatggctaagcatgatcctgttgcccaagatgattttgctagagaaaatgtgattagaccacttgtgacattgttatcatttgagacttatgttgacgattccaagcttcttcctggtaagcatagtattcattcaattgttcagattaataaggaatgggagaaaaaacatttgggtgttccaaatagcaagaataattcttataagaatttgaattcactcacaaattcgtattcttatttgtatatggaggggggtcataatagagctgggaatcataggaaagagagggagagtgagaaacctgagttgaaacttgagcttaagattagttgtgctgaggccttgtggatgcttgctaaaggtagtgtggccaatagtaggaaaataactgagacaaaaggccttctttgcttggccaaatctgttgagagtgaagttggagagttgcagttcaattgtttgatgactctaacagagataacagctgcggctgaattgaactccgacctcagacgagctgctttcaagactaattctcatgctgcaaaagctgttgttgatcaactcttgaggttggttacagaggtggatagtccaacattgcaaatccctggtattagatcaatcggttcattggctaggactttcccggttagggagactcgggttattggtcctttagtgaatcaacttagccatagagacttggatgtggctacagaggccaccatttcacttgggaagtttgcttgcccggataattttcttcacatggagcattcgaagtctataatcgaattcaatggtatcccaccattgttgaaactgcttagagccagtgaacagtcacagttgcatggactaattcttctttgctaccttgcattacatgctggcaacaatgattctttggatcagtccagagttttgattgctcttgaaggttctttaacttctgatcgtacactaattatgcaacattccaagttgaaagatttggtaccaaaggcaatatatcaccttaatctgtatcatgctggaggtcactctcaaagaatgtcttttgtgccttgactatgatctcagttgttgcacaaatgtctttttggggggcatttttattttatttagacgcacatgttgatagttttttttctttctttttt

SEQ ID NO: 185548 - DNA, 3114 bp, Cannabis indica
cccccaaaacgtaaatctacaaaaccattttcattttcaataaccaaaaagtttgactgaattactaagaagtcctgatggtactcaacaatatatgtctgaataggagtgcactccaaattttctcaataataataataataaaaaaaaaaaattaaaagtaatgacaaaggcatgattaggtagaaatattagtattggaattgtggatgatggacaatataagttaagcataaaagttaaatggtgatatacagagtgatataaaataaaccagagaattaagagacttttagagagatataacaattttgtttaacttcttgcaaagataaaacaaaaacattaacaaaaaaatggagaatattaaccaaaattgtatgctattttttctcttcttgtttttcttattactatatcgttgttattttatcaaatgaattaatcatgtacaacacccaattggacctttcctgctttatcaaaagaagtggtcgaattataaggcgttgatgatgatggataacaagcttttctcagctcattataccttccaatatcgaaatcatattgcttcattaatcttttctgcttagccataaacctgctatggaaaaacccttcgaaagaaggctctttggatgtcctaaggaagaatgcatacccagccatgaagtaaatggatgtgacatagaagcaaattggctccatcacatcccaagacagttcccaaaatgttagcctcatgaacccggccgtttgaaccattaggtaagccagaccgcaccagagctcctttcgaaccagggactcggccctctcgtcaatctcacccttctgattctctaactcttcaagctcttttcttcttgggtcgttggagcttggttctggggatggaattagttcttgaatcactttggctacctgaaattaagacaattacaaaaatgtttgggtaaaagatgactcagcctaaacagatgtagtgctattagttagggattattgtatacattgacaagtaacatatataaaataggactattataataataatattagtatgatagaattgaaaatattgaactctttcgtgaaagaaagcaaaacaacaaaatgatcaatcaagggacccctcccaataatgccagccatgaactaaattttagaaaaggacaactgaaacatttagagccgatgaggctaaacatgactccaaaaaataattgttagcaatactatacaatatcatcgaattcaaacaaacataaatatatgaatataaactatgcagaacactaaaaaaaaagtcaattatcttaggaaaaccctgaagaagagaacaaaaaaaaacctacatcttttaacagagaaattaaaagaaaattaataccacgtcttaaaagtccattatttagactctcttaacaaacttattatcatcagcaaatttataataagtaactaattgctaatttagtgataataggtagagaaatctagctaatgcctatccctaattcacaatagcatggtagttatgtatatatattttttaaaaaaaaaataaataataaaccaaacaaaactaaaccaaaaacaacctctaatttagtttcaagaaaaactctaattttttgttcttctaatttttcatttaaaaaactgtttttttttcctagttgagaatcctcttccaaaagaacttttatgatcataattatgttctcaccgaagaaaaagtataattcctttttcaactagttgattctctctattttttcttttatttttttgggggaccaaatgtaaaagttatcatgtttctacatgactcattaattttctgtcaagtcctcaatttaaataaatttttttttgagaggactggtatggggccataaaggcggaggaaaacaaaaatggtgaaaattcttgagccattgttgaaaccgaaagggtttatatttgttctcccaacaaacgtgtttagatctggcgaaacaacaaagtttcattcattttcctgttgaaaagaaaataaatcattataaaaatttatcagatccccaaaattgaaaaaaaagaactaaaacaatcaaaaacactacgcgaagtgcatgaatgaatgaatctcctgaaaagaatttaaacctttcaggaccatgacaatctgaatctgaaatcaccaaaaaattcaaacacacaacaagaacaaaaataatacaaactaattaattatcaattttatttattatgttagaatgtaattttacctgttctggtcggagaagaacaacgttcccgaaaacgacgacgtttccactctcatctagcattttagcaaattgtcgtccttgctctgaatcagaacaagtctcctcgcagatccgtacaaattccgtgtaagagatactgctctgaggaatttctctcagcttcgatttaacagcctctagttgggtaacccgaagtaactttttcgtatcagcaatcgtaagccctggcctctccgacgacgaagtttccgtggccggaggtggagtaagaccgtccaagcgaatccggtcccggccgattccaatttccttaagtttctcaatcaggttacctcccattggtactgagcgtagctcgggagacatcgcatcctgcatagccctcttgtgaataaagcgactgaagatggcattgtctcctggatcaggagcgagattagaacgattaggactacggggaatgcgattttgagcagtggatgaagatatccggcaactggttacgcttttggaagagaatttgtaaatgttaaagagacgctgggctaatgatttcttagacgccattgttgagtagaattagagaaaagaaatcttctttccgaagtttctggtaatgagagaagaaaataaaagggttactggttttgagcgatttaacaatggtgacttattttctttatatagggtgttaattggggaagacgaaggagatataatgaaaatatcgcgatattctctcgataaaaaaattttagcctttactttccggatgattcgttattacgagaaattgatactaattcacgagagattttttttttttaaaaaa

SEQ ID NO: 185549 - DNA, 3649 bp, Cannabis indica
aaccgactacaccacccagacaggtaattttacttgtaagttttcataaaacattttatatattaattaatataataataacagaataatattttcaattgggcctactactctggtctgcgttcgaaaccttcttttctccaaaaaccgttgatcgtcttccccgttccgacctcgaataccaacaggaggaaactcctgcaagtcgtatccgtctgccatggaatcacatcacgcttcgcttggcagaagaacggtacatatttgtgctctttctagaaattgttcgcattttggtatttctggtcctaaaacgatctcttatatgctgaaaactagtatttgttgttgttgttcttcttttttatttattccagcttgaagaaattcgtcaaaagcgagctgcagaaagattgagcaaaacttcgtcgggaccagatctcagcaaagtttcaaattcaaatggtttgtgcaattcaatctatgagttcttatatttgatgaataatcgttaattcttattccactttggtacagatgttatatctatgagaaaatcagagagtggaaatagaatttcggaggtaacaatttattttgcttgtagtttctgtttggttggttggaaaattgatggtatatgcggagaaaacatttgtcttcaacaattatccgattcactctgggctgaagttctttacttcgatttgaacggctgttaggaaagtgtttcattatacttagtttttgtgcatgtcaatatttaattttataaacactaataatggtgcagtcagatattggtggcttagtggctcaaataaaatacctggagaaaaggaatacagaattggaagagcagaacaagaaattgatttcaacggtagctatattttcttctccatatgtgtttatttcttgtagcgtttgaggtgattgaggaattgaagcttttgggtggtgatcaactgtatctgattgttttattcatcctaaaatttcagctccagacaaccgaggctgacaatgacacactacaaaagcgtttgaatgatcttgtaagggaaattagaaattactttgattgttgtctaattatactattttgagggtgcgaggagataatcaatccattatattagagtttaatacgttcatagcagaactgatgtaatctttcctttgtaaatttttgctgaaactgtttaggcataagctaaagggttatgggttggtgcctgaaatgagatgcttaattcataaactcagttttaacttgtaaacaatacagaaaagtaaattatttcatgggggaatttgtgtgtgaagtattttactttcttaagtaggatataatctgtgtatgattagtaaatatctaaaataattgctaggggttcttaatttttttccagagtttccactttgttgttctatgattaattaattaatttttgaatatattacaggaacaaaacactgtaccttctttgagaaaagctctgaagagtgtagctatggaaaaagatgcagctgttgtcgcaagggtaatgcactatacaccctttctttacgtaattatcatccatttatgttttagttgtgttgtttttaaagtctgatctgttagtgcaggaggacttttcagcccaacttcgcactctcaagaaacgtctaaaagaagcagaagaggaacaatatcgagtatgcagtatgctatagttcttactttgatttcttaatgctcgtcaattgtattttcttaacagttcctttgctgaataggctgaggaagatgcggcagccttgagagcagaactgaatttgatacagcaacaatctatgaatggttctcttagtggagtgacctccattgcaaatccactggatcaaatacaagtcctagaaaaggagttattgaacttgaagtcagagttacaggtacagtgcattcatggatttttttcttccttattttgcagttacaatgttttcttatttccacggctatcaaatttctagcaagagtcacatttaaggcagcaagagcgacaacgattagcagaggagcaaacccaaacttctaagctcatgttggaaaagcaagaactagaagaaaagcttgcttctatgtctaaaacagcatcaggtatctgtcaaatttttctcattagccttccttcttcttgaagaaaggatttaaaaactcgtatcatattttgtgcacctctttccaagggaaagggtaaataatcagaaataaatgttttttaattgattgtttaagatatgcccaggattttacgtgattgtatttttatctaagacttacgctcattcatgtttataacctatagcttggagttgttatttgaaaccgattttagcattttagttccactttggcataatctagtagtcattcattttgtgatttcactgaagtcagattctttaagagttctattgcttatctttttgtgagacaaaattgcacaagatgttttcacgtgtaattttttatttgtaaaattgttgaacttcgttccgtcatttacactttcttttcttttgcagaaaattctgagttagcctctaacaaagtattttcattggtgagttgttaatcaattatcatgttttagaatcttgtatatgatacccctcttctatcattttacagtttcgtgaatcttctgccattagagaaataggtcactaaaatgtattactcttttgtgttaattaactctattctccttttgaagtgtttgttctgctaaaaagattacacgatttacttggtttatgcatttaatgaaagcctagaattcttcggcatttgttcatgtttcttatttgcaggaagaaaaggagaaacttgagaagcaattgcatgacatggctgttgtaattgaaaaattggagagtagtagacaaaaacttctagtggaggtagtggtcacaaaatctttttagatacaataggatttttgtttttcaaatgtcttttgactgcaaatttgattttttcttttatataatttattataaaatataaattatggtggcagattgattctcaatcttcagagattgaaagcctttttgaggaaaactctacccttcagagttcctatcaggaagctatgggcacagcaaagcaatgggagaatcaggtattttgttaatggtttctgtttgcaaatatagggttgtgttatgctcattgctctctcccttctaatgatctgaatgtaattttcttttttttttgtttgtttttttttgcgtaactgcataacttgtgtttttctgatacttcccaggtgaaggattgtctccaacaaaatgaagagctccgtggaattctcgatgagttgagaatcaaacaggcaaagggttttgtggaaccacttgccggtgtaaatgaggctggttctcctgcatatgcggctgaaattatctccctcaaggttagttcttacttaactgctgtaagggcaagataggcaccagtccgatggatttgttgtctagaaacaagtataaatattacatacaaaatctatgttcttaccctataatttactgtgtttttctaataactaatgtctaggtactaggtttgtaggtctagccccctaat

SEQ ID NO: 185550 - DNA, 2376 bp, Cannabis indica
tgaaattgtgacctacccgttcactcctaacatcagccacaacatctatcgtggcagagttggagtccgcgtttatacttgcttcagcataactacatctaactccaaacctgcataagctaacaatgaaacaatgtgaaaaccttcacaccaaaatcataatagaagtactagcatcaacaaaagggtttacatagtagaaaacaccgtaaaagaagctgttttattcttaaagggtaagaatatggtaggtcttatcattgtttcacgtatttccttatgggctaataacagaaaacatatgccaatacagttcaaggaaaatgataactcccattagataacttgctgaaaacccaaatgaggagcttcaaaccttactattattttctccattgcaaaaacccactacaaatttgaaattaaaacccaaaaagaaacaaagacaaaaatatgaataaataaataaaaatcataacttttctgggttgcctgctatatttgctgataattctagaaactagaccattcaattatctggtaaacaataagaaagaaagggaaaaaaaaaaacagtaaactataagaaaaagtgtatatggagtaaatgagagtgagcctgaattgttaaaaagaaaaaatcaagaaaagatggtagaaggaatttcttcaaacaacatataattattatctaacactaaagtttgtttagctaaaccatgagcagcttggttagcatctgtacgaatatgagacacacaaatagtagggagataggataaataatggccaaataattgctgttctttctatgcccctttcgggaaaattcaggcctcatgagatggaagcgaaatgtttatttcatggtcttagttgggctcgacatcatcatctatcttttgaccttattgaaactgattccttaattttgacgaactctcttaattgtccttcaccaactttatccttttttcatgatttggtgattgatattaaaaattatttatcaatattcattttatattggctaaaaggggggctaccaatgtgtggaattggctgcaccagtagtattataaacatcaggagaatggataacaatgtgctgctgaaaattgtagcagtatgccacagatttggcccataatttagtcgatttttgtgtagctttttcatgaagaatattgttgcgatcagtccatataaaccacatagtacaaagcatatgttcaaactcaaacttggatgtaatggaggataagtgagcaatataattaccatcatgtaacatgttggcagaatggaaattaatagcaaaaccagtctccttccacactgatttggcatatttacaacagaagattgcatgccccactgactcccaggcatttgaaaaaatactacaggcagcatagtctattattttcctatgaaacaaggcagaggcaactgggagagcattctggatcagcctccgagcgaagattttcactttggacggaagttttaaattccacaaaaatttccaccaagattcttggtttgaagagcaagaagagtgattatgatcacctaaggaactagccaaatggtaacctgactacactgagtattcccttgtgattgtgtaatgccacacccatcggtcatgctggttagaaaacaaaagagggatagtgagaatgtattcaagatcagctggagaaaaatcttgttgcagcaatgtaagattccaagttctagcagcagtaatgtagtacgaaacacaagtgtcatggctgctaagaaaccgtagaggagtgaacactaagttacgtggtatccaaggatcagtaccagtgtggatagttgaaccatcaccaaccttcaatcttaaccatttgagcaaaagttcacaatcccaacaaatcccttgtcaagtgagagaagacaaaccaccatttttagcagccataaagttattattggagaagtatcgtcctttgagaactcgactaagcagagcattgggatattcaataagacgccaagcttgcttagggagtaaggcttgattaaaatggacaaacgaacgaaatcccattcccccttgcaatttagtcttatatagaaaccgccactttttctaatgagttttcttcttatccgtagtagaaccccaccaatattgagtcatcatctgttcaagttgtttacagaaggtagaaggcaatttaaagaaactcataacataagtagggatagattgcacaactgccttcaaaagaacttttttttctccaattgagaaaagtttatcattccaactacgtattagtttccaaatgcattctttgatctccccaaaaagttattttttatctctctctctct

SEQ ID NO: 185551 - DNA, 743 bp, Cannabis indica
aaaaaatatatatattccattcaatcatctaagaagatttcttgtcgtttgtattcacaaatgtttttaattcatttcaaattatataggacagagttgagagcaaaatggagatttaatttaaatcaaacaaagatatggggaataacatcttttgtccccttttatcaacctctcccactagtccctcaatgtatatattgtgctaaattaaaatagttttgactgccgttttggttggtaagttggtcgtttaattaattataaatttctttttttttttttttattgtatatatcattgcatggaattgaaacagaaccaacatgttgctcacatggaggcatgtgagctactttcattaaacgacaatgaacttctaatttacctccaaattcaaatcatcaccttctttatatattattgtagcagtagtaacaaaaacaaaggttaattaacgaacattaatgtggccttgtttagaccactaacataatgagtagctagaattttttacatgtataattaaatgacattattctttctgaaatcttaatagtatccaagttcacacatatatgttttttatcacggcttaatagtgactgtgatcacagtcagtcctaatattttgttaaaactatatattagtagacaaatggattacgtacctacccatgttacctcattcttttgttatttctattatatatatatatatatataaatgtatgtgtttatac

SEQ ID NO: 185552 - DNA, 4237 bp, Cannabis indica
aaataaaaaaaaaaaaattacgtgtacaacgtttaaaatagggcacgtgctccgttctactcaacttactaattgttaattaatagtttaaattttaaagcggagagctaagagttttttattttttattttttgagtacgagagctaagagctttactatccttcattagttgatagatttaataattaagttaatattatgtgcaaagctaaatatattacatttattttcataattaataattaagttaataagtagggttcctcctctggaggatagtatgattaactgcagcacaaacaatgacaaccaaaacaaaagcccactatctgtggcaaaaggctaatttgttcccctgattatctgatacatgacataaatattaaggacatttaaagtttgtttagccaaaaaaattaaagttattttagcaactcgttattctttcttcatattcttaattactttagcggtgatcccaccaatatgatatttatatttataaatatatatcgatatgccaaatagaaggtgatatatatggaccaaaataaattaaataattaaacgtaaacatcgacaacgatatatgttactttttcttattatataatcaatttactgtataattaagattatatacaaggatgatgatatatatataaatgataagaatttttaagcactaaaaactgcagtacacagcatccaacaaagaaagcttatatgttaagaaaaaaattgccactgatcatcaaaaccctaaaaatataataaaacaaaaagaggatgagaataaaaaagacaaataaatatacaaaagcctctcctagctttcctccctctctctttaattctcttttctctttctctctttgctttctctctttctttctttctttcttggctctggtagtattcccttgggtgtgattctccaccatattttcctaaagagcaatcaaaaaaagaaaaaaataaataaaaccatggttttctcatccattccagtatatttagatcctcccaattggcacgtccaggtgaggttttttcttcaatttattatttttatgtatatatatatccactgctatagctatatctaattaataagctatttttcaccaaaaagaaagtaagagaaaagaaagaaaaaaaagatggaaaagaaaggaaacttgaagaagattattattcctattcctttgttatctcttccttgtgaatataccagataattaattttggttctccacctcaaaataattgtatgtatataattataaatatatatggtttatcatacataactatcagtttgggttatttttttctccgcagcaaacaaaatcatgaaacaatatcaacaacaccaacaacaccaacaacaattatcacgccttatttcacctgaaagcggcagaggcggtagcggcggccagcttcctccactgccgccacctgcccaacttattccgtcacatcatgttggtggtggtggttctgattccctttccaacggaggaactgggacagggtcgatcagaccaggttccatggctgaccgagcccggttagcgaaaataccacagcccgagacagctctcaagtgtccacgatgtcaatccagcaatacaaagttctgttatttcaacaactacagtctcactcagccccgccacttctgcaagacgtgtcgccgctactggaccagaggtggtgccctccgcaacgttccagtcggcgggggttgccgaagaaacaagaaaacatctaaaagcagcagcaggggctcgaagtctccagctggcaataattcaggtgatcagaacaagcaaacagcggctggttcgtcttcttcgacctcgactggtgggggcggcctaattagtccctcagcagatccgatgagtggtcataataataataataataacaacacctcctcgttcttggcctctatgcaaaacctaacccgattcgggtctggaaacttgggcttaaactttactgcgaataataacaacaataataatgatcatcatcagatccaagctggtgggagtgatttagggtttcagataggatcggaagtagtggatcagtggcgtttgcagcaattccctctaatgggcggtggtcatcatgactttgagtcacacccaggtaataataacttatacccttttcaaggcagtagtggtaccagtggtatggtcgaggttggagataatcatgatgaccatcaaatgagtcatgatcatagcaatatgatgtttaggtctagggtttcacagttaatccctcaagtgaaagttgaagatcaccggggtaatcaattattagtcggtggcggtgggcttaatcttttacgaccaaatttgggtctttcatcatcagaaaataataactactgggggccgagtaatggtaatacagctagctctacacagtggacagatttatcaactctcaacactactaatatcaatacttccacaacccatcctctcttgtaagtactttcgtttggattatatgttggataaaaccacatccagcttaaagatccctctcgacggatgatcatgatcatcatcacatcttcatctttatgtctccaaaaattatcagtactcgaaatcaaattttataatttggttgtcttgtgtgtatttgtgtcgactctcttatatatactatattattataaatttgtttgattataattagttttattgtgatatatatgatggagtttgagtagtatagtagtagtacattgagtacggtcatcgtgggtttgtttgtagtaatatatatagtagtagctatagtatatcgtgtcctgtaagttagatattatatggggttgacaagtattaatatgacatcttatattctttttcatttatctgctgttgcttgagcgcattaattgatacatatgggactagctattagctatactatacttgatttatttttaacgcacaaaaaaagaaaacagatgaattattaggatcgatcaatgtatatatatgtacgtatatgaatttgtgatatttcatggagtacttaaatggctagaggttatcattgtgtttttaaatcagcctatatatatgatcagttcgggaagctaggcattataagtccctctcttctcaattgagttcattatcatatttttgcatccatcgatctactggtaattagttctcaacttttctctcattatttttttatttttaatttaattttttgaaaataaataaaaaagttgtaagtaacaatattaacttggagtcctcatttattcaccaatatagaaccatgcatggcatggccgcctcgtttatagtagctttacttacaaaatcagtgaaaaatgtaataaagtgatatgggtaaaccgattatcatggaattgtgagtgagacagtgactttacttaactcttacattctctgaccactcttaaatgctagtttttttttttattttagtttagaggttttcacctgaatttatatatatataatattttttatagtgtttcgctccagattcagattactaaggaaaaagatgtacagtaccaaacaaaatgatttgtgtaataattaggatgatgatatggtccggtgagagtgaaagttgaaaagaaagacaacaatatgtgaaaacgccaagaatgacactcaaaaccatgcatgcaattctatatttaaccaaacgcaagtgcccaaccattctagaatttttatgcaaatagaattcaattgggttcacattatgttgtcactcttacgggtgggtactggtagtggtcaaaaaagctagaagatagtctcaacatttcaacatttaataatctttggttcaaaataatattaaaaaaaaatatatatatatatatatatatatatgagggcttttacctatatcatccttccatagaatatcgccccacactttcaatttaactccaaaccgtttcatgcattttggaaaaccttcaacagaagagggtttgagttgatcagatcatttctacctaccctacgtcacaccaaaaaatatttatatattggaatcaagattttgtgatttccatgttaaatcaatctaatttttataaattaactattttaatttatatttaaatatgctaactagttttgttgaccagcttaaagtgtaaaatttttaattattaaaaaattaat

SEQ ID NO: 185553 - DNA, 4011 bp, Cannabis indica
gtaccttatgaggaggagaggtttgtgatgagggtgttgctgtttgaggtgcttctgcagatgctaatggagagaatggatttagtgttggtgctggcaaggtagtatatgttgaattgtgaataagaataagggattcttgttgatatttgttgagaaaaccagaacagaaagggaactcgagttcattgaagatcacattcctagaaagatacaacctgcttgcgggactaagacattggtaccctttataagagtcgctatagcctaagttgacacatttcactaaatagaattggaatttgtgagcttggtagggtcttaaacaagggaagctaggtgagccaaaagttcttaagaaggtatagcctgattttttatcataaagtacttcaaaggtagacttatgggcaagcacaggagttggtaatctatttagataaacaacagtagagaaagcatcacattagtattttaatggcatatgtgtgcgcttgagccaaaagtgtaagacccatttcaactatgtgtttatgtttttgctcatctcttctattttgttcaaaggtctaagggcagggatgattgaattctatgccatgagttttaaatagattaaagaaagcaccatatttaccccctccattagctcttagacaattttcttttcaaacttagtctcaactaaggctttaaattttaggaaagcacccaatgcttcgaatttaaatttaagtgaataatatcatgtatatctacttgtaatcatttacaaaatagatgtaatacctatgattaatattggatgcaattgtagctggtccccacaaatctatgtgaaccagatccaagacaccttttgcacgattttgacaggcatcacaaaaggatttcattttatttttagaaaggtttacattggtagagtaagaacatgactcaaggctttggaagatgggtgacctaaccttttatgccaaacatataacttagaaattaaagactcgttagctctaggttgtataacactcttaggagaagttaaaccaaaaaacaacacaattggtttgttattggaatctagaaagaaaattgtggaagtagatttgtggattggtagtagctggtagagaccatctttaagcactcctcttagcaacactcttcttgttgctttgtcaccaatcaaacagagagtgggataaaattcaattaatataggattatcaactgtgagtttggacacacttatcaagttttaggaatttgtgacacatgtaaaatgtcacttaacaataaggattgattagtgttagtgtgaagataactactacttatgtgagcaatggatagtttgtcaccattactaattgtggcagtttttctacctccatacttctgcttctggttcattgctctagtatcaaaaatgatgtggttgctggctccactatcagcaaaccaagcatcactgtcaataatttttggtgtggctatgaaagcatttaggttgttcttaaactgagtatgatttgcccctcgatcgatacccatgtaatttccatcatacttgttatagcatatagcggtagagtcgccatatttaccacaaacttaacatgttggttttgcaccaccactaaatctctctcaaccagctttgtcactagatcaccataatttgaggtaaaaagaccacatcatgacttgtagagtaatttttattgaatgaacctctacttcaaccaccaccatgacttgaaatgggagttttgcctatcatattggcttgaggtgcagtgatagagtttaccactttgctggtgttagtgagggtttgtagtcttttaattttgttgtcaaagctaagaagaatgtcttaaagtttctgccatgtagtcttaggcttgacttcaatctgaacaaaaataggcacatattcactatccacattttaaagaacattttctaccaagtgagcttctggataagggtcaccagcaaggactagaatgtcagcttaatttttcttttgtcttagacattctgccattattgaagctcctttcctcgctgtttggatctgagtcctaagttcatccattttggcacgagagtaagctcgatataaactctcaagagcttgccataatactgcagcagtagtagctcccatgactgcagtggctattaaaatttattttggatattttttaaccatggactgctctaaatttaagtaagcatatgcataactcttaaggctaataataatattcatacatcataatccaatttgtattattaatgaaaactaataatacttcaataaacaaggaaattgttacacaaattattcagatgaacattaattactacatataaactaatctcattaagattgaatgagtggaaacttgaattcttttaccactaaatgcttaatcaaacctttttttaaaaaatattttgaaatattatttatttaacattgtatatttgaaaagtgtaatttcctatactaatgagtaaatcataattgagaattgagatcattggttggtgtttatctaattaagaagaaaattaatagaattaatacatttctaagaacatacataccattaatcatatcatcatttacaaaattacaacatcactactgatcttaattggtttcttacatcaaaagacatcatcagggccaaaatcaaaattagatgactttgaataacacatacaacaaagtcaattcaaaatttcaaactataacaaaagtccattgcaacattacatatatagatatatagttttcatttgttggattctgttgtggctttgcaaatattcttccatttatctttaagatcaacagcagtacgaacttttttaaaaacattattagattccaatatttttctccatggaatctttctttaccagaatatatcttcacaccctcctatataataagatataagtatatgaattattaattataatttcacaacataacaattaatatagtgatcaaaagttaatacctttagtttgtgtaactcttcatttgtccagtgaagcctttttctcctatgttgatgaggagtactactacttgtcatgttgctgctgaaatttccacataataattctaccttattattattgttaaatagaaaaattcaaacaacaaagtaattaatttaccaatgataatgaatcacagacttgattggagaatgatcatcaacatcattagcttcattgttggattcaacttgatgatgatctttttcattgtcttctctttctattatcaactccttagtattctccaaagacatatgaatcaatgcatcattttcttttctaccaatagtcaccacattacaaggaatactaatctcatccaacatagtttttttcttctcaattttcatcacctcatcatcatcatcatacaactttgactttttgttcaaattggcatattcaacatcattataaatacattctaatacacctttttctttcaaaatttcagcatatggatgagtagtagtagtagtactatcattaaaaatcgcttctttgaactgtttcaaatcagagaaatatataagatattttcattaaaaaaaaaagctaatcaagaaatatatatctacatacctgcaacaaagtacatttttccattgaagctcttttatgattaagaaaaggttgtatatcccattttgacaactgtaatgattctgaactctgtgataaaaacaaaaacatttcattaatatgtatgattcaactttgtgatgtatgacattatttattttcctccttcctaaactgctattatacaaatcagtttttaattgctttctttctctaaattctcagtagctaatagtgttttttagctcatatatttatatatatattgatctaataggcttatttctttccagttttttattcacaaaaatgggaacatgtacacctttccataagctt

SEQ ID NO: 185554 - DNA, 1283 bp, Cannabis indica
tcaacatcctttgatgtttttgaatcttctgttaatttgttccttctaccttggaaaattcattaatgcatgccgtgatggccggattttccaacactatttctggtaagagctttggttatgaaatgggtgagaattccaatgggacaaaagagcaggcaaagagaaaccgagtgcctggtctctatatcgttttcctgtccgtcgtgaaacacttgcctgagaacaaatcaaatgccaatagagtgttggagctttgagtgataaacaaacataactacaaaccagtaataataccgtaaaaagttaatataacacaaagaaggctaccttgcagcaaagagatcaacagccaacaaatgaatccaagcagaagccagagtcatctcactcgagaacatctttgctatacctggcagctgcacatattagacaggaagaggagaaattgttggataacaattatttaaaaaatttctttttggtcagaaaacagttcaacctgttaattgttctactaattacacacctctggcagcaagtatttgcttgtgaaaatcatgcctatcgtttcaggcgtccaagataggtatagtagatatgcatatagaagaccaagcatcacgtacggtatgctgctttgcatagatttttttgtctgtcatttacttgatataaagcgcgttagtttaagttacacagtgtgaataatttcttaattaagcacacggtacaatctattttaaaactataaatgaagttttaggaatgataaggactcaattctctacaattgaaaagttaaaaattctgaaatttagtttgagaatgatttcagtataaaaaagaaaaagaaagcaaattttgaactgaaagtaaaatagcttcatatgtagtatcacatgatgaatgattcagtgtaagaaaacttaccaattcagatttaggagctacaaccatgagagtataaaaggggagaactgctactgttcccaagccaaaaacactatgagcaatttgagaatttgccaaccctacacagataaaaaacgatcattttcatttgagcctaataccttcaatgaaattccggacagtttcaaaatagatacattagaagagaaaaatcacaaatcaatggccaataattaatattgatgagcaacaataaggatatttttaacagaatatgccatctattcatctgcagaagatgtaagaaggtactttgcataatattacaaggaaagaagtttagtaaaaaaaaggagtgagaatttata

SEQ ID NO: 185555 - DNA, 4706 bp, Cannabis indica
ccattgaattaaatggagatgttggcttgattggtacattatctttgccaacttttgtctaaatgtgtacttggacgatttggttatgtgaagtgctgaatgttttccttgaatacattttcgtttacttgtattgatattgaaatttgtcttctgacagaactctctggggtcgatttgctcatggctgatctcaaagccttggagacatatgctacttatttcaacattctgtcaaagacttggtctaagccacttcctgaagtttatgatccgcaacaagttgctgactactttaattgtaggccacatgtagtggcatttagacttgcagaggtagattaacttacttgatatgatcttgtgtttgaattatgcatattctttaatattgtttcctgataccatgttaaggtcatgattatgggcccaatatcatcagaaataaactcttttattattaaattctcttgttaaattgagccttatatgtaaatatcaagattctatacaaattttgaaactgcattcttaactggtttatggtatattgtgtactctaaggtatttacttcctttgccactgccgctattagaattcgaacctctaagatgagaaagttcttgggaccgagtgtggataaggatgttgatggcagcatgtcacagtacaattttggggttgtgctgaaagaaacaatgcttaacttaggtcccacatttattaaaggttagcattgttatgttgaagttaatatctgggttagatttccacttattgttgcttcccccattgctgtttatatactggcacttctattttttttctgcagtcacaagattaccaatatgctagttacatgcctttgcttgctggtgcagttggtcagtccctttcaacaaggccggacattattggtactgaaatggccaaggtcagatcatgaagaattatccagcttttccagcattagcttatttattccttgcatctgaaagcagagtttcattgctagttagttatttgttcataataaaaacctagttggccccaattggtatggtaatacttctacttttgcttatatctgaaaacagaagatatgtaagagctttgccttatttttttttataattaattgtagattattttagcatgttcaaataactattagatatccgaagctcagaatcaagtttttgggtatattcaccaatcaccatatggtgtgcatgttaatagttttatttatttattttcttccatgtaatactacaagttaattttgcttgtgtctttatgtatttgataagaggaattaacacctatgctcatgatattaacatagatgcaagatcagatacatacgataagataataaattaagggctttattttttagtttaatttcttcttgattttgatttccaggcgttgtctgatttgcacgatcaaatacctccatttcctagaaccatagctatgaaaattattgaggaagagttaggttctcctttggaatcattttttagctacatttctgaggaacccgttgcagcagcatcctttggccaggtgggtatttctgtagatgagatttatggttggggtaaatgattaatagatacaaaagagaaaaaagagcaaaacatactaacatacctactatttcatagttttagtaaatgatgtttttgtatttcataaccctcctatataattgttttattactgcatatttttaaaaatacttcctctttgttgtatgcatcatacaggtctattctgcaactacccttgacggatctaatgtggctgtgaaagttcagcggcccaacatgcatcatgtgattgtgcgggatgcatatattcttcggcttggggtttgtattgacttctactagccttctgtgtgtgcgtgggtttcttttttataaactttaagcacttggaagacactaatacaataatttataattgttttagcttgggttactgcaaaagatagcgaagagaaaaagtgacctgcgtctgtatgctgatgagcttggtaaaggtttagtaggggagttggattataatttagaggctgcaaacgcatctgagtttaaggtagttgcactaattgtgtcatttttctttttcatcgaattcagttctgtgaagagatatctcataactctgctactttctgccaagataatttcccttttatatttctgttgcttttattgacctttggttttcttggtacagaaagctcattcttccttttcattcatgtgtgtgccaaaagtgtttcaaaatttaagtcgaaagagagttttgactatggagtggattgtgggggatagtcccactcaacttctctctgtgtctactggaaactcagatgataattggttatcgtatacagagaagcagaggtttgaagcaaaagggcgccttcttgatatggtgagtaatatgctatagttgtaatttttgaactttagtacagttcacttgcaaggggaaacaaattaattggaaaacaaaataagtaaatggaagatggatttatctggccgagtttaatttatcttatcttgggttactcccagaaattgttttgtcatagttattgttaacattcagctagatttgttaaaaatggacggagaaattgttatggaactgttttgtcctactaatgatacagtgatagacagaggaataaagttaaacagttgttttctggcttacctttgatagtgttgccaagttagatggcgaattaaatagaaaaaaaaatattacttaatggttagtgtcttactacttttttatcctgtaaaaaaaattatctatgctgtgcttctactaggttaacaaaggagtagaggcaacactcatccagcttgtggaaacaggcttactacatgctgatccacatcctggaaacctgcgttacacatcttctggacaactatggtacttgcgtgtgaataagtaaatttactagaataaatccaatgcatctgttagttcatcacctccttgtgatttctgcatcagctttcttgacttcggtttactttgtcgggtggaaaagaaacatcaatttgctatgcttgcatccatagtgcacatagtaaatggagactgggcatcgctagtgaatgctctggatgagatggatgtcataaggccagggactaatttccgacgtgttacattggtataatatcttaattagttaatgaatgacattatattatacttactgatgtagagttgaaatttgtttgtttcacttgctataaattgtatgccattcaaacaaaatataatttgattgtacttatctttcaggatctcgaatatgcactgggggatgtagaaatcagagatggaattcctaatctgaatttcagcagggtaaaattctgttttcaatattcttagtttacattttttttgacaaaagaccaatgctcactgataaaattcgttaagtaataagttcatcaatcaagatacacggaggaatattgttctgcattgttaaattcattatcagttgtaagtgtcaacttagcatttcatgggagcattgttacaacaacgcaacacctagaatgagagatctttagttaaaattgttttcaatatacattattaggcttaaagttccataatctataaacaagatttgcattaaccaatttctttcttgtacgtggtaagacttactgaggaacacttggaataattcggtacttcagatggtgcattgatataatgagtagattagtgaattgagatatattatgctttattcttatgttcatagcattcatagttgtgaacttgtgatcaccatagccctttgtgggtctgattaattgagttgctttgtttctttgcgacagtgttttgtacctctgttaagatgatctctctaacatcttatattaataccggctaaatctttacatgactttgatttgaaggttctggctaaaatcttctccatagctgttaagtaccactttcgcatgccaccatactttacacttctcctccgttcccttgcatcttttgaaggtaaataatttaatctgcttactttttcttataattagcgaattctttcagaaaccttgtactgctaacacctcccctcttaaaacaattcacggttactttatttgttgttctcacaggtcttgcactagcagccgacaaaagcttcaaaacatttgaagctgcatacccttacgtctttcagaagctgcttacagaaaattcaactgcaacaaataaaattttgttttcggtaagaaatggctcatatatcttagacttccatgaatattagacaggttgtcataataattaaatttctatttcattagtaacattagaagtgaaaaacctttagcctgaaattggtcatgttagtttattctcctatttttcgtttgcagaccccatttattaatagacaacttacagtcaaatattcaaatttcattcccactaattttttaaccaattcccttcatttgcatgatgcatggcttgtatatgttcaggtggtcttaaacaaaaagaaggaattccagtggcagaagcttgctctatttataagggcaggtgcaactaggtaagcttgatagatgtattttgagggttcttttatatatttatatatactagg

SEQ ID NO: 185556 - DNA, 2376 bp, Cannabis indica
tgttgtatggtagttttaaggaatctagaaaggaaaatattgatttttctcaaaatggaatatctgtagagggaatgagagctgtggaagtgtatagtaggactaaaagattgggtttttttagtcccaaaattctagtggaactactttctttttcaaataggttctgttgtgatgagatgaaggcggcttgtgatgcccagttggcttctcttgttgtcaccattgatgatgcattgattctgattgaatatggtttggaggagactgcaaatattcttgtggcttcctgcttgcaggtcctgctgagaaggctcccaaattctctatgtagaccaaaagtgatgaaatttctttgttgctctaagactagggggagattatccatgctgggcagcgcttctttcttactgtattgttttcttagtcaggtagctatggaggaaagcatggtctctaaaatgacagtgaagttactaaagagattaggagagagtgcaaaggagaattggcagaaggcactcgcagctcatcaattgggatgtgttttgcttgaaaggcaggaatttaacacagcacagcgtagttttgaggatgcagttgaggctggtcatgtttattccatggctggcgttgccagagctaagaacaagctaggacaacagtattcagcctataagttaatgtgttatgtcatatcggaatataaaccagctggttggatgtatcaggaacgttctctgtataatattgggaaggaaaaggagttggacttgagcactgccactaaaatggatccaactcttttgtttccgtacaagtatagagctgtagcaaagatggaagacaagcaaattcgagctgcaattttggagattgacaaaatcattggatttaagctctcccctgattgtcttgaattgagagcttggttcttcattgcacttgaagattacgggaatgctataagagacattcgtgtaatattaactttagaacccaattacatgatgtttggtgagaaggttagaggagattacatgattgaggttctcagtcgtctcgttcagaaatggagtcaggctgattgctggatgtgcctatatgaaaaatggtcttctgttgatgacgttggttcgttggctatcatacatcagatgctagaaagtgaccctgcaaatagtgttctccaatttcgccaatctctacttcttttacggtaaactttggagctatgtatttagttctgtcttgattatctagtttagctttttaaagtactagacgctataactaacacacatggttgtttcaggttaaactgtcaaaaatctgcaatgcgtagtttgcggttggccagaaatcatagtagttctgagcatgaaaggctggtctatgaaggatggattttatatgacactggaaatcgtgaagaatctctctctagagcggagaagtctctctcaatccagagatcatttgaagcctttttcctcaaagcatatgtattggccgatacaagtttgaatcctgaatcatcatcttctgtcattcagttactggaggaagctctcagatgtccttcagatggtcttaggaaaggacaggtgagaatcacttaacactttgctgtttcgccattttgaatcaatgtacttgtttaattatgcattgttatgtatgaaattgcaggcacttaacaatctaggcagcatttatgtggattgtggtaatctcgatcaggctgcgggctgctacaagaatgcccttgacatcaagcatacaagagctcatcaagggttagcacgagtttaccatttaagaaatcaacgaaaagcagcatatgatgagatgacaaagcttgtagaaaaggcgcaaaacaatgcatccgcttatgagaaacgctctgaatactgtgatgatcgtgaaatggcaaagcaagacctcgatacagcaacagaattggatccactgagaacatatccttacagatacagggcagctggtgagatttcgattttgccattgtctgacatttgctccttttcttatgctgtgttcatgtttttgaaatcttttatgcctactaatggtactgacatgcatatattatcagtgtctatggatgaccaaaaagagaatgaagcagtggaggagcttacaaaggccctgaatttcagacctgacttgcaaatgcttcatcttcgagctgcattttacgattcaatagggaacacaacatctgcacttcgtgattgtcaagcagctctttgcttggacccgaaccacaccgacactcttgatctctataatcgagcacacaattcagtgattcaaaattgagttctaattcattccatccaacaattgaattac

SEQ ID NO: 185557 - DNA, 2332 bp, Cannabis indica
caaatatttatatttgaaaagtcaagttttttttttataatgaatctcatttttttgacagtcacattcactagcaatttcattggagttgcactaatgaaataattaaaaacggcgggtcgatctgatcttaacaaaacaacttttttgaaattaatttatgctacctaattttgattatattttaaattaaattacctcaaatttaatattaaaattaatctatgataaatcacaaaatttatagtattagctgtgagcctgtgaaatagtgaatataaaataattgtattcgaaataacaaaaactaaacaatacattttcttgatgtgagatgaacaaataattctttaattttacacatatatctaaactttttttcatcatcaaatctattttttgaactttccgaacactcacataaaataaattcatgtatataataaaagcatatatacaccacaaattagcgtgactatatatatagtatagaatattatataatttaattagcttactttccattaattaccgttgcagtaccattagtaccattagtaccattagtagatgatggtttaataccatactcagccaaagccatttcagtctcattagccttggcagcatctctaaacttcttgtaaatgtcactcttgtaaaactgtctagttctaataaccaaaaccagcgaaactaacgatcctaaaaacgtggcagctgtgataataagaaatgataactgaaaacacttaacgccgttacaattcaaggcttccccaactttccgtgtaattcccgaagccaccatttgcttcctcgcttctttatcgtataaatgcccagtcaacctcacgttaagggcgtagagcccgatcgggctggctacggatccgaaattgtagagagtagaataatacttgagtccgaaaagctccgaaattatggcgaacagcaaaggccattgggccccgaagcagaacccgatgattatcgaagcgaagtaaagaccgttaggcacgtcgaaggcgattaggagatgacccacgcaagagatcaatatgattagagtcaacagaagaggtctgggaaatttgtaccgggtcaaaaagaactccgaggcaaaacccgctacgacccgacccagatagttccatatgctgactaaggaaacaaacgtgcttatgctccgtttcgggtacccgagtgatgatccgatttgtccgagattgtctatggccgttagagtacccccgacgccactgatgcaagccacgaagagaatgagcatgtcgacactgaaaagggcttgaagtattgtgtaatcttctcccctgtttgggggttgaaatgcagttttccagcacgagacttctgttggttcgggtttggtttcgggttcgggttcggatactggaaccggatcaagagtaacgctactatgattctcctcaatccttgtgaactcgagtttattggacttaaagagcttatattcttcgagaaggactatagcaacaggaagaatcagcaaaaagattaccattccggcgctagcgccaaactccggccgattaaaggtaactttgttctgtattatgatcatgaccatgagaaaaccagcgagcccaagcgaaatgtagagaaagttgtagaagactttgagctcattgggttgtttgatgactttcatgtaccgaatggttctgagaaaagcgaaggaaatagctgcaggcaaccaaccgatgaggagaatcaaagcttttgtatcatcgaaataaaaagcgtgaaagagctgagttatgatagctccactaagacccacgtagcccttgaggagacccaaaacggcgccgcgtgactcagggaagtttttgacaaccgtgactagtgagccggtattggcgaaggactgtgaattggccccaatgcagatgtaggcacacatgtgccagaccttgggagttgggatcctttttgtgacagccatccacaccatgaaatagccgaaaaaattaaggacaccgcccacggcgaggaccacccagggcggtgtcacctcgttgattagaccagcaagaataccgacgttagagcctacgtctttgaaaaacgacaataagttgagtgtcgtttggtcgtagccgagaacgtcctttatgtcggttgagtagaggccaaacatgtaggtggcccccgctgcggacatgattagaagtgatgcgaaaaccatgaaccatcgaccgtttaggacttgtaaggttaggcctttggtggtggcccaaccccctcctcctcctccgccgttgccagatctggcaacgtccatttt

SEQ ID NO: 185558 - DNA, 1800 bp, Cannabis indica
ctggtacgataggagcagctctttcctacccttcaaaacatttatatataagtcaaaagcagagttgcactaaagattcctagaccatcttccttgattcttacattcctaatgtttctataggttgcattaacccttgatgttttttgctatgaagatttctgaaaagtttcattttccagtccactcgaaaaccaaaagtttgatacaatcttagcgacacaagatttcttttttcagcatattcttgctaaggcagcggatgaattcatcaaaggctccttcaaacctaacccatacatctttcaagaatggaatgtgatttccattttcaccttcaaagaagtaatttgaatgaaccccttacctcatacaaagtgaatatccccgttcatgggcatctgcatgtctatcttcacatggtttttgtatcacgcccattcttatgaagactttacttttaatggctctgccccttcatgaaccctgttaagaaacaatccttagtttacgattaccaatacctttcccttctttttggttctacaaaccaaattccatgccacaagatgatcaccccttttcaaatctccaccatcagaaaagaaattcgtaattaatctccccaaaacctctgttactttacctgtgctctaaaaagggataaataggaaattgggagagatgacagttaaattacaaagtattagtctgtaaccgcttagagaccttcttgatatttggttcccaaaacctcaacttccttagattatctcccaatagtgatgcaaataattacttcctagctttcacgacagtagatgtttatttccttatgtaatgtaatgtatgagagactaaagctaagattaagtttgatgaaattatgagtgctacatgaattgttgtgaaaataaactatagaatagcttagaagaatgtctttagtctgccttgggaaatggtgcaaatatcacttgctgtaagcgttgctttgtatctgtcagcactaccattgtctttgtacttcatagtattcacattgcaacaactattactctcttttggtatgttaatgatctccttagtgctattgttcttgagcattcatttctatgtttaaatcttttggattattacaatttttttcccaaccaattgattctgaaagtcaatttcgggagttaacttgggacatggctttctttcatcttcacatattttttcatgtgtacttaagcttttattcaaactattgtagatacatgctctttagagctggcgtcccacgtcatgccattattaagaaatttgctggtgaagaaatatcacaacttgaggagctaatttcaattctatcaaagctttctaggggtgctcgggtgccgttggagtatgttagctacacagatcgtcaccgtcgaaaggtatattatgatttccaggtccatcttattatatttataacaagggaatatatgaggttttatctagattgttagattcctcaatcaagtatgagttgatgttaatgttcaaaattcaaaattgtttgtactgtccttgtcgtccttgttatctttataatgtctagtggaagataaatatcaatgatgaggtggttaatgttacaagattttttttttaaagtaaggttggtccctatgacacttggataaatcgaattcagcccacttaatgactacaaccaagtaattatcaaatgcatggccacatattctatagttgtcttttaggggaatcccctaagtccatagtgtcgagaatattaacagtaat

SEQ ID NO: 185559 - DNA, 4580 bp, Cannabis indica
agttaaggattttgctggacttgccggtgaatttgtagaacccattcaacatatccattggtacccccaattgggtcctcaacaagattcgaaaggaaaaggacaccttcccggggctgttcgccttgtcttacaagctgacacaactgataatatgaagaatcgctttctctaagtttattaagcatcctcatcaactttctcgacatttcattgccatgctcaccaaggataacctgattatccaaccaaaacagtaatgcagcattcaattaaagaatattcaagcagtagcatatttagcatttaatacaagtttaaagaaaaagaatttctataacaaatatttaataaataaatgaagtaaggaacattagcaacttaggactataaggaccattagggggccattggtaggcagaaatgcactaagttgtgaaatgtgaattaataagttttaagatgaaacaagcccaatgctattttctaaatcaacatatgatatttgacaatatacctttgacaactcagctgcacaatctggcccaagtaaattcatagctatatcaggtgaaagtactctgccaaaccaaagaatgaaacggaaaccatcatcgcataaataaagacccctggaatccaagcttgcagcagtgagcggcaaccgtttctcaatgcttgtgaggtcatcatgaccagagctctgaaaacataattagggaaacatatgtaagtaattagcaaccgatcatcactaatcactacaaataaccattgtgttctgccaacgtgttaccttcaaaagatgctcatcaactcgaattaaactaggatatagaagttttaacaggttttttactggcaaaaccatcattgtgaaacctgctgcacagcgttcatccagtgtaacatcagcataccctccacgaagagttgttgacttagtaagtgccaaaccatacaacaacaagaatttcagagattcaggatatatgatcctccctcccaagcgatgttgcacagagtgaagatttcggtactctttaagggccttcacaattcttagttgcaaactgctacgagcatcttcaagcttactggacaatgttttctcaattgctgcaagttattcaaacccaaattaaaaatgccaaaaatctcaaaattcagagtcacggcagtactagcatcaaattcaacttatcttacctagccttgaaagcagggtgactatagcaccagtatctgcatgacgatacatctccccaagatctggaactactggtgcagctgcagtaagaactctaatacgtctctcaccacaagatgctgtgtatctttaaaattgtcaaggaagcttaacaactggcaacctactcactctaaaatcccaataattaacattaaactaacaagtcatttatataaaagcaaggcaaaatagcacagatgaatgcaataccaaccataaatctaagaggaagaagggttcagatatgataattaagagcagtgaaaatcataaccaaaccaattatataactttcttagtaattaacaataaaatataataaaacacttgttttagaagatattacacatcatataaccaactaaaaggatacagcaaggcaacttggaaataaactgtctgtgtagttaataaagcctcctcaagagagaactgcatcgcaaatgctttatcacaatcaacagctggaagtgctattaaatcggtagaccgtagcataaagttcccatgatatgatgtgaagcggactcctaaataaatataccaaaacacagttataacagatacaaagcagcagactacatacccacagaaacatatgctctatttacgcaagccaagagaataatgaccttttccaacacgtatacgtaagacagcttcccaagcagtttcccgagtaaggtctctggctaactcatgtcttagtttctctccatgaatggatgattgaaagtttggatagaaattcacttgacctccagtatactttgccaaagcacctatattggaagtcagaaaatataaataaaggtattacaaaataaaatatttaattatatatatggtgtagaaaaataaaatatatatatataaaaacttgtcccataagcatatatatatataaatatatatatatttatatacatatagtttcaataaataatacgccaagaaaagaaccataaaagcaactatatgacagtatttctcatcagaatatttaaatttttgagtgatactacacaacagcactgggacaaaagttgtataaattatagaaactcttaaatacaaattttcacatttctcaagtagtaagtactaaataacacattttagcaactcaataaccatccagcccaaacatcgacccatatttaaaattgcaataataacatgtccaacaatctgacatataaatatgcaaattcataattgccacaatatatttactactctttagagtaataagatgtatactatttcagtatttccaatggcttaaatcataatatgctttcagtgaatatttatagagctaaggcattaatttaaaaataattttttctcacaaataaaggagctttggtattaataagacattgcaaagaacaacgggctctcactccagcaataaccattagcatacacttttaatcccgtttaagaatataaatataaatattgaggcaaggcattgcaattatacctaatgaggctatatcggtgtacttgtcactgaatgcatataaattcacccctatttggaattttgtgaattctgcagccatctgcttgtagaatggatcttcaggaagtcttaacacatgttctttatctgttccatacacacgtagatcatctccccgcaacttcaagcggccaattccaagagatggcaatgtgttttggaaaattaacaatttccccccaagttgcctctgcagaagcacatatataaagattgaattattaagaatggccaaagtctaccataagtacatataatggttagcattaaagctatcatttagatgtaactcagtgctcaaaaacaataactcaaataggtgacaatgaaaaaaaaaaaaaacaagcataccataagcaataaagaagccttaagggctggaccaaaagcagattcaatgtttaaattgtcctggaacatagagggtaagctatccagaaatgcttccaccacacttctagattctgataagttgacaagaagatcatctggcaatggtacaaatatgtcatccagatcagagaccaccatcatttgaggctgagtcaaagatgactgcatagataatacccacatgattattgattttagaatataaatttgctaaaacaagttaaccagctagagctgaaaaacaaatctcaatagaaaaaacataccttcagattataaaaatgtattgtgctgtcataagttgcaaacccaatttgggttctagggaagccaggcaactgatccaaacatgacctgatggttttggctacaacctgcagaaaacgaaaaatatatattatatttgagacaagatgagtgagtgagtgagtgtgaaagaaagtgaaaagatattactcattcatttaagtaacaacaatacgacccataagacaagccataaagatgacataaattgggagtaaaacacgttcaaaaagagcttttcaatcacagatttccaggtgcttcactatgtgaatgctactctacaattatcatgcaagaagtaaaatttgagagagaaattatttattacttgcacaacataaactgaaaatagtgtgcatgatttagtacatacgattatgtcttctatttttacagtaattattcttttaaaggtgtgcaattctttaactcaaagaatgagcatctttctacatttcgatgagaccagtaataagccccatgtgcaaaaatgcgtattgaagtgactctagtctataattatactatactttctaatgcacaaagatattcaacatctccatagatttttctttttgaaactactttctctgtctaaccccgcatacctccaaacattttgatatgaaggtctgtgccaaaatatgtgttctaggtggtactatgttgctttatgattatctaagagttacaagctataataaaaaaggataacccatggagcaaagcaaagaattaattaaaaaaaaaaaaaaaaaaaaaaaaaaaaaaaaaaaaaacaattgtacatctcacctcaatcataccacttctaactgcagatacagaaacatcaatgagaaaaaaatacaatggcggcattggcggccggaccatatattctgttggagcaacaaactccacactaccacgcgtaagctcaggtcgctgatccaaatccactctttttccagtggaatccaaatgagcaaaatactcaccaggaactatgcatgaagatcaataagaatcagcatatatttcataataaccagtataacaaaagaatatacgataccaattataaagcaagttaacaaacaaaaaccaagt

SEQ ID NO: 185560 - DNA, 5126 bp, Cannabis indica
gagctaatcaatcaatatacttcacacctaagttgattttttgtgacagttgtatcaacagaaacagaaagcaaaacgaaataaatttcaattatagtgcaaattagctgaaaccatgtacaagtacaaccttgatttaacaccaggcagacatacaccaactcccatgatatttggaacatttttatttattaaattatggccaataaaaccaacaaagagaagaggaaagaaaaaaagaatttattgacgttttccaactaggagttcccaggaactagattcagaaatcagcaaaagcatcaagatgtggctgatgtccagagtttatttttgttggtttgtttgttctttttaatacataggctttatctgaaagtccgattttgctagtttttgaaaactcccaacttctccatggaagatcggatatcattgctgctgcaattttcggctgtctgaacaatgttggggctgtcaagtgggatcacatcgactagagggtaacttctgttagcatgttgattaattgcactactacaaactcctttcagtatcacgctcttgtgcaccccaccaagcaattcttcatagtccgtgtcaccacattctcccacaataaccaccattttcgataagtccacaccccatcgaacgtataagtacctaatgtttggtcattagaaattatttaaacgaattgaccaaaaccccccatacaagaaaggtggggaacaagtactagtcaatgaagaatacaaataatgacaatcatgatcaagattctgactaccttatgtatgccatgctactttaattaccatagataagaaactttgtaacaataaattagataaggatcatgaacccatgatgtcaattcagacactttacctgagtgcttgggcgcgagaagccattacagggattacattgagtctgctcccattttgagaataaataggatggcagcgtaaagcctggattctcagcaatttccggagctccttaacagggggaacctgtaaagacaagaaatatttgaaaggaaacttaaaggtgaacaaaaccagaactgttatacaagtaaaatccatagagaaaatcctagatttaagaaagagtttgacaatagcaaatgaggattgatcaccttccctggcttctgcactttaaatgcataacagtaatcagttgaaagttgttcagaagcagaaacaatttgttcctcattttcagtcttcttatcagatagtgaagtagcccaacgaaccaaagtcttcctcaatccctctccaccccatcgatattcaatatgtgagtggtagtaaaagtcaaccacaaatggacgatcctctgaattaagagatgaatagtatagatcactaccactattgcaaataaaagcatcaaaatcatttggactcaacccccctgcgaccaggaatgaccgtatctcagaaatggttaaggatgttgacaatatgaaccccacagagccgtcactcctttcctttcctgcagcctcaagaatctttttagttgtttcaagaagatctgtactgctatcacaatccacagcaatgacaaacagatgtttcctcctcctcaaggccggaaacttagcagaagtgttttggtccggtttctccattgatcctgaccttcgagtctcctttgaaataccctttgaccatgccaaaactgcattctctattttactactatcagcagaacctccttctgattctgaaatgttatcgttcccactagttccactcttttccccatccattgaaaacctcaagttcaatgatatatcctgaatatctctcaaggaatcaccaggtgaatctgattctgaagtttcgccaccatcatcgtcatttctttgccattgtggatgccttggtttgaaactgcctattttagaaaggtatgtcttgcagtgctctggccaagaaaataggtgaatattttttaagccattctgtcgacacctagaccaaagatgcttatctgcaacaagttttagaagagcatccgcaatagactgctgatcatggggatctataagaagaccattatcaagtacctgcaaaatcagctttcctaagtaactaaaattatgttcgaatgtcttccaactagaatctggttttgtagtataaccattcaaccaattctattaacaagcggacatacccggtgtatgtcaactggaccaccatttttcgtggcaacaatgggaagaccataagctgttgcctgtacaacataagaatagaagctcaaatattactaaattatggtaaacataaaccacataatgcttaattaattttacaaaaagcacctcaatcaatgtcagcccaaatggctcaatgaaagctggatttatgaaaacaccctgccaaaagaaaacaagaaagataagaacaataaaattgcacggcttatgcagcaaacacataaaatgataaagaggtaactctataaaaatcaagcttaacataaacgataaaactgcagagcagttcctttgtgattgcaatgaatattattgtaagtttcatttctcagttcaaatatatatgcacagcaaggattttttcacctttgcagaaatttgtcccacaaaggataatgtttgattatctgacagagtgtcgatccattttggactatttcaaaacagacacatctaatatcttaatatagcactcaaaagaaagagaaagaaacttataataaaccttctcaaaataatgttattaaataagcaacttttcccagacaaaattaatattttactatcacaactactgaaaatgtagagtttgaaacatgttacatgtatagaacagcctatgacactcaacttgtgtaagaaggaagctcaaacgatatgtcttaccttaatcctgtacttgaagtaatataaccgtaaaagatacctttacattaaatcctatacatggtatactatagccataagtggtacctttgtcttagcagcaagacgatatatgtctggaacgtcagactgcttgtggtgtttagggtatgcaacttgtccgtacaaatcatatttgtcaataagcttcagtacagagagaagaacagaggaatttgtgcctgacatttcatcaatgccttcgcggttgcccataatcaacgtctagagagcaaaaagagtatcaaacataacagcgagaacattaattcaactatgtaataaaatcaagaaaaaatcttcttcaaacaagtatcttcaggtggatgaacctacaaggtttgcaagttcccttaatggacgacattctccaaatgctttgaccaaagtggtaatgttctttttgggatctggtctagcaagggcaagaatcattggcttgcgagggttggtaaagaagcgcattatctgtacttaaccaaatttaaattgtcatcagttcagtgaatacattacataacattttaaactgttggctctggactgaaattcaaagagaacataagttatcaattatcaactaattttctcgtagtaacacaaattcataaggaataactagaagttaacctcagtccagataggtggatcgggagaagtaggatgatcctcattagattctgtctcgccatccatatcgccatctagaggaacaatatggtggaactccattccaggaggaattatctgcaaagaaactattagaattgtgaaattaccataccaaagaagccagcataaggaatatgagcagtaaaccaagaaagtaaaagactttttaaacagaccataaaattgtttaagttaaaaagataaatacaaaatcttttccagtaggtatttcttggttctgacaacccactctcagtcaattcattaagcattccaataacattcctaaaaacacttaaacaaagatcctaggacttaccaccatgcggggcataaaccttccataacagctcacattacgcttgatccttgcacgtattttacgttccagtataggatcaaaaccatcatataaacgccattgctcctctatctcctgcctagtgctagttattactatttcagaggcatcaagtgataactcctcagcctctatacgacgcattattttgtatgtcgagtttatttcatctcttgaagaatgactttgctttaaaagctgttccaacttgtcacgacctagtgaatgcccagtaaagagcattggtacattcaatgcaccagataaaagagcaacagaatcgcctgcatcggcataatgcccatggatagcaacaggccaaacaggtttcccgccaccaatttgttcacccaaagctttggacatttgtataatgtgagtcagggcaccatcaacaaattcagggatatgaggccaaagaagttctttaggaatatatttatctcttggaccaaatgggatacgaatgatataagcaccactgctctcacccatctcatctgagaaatcatctgcatttcttgggctaagcatctctatgggttcagcataagtccaatctacatctggcgatgaaacttgcctagtgagcagatcaacacgatatacacctggcatggagcccaaagcccttgcaagttccacaacatacttaacctaaacgaaatccatccaaacaatattgagatgcccatatcagtaaaccatgcaaaagtggagcttaagaacaacaccaaaaaggtttcgttattattaaaatatcagaacaaaacccatgacaaccaaatcttacctgaccaccagtatcagagtcacgaccaagctccatattttctccccttattagaccatgaatgctgcaaggatagttcttgttagaagacaattagaaaacaccccatacagcaaaggtacttctacatttggagatagattcatactagttaccatcaagaagcgtttaatttcttatgaagttttctgcctttaataaaaaacgtttagagaatggttagaatgctcagccatacacaaatcgaactctttaagtcactgtattagatcaaaaatgcaaaaatagcatcactcagtttgttcaaatcacctcatatactttcctaaacgaattgggtacta

SEQ ID NO: 185561 - DNA, 2440 bp, Cannabis indica
tatatatatatatatataatctgggacattcggttgtttaattttattactctatgaagttcctagaaatttctatatgccaatagtagaagaaatttttaggaattattaggcataccaaatagtggaggtctggtcaattatcgcagaaccgagaatgacatccctaaactcagtttatatgctagggagttcgtgataatttattataaaccaaagtacatagcaaagaacattctttcctctcgggacatctactttatttatggctcttggacattcttttcctagtataatattagtttaaatggaaaagttgagttgcaaaataagctataaaccactaaaatagtagaaagggatacacaaagtgaccttgattaatataagaagtagagctatattactggagttactagcgcaccctttagcaacatcagaatgattgagttttgagataagtagggggctagtgattatatactgaaggcagaaaactatctttgtaatatgcatgcaaatgggtatcttatgatcatgatttagacgagtatctttttatgacttctggaccttatactgcttggcatatatgattatcagttcgttgctggatcccaaccaatgaatgcattggcatttgttattgatggactctattatggagtttcagactttgcatatgctgcatattccatggtaagtagctaaccttatggggaaccgttaatcatttagtatgatacgtacttttccctcatcaattttttttttgttgtttaggtgtttgctggacttatttcttctgtcttcattctggctgctgctcctgcatttggtctagctggaatctgggctgggttgtttctcttcatgacattgcgtgtaggagctggaatttggaggtaatttagatttgtggtatccttttagctctatacgatttgtcttttggaactgctttaatatgcaactaaactaaacaagaacaggttttactcctctctcatagattttagaccacaataattttcatgcttaacaatgccatgatatagaacttaggctaattagatttttttctcctgaactttgacatgtaccaaatcatactccttgaactttcctgtgttaaaattttctcctgaactatttagattattgaatttaaggacttttgttcaatttcattcaattttactaattcggtgattgtccgtgtactaaattatactcttttaactttgatatctaccaaatcatgcccctcaaaattttgacatgtaccaaatcatactttctgaatttcgattcatattagacttttcttaccaaaattggacaaaagtccttaaattctaaatttcaataattcaggagaaatttgtaacgactttaaaagttcagggggtatgatttagtatatgtcaaagttcgggaagcaaaaatcttaattagcctagaacttaagttagttttgaggccataagtcaataactagcctctcaaattttacacaccaggaactatccaatcaaaataaatgccaatctgctgtaaccttgaacattttgatcatgactaatgctctgccattcaggttgagcacgaaaagtggaccttgggaaaggatatgggacacaccagaattggaaagtgaatgagatgtggtggaattctctgattcttgtgttgaagttgtaggaattgcgacgaggcgtataatttattttacactcggaccaacaagcagccttagctttcacactgttacacgagttgcattgcatcatggtgtgctcaaagacccaattcttttgtcatccagatgaattggatttgcttttagtgaggttctaaccaaccatttatttagttgcacaatgggtcaattgaggagattcaagaacaacttggtttgtcttccttgccaggttcttgattcttttttcactattggtgtacatattatttttatgttctctttagcagtagcttcacatagatcatatacctaagaggtacttgtaatagaactgccatttattgactgtaaatagctacacgctcttgtaaaggagagaataaaaaatagggtaattagtggcgaaattttcatttgttttaatttcatacacttaccctttgatctttatttttggtagcaataccctcttaagtttacttttatttacaaatgtaaggtgtcagttaaatactaactgagattgccgctgtgaatacctgtgtaaaggtgacattaaatcttcaaatccaataaaaacatgcaacatgtattgcacacagtaataattcaattggcatttaagagtaaactttaactcctctcttcaaatttgtcagcaaaagtaagagtattaccacacaagaaaattaaggggttggggagttttgtcactaattatacaaaaaaaaaaaa

SEQ ID NO: 185562 - DNA, 3767 bp, Cannabis indica
tgcattttccattgttaaaacttcatcatgatactgctatgggatgttattagcataatgctcaatatgacatgactttctttctttttttttttgttaggagggtcagtgcctcttccttggtcgatcagaatgagaattgcacttggtgctgcaaagggtcttgcttttttgcatgaagaagttcaaaggcctgtaatttatcgtgatttcaagacttctaatattctcttagatgcagtaagtgattataactgaatgacagcttcaactccttacttcctctttttttttgtttgttttctacaaatgttaatgttgaatttgtttgttaggattacaatgctaaactctcagattttggactggcaaaggatggtcctgagggaaatgatactcatgtctcaacacgagttctcggtacctacggttatgcagcaccagagtatgtaatgactggtgagtttggttataaataatcatctctctttgactctggaaattgaaatggcttaatgggtattgctcttttgttttctttactattaaatcatatctttagtagtaataccattgtgtgaaagactcgatcagctcttatgtatttatgtttctgattctagtgtatctttaattacttgatttaacaactattctgagttgggtttttttttcttttttgtgcaggacatttgacatccaaaaatgatgtctacagtttcggtgtagtcttgctagaaatgttaactggcaggaggtccatggataaaaataggccaaacggggaacacaatcttgtgcaatgggcaaggccacttttcggagacaagagaaggttctataggttgatggaccctcgttttgaaggtcatttttcaatcaaaggtgcacaaaaagctattgagattgctgctcactgccttagccgtgacccgaaagctagacccttgatgagtgaagttgttgaggccctaaaacctttgccaaaactcaaggacatggcaagttcttcctattatttccaatctatgcaagctgcacggtcaaggtccatgccaaatgccaagaatggcaataaaatgcaagtaacattccaaccgaggaaaggaacacccgtgaggagcttatccagtcaaagtagtgctcaagcttctccccaccagctccctggtgtatcaccacttcctcagattaggaaataagaaatgattgcagccattttttctgcatatctatcgtctcaacttccaatttgtatgtatcttctcaaaactaaatcttcaaccgcagcctaaaactactggcaaaacaaacgagcctcagcctcttaacagccgccggtgcatgatgttgcgccacacaaagtagtctggttgagagagttgagactctgtaagttagcagtggtttgataaagagattagctataagtgtcagtttgtgtaacataatgttttatggaatttctttgcttaaaaataattatgctttttatgctgttgaatctgtttactttgacagacttaagatctcaataggacttttctctgtatgaatctaatatcacactgatgttataatattcccaagttaacaacaatgtcaagctagcatttcttctggatttaagagtgatttttgagtgaacatagaaaccattttgtttagtaattgtttattttcacaaattattcattgtataaattagaaacgcatagagctttgaacctgagcttaaactacttgttcatgaacatcatttttagcttgcctttaactgaggctgaatttttctttcgttttttcaaagacccaatctctctttcatacttgtaaatgaagaaccataacaagtttacactgttctacggttctctttaggtagagaatataatatgcttcagcaagggtgtctgtcactctgcttaacttggtatcccgaatactaagtaaccggtgaactatcaagttctttagtttctgtctccctagttgaatcttaacttatatttccagtcgtgtgtaattggacgtgttcttggagcttcatgtatcaaagattatgtagaatagaatttggggatatggtcttgtaaaaggttaatcatgttagtccaacatttcttcatgtaaatattacttcagcattatcatacttattctatttgtatgtaatttatagcttgtgatgttatgatcaagactgatgccttgtattttgcacatattcaaagccttcatgggaaagcagcagatgctttctacaagctcaccaattctaactcatagatccaagcctatgtcttttgatgatatgtatgtttctctctagtgctatatgtttgtaaatacaacaaaccttacttttgtagattaaagaatcttgataatatcggtatgagattacgtcctattgagttcttcctcgggtttcctactgactagcacagattatttcctactgaatttgatgatgttgaagatgagcttgagaaggtaactaacacacccaattgacagtttatattagttaaaacatagttgtgtagtttctttggtagagccttgcatttgaaaagatcaatgaatgagaaaaatgcagaagtttcaaatggctcaaaacgaaatggataactgagattgtactagatacaacatgattgtactatttcacttgtgatcaactaatagcagagaagatattgcagatcggatcagatcaagcgacctggcctgtcagcgaggacagcgttctctcgccttctctgaaagtgttcctgcaacatcagccattgatatcatgaacattgttggttgttgattcaatatttcttatgttttcatataaccgaaatgaaaataggaaagcctgaattcattgctactttaggtgtgtagtattattagttataagccaacttagcattgacataagtggctggatcttaagaataaaagccaaaacaaaaggccaggctgtcttcttacctaccatacagaatctacttgttttggatttttaagttttaataatggaatttgatccaatagtcaactgaataagaacatagtattctatgtcaagagtttccacctcgtggaaatcttatctttataacaagataatcatgaaacttatgattatctatgtagccaagcctgtcagtcgctattgctgcaatcagcatgaaatgtataggcatttacagataaaagaatcttcttgtatataccacctgactttaaatatcttatatatacataatgataaagaaattaccattaaatgtttgattttaactttgattgtcacaaataaagtggcagctctcttttttgatgaattatgaaaaatatcaatttgcaatatatatatacatttatttatgatacattgtaaagactgagaaaaactagaaagtctaaacatatatatacctcgaagtttctcaaagtctgattcttatgtagatagatatttatatatgatggtgatgatatggtatagcattaacttggggagttagttgacttcttctttcatcttttttctatatatacataaaagattttaaaatcaaaaaagaaaaaaaaaaaaacaagatcagattatatcaaaggattcacatgatgggatcagctgcttagtcatccacgccttccaaaatcaagtggccaatttactataaagacaccctttttaatatcaactctttatacctctttgttcatatcttccaaacttgttagtttctctctctctctct

SEQ ID NO: 185563 - DNA, 5905 bp, Cannabis indica
cgaaacacagctttcgccttttgtcacgctctatgcattggtacaatgcacaagagacatttctagtatagattgtgctcagtgtttggccattgcagtagaaaactttgaccatttttgcaaaaacaaaaagggttgtagagttttgtatagtagttgttatgtaagatatgaactctatccatttttctttcctcttgcttcaaacaataccaaggttttagatcattctatgataaacatgatgaaggtgaagccatagagttttggtgtctgtatttctgtctgtcatattaactaaaagattttccaaaaggaaaaatgacaagacaaaggttttctagtttgttgtaattctcatctttgaattcaagcacaatgaaataagaccccaccaagtcattttcttctcttttcttattttgtaagggtaacattaacgtatcgactaacatgagagatgcttccagaaagctagacaataagactttaatatcataaaaataaccccaactcattttgatacactgtggacagctccaatgccaatagtaaagacaatgaatctgaagaaaaactgaagaaaaaataacaactaatgtaggaactttattactttcacttatttcttcatgtgtacaagtatatttcctcatttgagccttattcaatttttcaataagaatctttacaggatgtatatgtttttacatgtttccctatctggatttgaacttttacagaaacttaatcagttgctgatttttccataacttctgggaaaggggataacatctctggcatcagcaaggccagtggcaaagagaaccataagatcaaacccgaaactgaagccagcatgcttgactgttccatggcgccgaagatccaagtaccattcatactgctcagctaccaatcccagctccttaatcctgccaaaacacaaagcttaactatcaaactttaaatttttttgtttagcaaaattgttaagtgtcataagagtagaacttgaagccattaccttgtgcttaacacattgaagcgctcctcattttggctccccgagactaaaactccaacctacaaacaaatttcggtatggattgaaacttggaacttaaagaaaggccattaaaggttttgtttcaaagtgggatttgtacaaagtttatgttacctttggtaccaccaaatcaaatgctgcaactgttcttccatcgtcgttttggcgaacataaaatggcttaacttgttttggatagttgtatatgattacaggccttttgtacatctcatcaaccaaataactgtcatgaattaacaatggtaagtagtattgaaataaggcctaatttggtatagtaaaatgttacatttttaccataaatgaatgatgttgaataccttagatgttctgttgttagtgcagcaccccattcaagttttctttccattttcttatcagcagaatgctacagaaaattcacaacttgtaattagataaatattactaaatgatgaaaccaaagatagattgaataaaactcactttcttcatagcttctaatgcttcagtgtaagagatcctcagagctgaattcagtataactaaatgaaggcgttctatgcagtttttgtccattcttttcaggacaaatttcatatcttcagaacatttttccaaaagccacttgcataagaacttgaaaaagtcttcagcacaattcatagcatcctgaaaaaacaacatgacacattataatatgaagttaaagaagagttaataagccattatttaagccttcatttcacatacctctaattgtgaaaaggccatttccatctcaactgtccacatttctgctacttgttttggagactcggttttaattgctcgaaatctcggtccaaatgcatagacattcccaagagaagatgcatagctctccaaatgaagacgaccagaaacagtcagatgagtttgagcagagaaaaagttatcagaagctgtagtagtagtgtgattattatgatcagctgcctttgagaaactctttgatttggatttttctttagcttctaactgtgcagctagctcagaagttttctgtaaatcctttgttgcagcaattaatgcttctctattactatcagtccttttaagctcctcaactatcttacttttctccttaacaacagccttaataacatcaagactaacattttcagtgtcatctatcatctttggctcatctttcttactcataattaatttctcaaaaaccccatttgtaatctgaaacttttcactgaaaccttcactgtctgtgattgttatgattggtacttgtacgcatagaaatccattgttttggttgaaagtatgagctgcaaaactcaatgcactacgaattcgcataacggttgccacctaaaaatgacacagttggttactcaagttgacatgaaaaagagattagaaaagaagataatgaagaagaatcattacagttgttgttcgaggtcgaaaatgaggacattctcttaactgattcaatggaagttgcttctttgataatggatacttatcatattcaactcttcctatatgaagtattctctcaactttgagttctatgacatgttttccctcagttgaacacctcttgatttcaccttctgcaactatacaagttccagtatgtagaatctgacaaggggaagctatagaagagtctacaacaacctgatcatcaaagactcagattacagtacagccaaattaagaatgataacactaatgataaatacactcttcaattacatactcttaatgataatatgtacaaattgaaagtctttaactaaagtcaaaagataataattcttttaggaaaaatatataatttaataatttcactattaataaaaaataataaattgcatgactcaattaagaagcttttatataaaaatactactctagtgtaagttattttatcttgaaaaagactcctacatagtagtcttgtgttgcaatagaataattcttgttcctaggattttattctttaatttttgaacattcataaaaccttaatcaattttttttttcagaggataaaaccttaatgaattaataatttattaactaatacacgtaatataataaacttttattttatcaataaactagagcaatgttattattattaggggtatgaccgtatgagtaccttaagttattcaactataaaaaataccgaaataaattaataaatttttatattacttattaaattaaaatatataaaacccgaaatatcataataaatattataaggtcattctaccatgtatatccttataaatggtgtattaatacaaactttatgtgttttggcatttagaatatttgtttagtgtaatcttttttatattcgcgtagtttatagttgtttaagacattatgtaaaattttaagaaattcagaataatttacaatataaaaaacagtgttcaaacagtttatttcacacgcatttaaattaaaaagatcaaaagtgtaacagactatttaaatcatagtttcgacgtgttaaatttctacgaaagtattataaatttacaagatatcttaaataactctaacttataccaacaaagttaaattgaaagattctcgacatagaaaatcctaaaataagataatgaaataaaggaaagattatagagttaccagaagagttgaaacgcaagaaccatcattaatctgcaaaaaagagatggaaggaggaggtggccttggagctgaagccacctctaatttatcacgaacagagtaattccctcctcctcccaacattttcaagatggatcttataaagggtatccgagattgaagaatctcagagcaagaaacatcgccactcggactccgacccggactagcacccacatactgatcaacggtagccgcgggcagttgctcagccgcggcgggagagggctctttcctaacctctttagaagacttaacccacccaccaaccacaactctctgcccaacaaatccaagggtgtcacccgattcaagtatcgttttcaacacaacccgggtagagtatttgaatggaacaggggtagcagagtctttttgttcagacataataatgaatgagataaagaagaagagaatgttaattggggtttgatttgtgaagatgtgagaattgaggtgatattatttataggggttactgtactgtgaatgtgagatatatatacgttgcttgagaagatgaatgagattgattgaaggtttgggagagaaggaaagggattgtttcccagtattgacttggtgcacctcatctatcttcatcaaaatcataatcgagttgtatagtatggtatagaagagaaaagaggcaaggtttggtattcttcaaaggttgggtaatcgccggactttcatttcctttgtttattcaaaactatactaacgcttttccaaactgtatcatatgccaattggcaagtacacatgtcgcaattttgatttgccacgtggaaataataatccaattgaaacgcagatgaacaacacgtggactaagatgagttagattcctacctaatacctatggccccaattcaaatgtttttttaagttttatttgctacccagaaaaatataagtagagtaatgatatgttcacacaaattttacacatattttcgtaaaaaataattttgactaattatctttatttttttttaaacatgaaatatcaatttcattaaaataaatcattcaaattataaattgacatgaaaattagcccgaacatcaacattatgaatgttacgatcaaagtaaaaacaaaaacgcctagtcacgaagtggacaactttatttgctgatcgtctaataaaacgaagactacattagatagagaggatagaagagttttacaatcattagtaatcaaaccgaaaacagaagtcatttgttgatggctaaaaattgcctgaacagtgagtaagcgcgctattagtttccacctctaccatattccaacttttgcctttgagccaactaagtgcctccttaacccttaaagcctcaactacctcggcagagaaggacccatgagaatacttagccataaaatcaataatcctacttttcgagtcacaagctacaatgccaaacccatatgcattgtctttctcgaaagtagctccatcaacattgatcttgaatatcgtattaggagcatgttttgtccaatgctcaaggttgttaccatcacccaacatagaagatgataacaaatatgatttatcttgagcttttcgccagtaattaagagtagtccaaactgacactacaacaaataataaaaaaaaaactcagattccttaaggagcgacacaatgttgtcgcccctaataatcctattgaaagtcgcctctaaattttttgcccctaaaactccaatttgttgtagtgtgaagtgagaacctgagaaagggaagaagctttttgtcccaaactaagatatttcttgccttctaaagagaccatcacaacatcacaacacgaatattatcataaaaaatactgcttattctgaatgtgattcccaaattaattaaataatttattctaaattcaattcttaatcaatctgactcttagttattcagattacttgtaaaaaaatgtactgttagtgtcttcttaaatacaatcttccaaatataatattactttaatttgtaaagttttttttttttttgaaagtatcattcatcactatagacttgctaatggtgttccttaccaaaatattcttttttatggaacaaaagttctaactgttaagggact

SEQ ID NO: 185564 - DNA, 2640 bp, Cannabis indica
tatatatactatactatatacatatatatatacttaattagtttattatatatatatattatataaattactaataatcgatcgaagaacactagtatggtaccatatcgtcaggctggcctattgttctataatattatgagctaggtgtactccaatattaaagtaattaactaggtttttttaatatacatttgtatttaataactgtatatacaaaatattcacacatatataaaacatgagccaactagttaatttggctggacagccatcgtttcatccttttaattttattcagttaattaaattaaatccatatgatgatgatgtttctttcatcttcgtctctcaaatttatatgatttttagattttatttaatattatataaatataattttaattaaatatattacatatgtatattatagttaataataaaagagatgtactaatttatttttaattgttttggtatttaaaataattttttagttatttttttttttcagattatgtatgttatatagttatttaattttgtaaaattttaagaaaatttgaaaaaaaaaaaaaaaccgaaaaacagaaattcaaacagtgtattgtaaatttgtcacgcgtgtattattttactttatacacgtgtgaaatagactactttctataatataaataatgttgaatttctcaaaattttgtaaaatatctcaaataactataatatacaaaaatatatataaaaaaatggactaaaaaatctttttgaatggcaaaacaggtaatacataagtgtattttaagagggtgcattgtaaaaacgggtccggctctttgtgcatagacggattaaacctgtgcttaggaccgacctagtcagggtccaaaaaaaattacatttttttactaattttgaaattataccacatttccaattcaaaaaaaaaatatataccacattttttttgaataagagccattttttttttcatagtctactactctactcaatttcaggccagccctgtgtagaagcacctaatactatattaattgtgtttattatttacaagtttttcttttattttttaggagtgtccgaaactctcacgcaattttagaaattaatgaataattttttttgttaacttgtaaattacattatcttttaaataataataagtaagagaaaaggaaatatttggccgtagacttagaagagccactaaaactttgtcatgggtggagtaggaccctttgacgactgacatattgaataaaattatttcatatatgaaaatggctcttatatattattataattacgaatgttattattaaacaactcatcaagtcaaagtcaacactaagtatagtctttaattcatcttgtctgtttgctatatatgccagttgcctcactataattgatcttaacatcccagctgatcgagatatattaacaacacataattatataaatatatatatatatatatattaatttacatatatattttctttataatattaattttgtttcagatatatatgtacgaaattaatttcaatcttttaaatgcaagtgcagggaaagttctgagaattttaatggcatatctaatcagcatttagtgagttttttaattcatgagagagactgagattaacaaaaataattactatttattccaaatacagattcggttttacattataattgccaagtttaacacctctgtgtttttggtatccaaattaatatttctgattccaatttttttacatgccaattgtttagattgtaattattcaaatatttaaaacacttcaaaatagtatataaaatagagttttgaacaatataacgcatgccatataaaataaaaacacgtatacgtgcgtgccaagtaaacttaattaattattttctatagtacattataaattattctaataaattttcactaaatttatacactacttaaaaaaaaaatagagtatatatttcaaaaaaaaagaaaatagtgtatacattcaattttttaccatatgtaaaatataaaacctaaaaataaaagtaatgtctcgaaataactaaagatacatagatctccactaagctatccctttattagtgaaaattatatgttttcggttattttaaaacaactgaagacataaagtctataaattcttagaaaaataagttgagatcttttattttctctcttttctcataatctttctcattcgaaactttaataaccaccgaacttaaattatcatttcatccataaatttaaccaccgttttttttcttcattttttctaaaatattttatatatttcttattccaaaaacacaaatacactataaaaattgatttattttaggttttaagggtaaataaattattgctactttagggtttggcggccacgttaaatagtaacttcggtttagagtataaaatatgaatataaatttgtttattttttataaaaataaaagtacctatatctctaccaagattttttttaaccaaaattgaccaacaaaaaaaaaccgaagataaaaccctttcaatatggtatcacaattaaatatctactatttacattgtaatacatatat

SEQ ID NO: 185565 - DNA, 5579 bp, Cannabis indica
ggtatggtgttaaaatattgaatctaaaaatagtttttaaaacttgtgccaaacactattgaatttttaaaatgacaaaaaactgtttcctattcttccttttaaaaacacaattttaaaaactgaaaattgaaaacacagtgaacaagctctaagtgtctctgtttttgctaatctgtaacttatttcctttacagatggaatgtaggcatgtttcgaatatcaacccgaagcttggaagtcaacaattagaggcagccatgtaagactgagtgtttttcttgtattttattaaaaatacaatgcactttatataaatagttgccgcagtgttgaacactgaacttgattcatttgagtagtatttatagtaaaatagaagtagcatctatctagttgaaactgtgtggagtattcaagttggatgggttcagttcagtgtgatgatatatatatatatatttatatatagcactaggatttgaccatacccagaagtacccacccaccatattattaaaaatcacacataatatataaaattttctgaaatgtttgttgagaaggctattgattgctcaaatggtttctgtctacaatttctaaaaactggtaaaaaaataaaaaagctttttcaatttttgagtaaagagtgcgtttgaattctatggttacaaactagttggatgttacttactatgattagatattaagttttaaagcactaacaagtgaagcacactagtaatttatttataatatttagactaagaaatattagaaagaaaaagaaatgtgtaaaggttcagatttgaatggatgcaaaaatcaatgacttttgctctctttagacctctcatcaaatcgataggctttactatgcaactttttggtttcgactttcggccacaacttgatgtaacaaagatattgtaaattttttaggtagcacatcttgagaggtatttttttaatttaattatttttataatgataacctatattatatataatactgtacaaatattacattttgagaaatttaagtatcgaaatggagtaagttaacctcaaacagttaattacatgtacatttgttttcttcttataaatgtgaaactaattatttttgacacaatagattattattattatatacaaatgacgattagtgctttgcagatatttaagaggctttaaagtagagtcacatagtgaatttttacaagggtcggtttggtttactatagatgaaattaacactattgaataatgaaaagaacaactcagagcaaactaaactaatacaactagtgaattgctactacattagtgatagtgttccattctccaattgggttggaatttttttacccaatacaataatgataataaatatagtactaaattaatttttattttgcattttaaggtatccaatacaacaaaatatttcatattttagtgtgacttattatatttaaatatgtgatgactttcaaattgttataaaattcataagtttggtggtgatccatttattcatagtactatccaaatactatttgtattgagttacgcatattctttcatgattgtgttatataattttgagctattttctctaatttataaatattagagattgcttcttttattaagtaaaccaaaagagaaaaaaaaaattggaactcatgacatataatttttatttaaattcatttgttaggttttaaatttcacgattaaataccaacaaccactgtacgtacacatgacatatatatattggtctaattaaataattttaattatctaaatattataaaattattttaaatagttgccattttaaggggtattgccatagagaaaaaaaaaataaaagattaagtatctataaattgaaacataaagcggttttacctgcgtatacaaaaattgtactaaagttgtacataaattttcgtaaatcgttcaatatgaataacctatccaaaccaaactgaattaactcgagaaaaaatttaaactataaaacttgacaaaaacataacctgtttagtctttatattaagcgcgttagaaaataatactaactcgcctaattaactccaactattaatacatatggctttattatatatataatatacatgttaaaaaatattcaaaatatactatgtttgtttcatgatatttaatttttgaatttactctatctatatttgtctcattattataattaattaaaatgtaaaaaaaaaaaatagtgatcgatttaagcacttgagcaaaccaacccaaacaactcatccgggcatgttattttatttttttttttagtgaaagtaaatatagaacttttattaatttgtcaaatcagccaaaagatatgattgtatctcaatagaaacatcatccttgttgaacagtcaatctgaaaatctctagcagatcgtttaataaaaaataaataaacattatttaaagatccaagaagtttacgacaattttttataataactccaaaatttaactccaactccactttccgccatggctaagttttaacccagcttagcatttatactaattccttcagctaaatccggaacgcctataccagtaaaattgtccgacttaactatcattaattacccttgagtgtctcgagcgactataccataataaaacgtaactcaatcacgaaaaatagtggcatcaattcaacttcgtcacgagtttcaaaaattgaaaataaaacctttgtacctctattttgaactaatttctctttgagtgtctcattcggcatgttatttttttattattatttttgttctgaattgcacttcaatttttataactcactatctaagttgatatctaagacaaaatactctaaattgtagtaatgagaattagatacaatttaacatttctatttggtttcccacctttttgtgtcaacacactcaactcaacaatggcggtaacaccaaccccggagagtctcctcagcctctccatcaccacccacaagatccccctcggctgtcccatcttcgacaccttcctccgcggtggaatcccctgcaactccatcaccgagctagtcgccgagagtggctgcggcaagacccaattctgtctccaactcgctctctcagctcagttaccgctcaaccatcacggtcgcctttccggttcctctctctacatacacaccgagttccctttcccctttcgtcgtctccaacaactttgcctcgattctccgattggcgggaactcagataatatatttgttcacgctgctcattctgcggaacaactgctcgacgaaatgcctaagatagaatcgtttcttgttgattcccaatcacgcttgccgattagacttattgtcgtagattcgattgctgcgttgtttcgttctgaatttgataacaccccttctgatcttaagcaaagatcatctctttttttcaagatttctggacaattgaagcttttggcaaagaggtttaatgtagcggttgtggtaacgaatcaagtggttgattttatgggagaaagtggtagtttgaatggacttaggattgggaatttaggctctttgtattcgtctggaagacgggtttgtccagcattggggatagcttgggcgaattgtgtgaattccaggctgtttttgtctaggaatgaggaggttataggagcagaaatcagctcggaaaatgctggtgatgggctctgtaggcgaacaaggcggcgactttatgttctctttgcgcctcatttgcctgaatcttcaactgaatttgtgatcagaagagaaggggtttttggagtcaacagataacaaaatttataatgatatgtaagtgtacatgaatgaatctatctgtggttagcttagtattgttgagttttgtttcaactttgatgtttgtgaatttgttttgagtgttttgatagtactcaacaagtggtcattttgctgcaatattttttcatattaataatttattttgaaattctagtatgttattatcagtggagtttaatcaactgaaaactaaaacacttaacaacctttttattgtcaagttagcagtgagccgttgtaaattaattagctggacatgtcatatatagtcgagtccctttgtgtttaagggtaacataaagacagaaatgtaagatagagagaagttacaagattacaagtgagagaatccaagaagacaagctgatgatcatggtttcatggtgttcaagtagctcatttctttggagtgtttgagagctttattcttctgttttggaactcaaagtggttcacaacgagttggtgtttgtaattcacattgaatagtggagaaagtagaaactccttgggaggagagctggattaggactcatattgagatctgaaccaggataatttctttgtgtttttttttctctgctctgcattgttcataatctgaatttcttttcttttgttgctctctttgaaaatttgattcttaagttattgagtatgtgttgttgaatcacaacattatctaataaaatatgctatgaaccatttcaattcaatcccctgattttttgtactttatttatagcattacaccatattactaagcactaacaagtacttaattgaaagtaggagtattttattataagcttattattatcttcttactaaaaaaactaagctgaagtacaacaaacacaactcatcccagaagagaaaaacctaaacagaaactggtggtcttcctaggtaggtttttgaataacaaaggacatgcactgaccctggtgaatattatcaaaagctaaacaacgtatataagcagttgggaatgcttttttgcagtcatggatttcactgaggacctgagaagaatcattgcagccaaacatgggtagcttccacattgtccaatatcttccatcatagtagcctggcatcttgctgttctccctgtatacatgccccaccttcaagcaaaacataagtgttacaaggtatgattctttcttaataacataacctaagctagaagactaggtatattagcttctgacctcatcaaattcaaggcaagggatccatccctttctgatcatgtaatttatctctttggcaattgaatcatctgaaagaggtgggagataggatagtgcctcaaacttcttattgttaattggattccatgtctgtaatattcaaaaaaagcaaaatcaaaagattaaacaaagtatcctaagttgatttaattatggcttattaggacttttcttgattattaccttcatgcagtgagtttttgaaccattggagacagttttcctggtccacccaactgaatccttagctggaagaagctcagtgaagttggatctcaggccaacatagccagaaacagcagctggagcagtaaatgaggtagcagacatcctaacctcaaacttggttaacaggagaaagaaaataattgcagtgttgtagtatttcctttcctttcctttattcttattttgattattttagt

SEQ ID NO: 185566 - DNA, 1657 bp, Cannabis indica
aagaaaaaaaaaacagattaaaaacctcccctaaatactaaatcaaataaaaagtctactaaaacaggatgaagtgtacacactttatattctataattgttacacaccagaaaataaaggttatttttttggcaaaccaatttacttactgtaagttgggctcttaagtgggtgatcatatcatcaatgaaagaatctgggctttgtgaaattcttgctccaattgagagtactggtagtaaataattattcaagaaatcatttgacccaacagtaatggaaaagaatgacttcttcattatgaaatcttttgccttagttggacccaatagtttatcaaactgttttcttgtggtggtgaaatagtcaatctgtatatccattcctaatctattaacctgaaaaaaaaaattatcataaacataaacatatttttaagctcacataaaaattagagtagattttaaaatacaaaagaagtaaataattaataataaaaactcacaaatattcttccagttgcattcaaaattcccccaccaccagatgcataattcactccatataatattgcttttccagttgtgtttggtgccaaatatgggacagcaaagtgtgattgtcccaattcttcacctgaaaaaaaaaaggcataactaattaaaagtgcttcatttaagattaaaagatcaaatatatattgttgtattgtgttgtgttatttatatataccaactatatcaccaatggttctcccattggtatatcgaccagtggggttgcctccagaagctttgaaatcaatcccattaggaggaatatttgccttagacaaagtttgcaaataattattatttccagcatcaactagtgaatctccaaaaataaatgaagctcctaatcctttgctatcatcatcactaccagctttagccaaaaaaacccaattcataaacagcacaaaacaacaaaccaaagagctagttttcatgcccataatttcttctctactagattgtctttgctacaataaatatatataagtatagttaagaatagtgtcttggtctttatgcattaaaagagagtaccacttgggtaaaacttgtggtcttgtttatattaagttgcatttggtttgactatgagtgaaataactaaaataaataaattaaaaggtttaattaagagaattgggtagtgtttgacaaatgttttcaattgatatgtgggtagttcatcaataatggtttgattttctcaaacgtgtaatgaaattttgggtgttgcttatggtagaagacacgttcccttatattttgtattgtgtgtttttatgacaaattaatggatactagatagaaacttgtatatattgtatcaaagtgacgttgttgctgtccaaacaatttaaggctgttctatggagatttaggtgtggagtttggtgtaggagttaaacacctacgaactttgtatttctaaataataaagtgagagatatgttttgaatttgattttattttttatggtttaattgtggctggctgtggtctgtggagtttgtttgaatagaaatgggctcgacttagaacaggatgccgactaagatggtttgttgggcttcaatatgaataaaagaggaaattacactct

SEQ ID NO: 185567 - DNA, 4224 bp, Cannabis indica
ttttgggtttctctctgtattgagatggctgagagtttcgacggcgctgagttttggctcccccctgagtttttaaccgacgacgacgtgctaatcggcatgaatagcaagactaagaacgacaaagatgggttgacgtttggggctgaagcagacgcttataccaagtctctgttcccatacgagttcccttgtggctttggctcacttggggttccgtcggatttaagttctccggtcgattcagttcttggttcgagcgagacggagagtgacgaggaagaatacctggctggtttgactcttcaaatggcccgttctactttggaaggtggttttaagaacattggttctgagaacggaaaggtataaagtagttctatgatttctttttttttattagattgttttaggtatttttacatattctctgtatttgggtttttggatttttcgattgtttagccacggactatgtctggttctcctcaatcaaccctttgtgctgttggaaatgtttgtggttgtggacaagggtctagccgtgaaagcccaaaagctcactctcgagtctcatctcctccaaagacttgggatcttctgaacgccgccgccggtgaagtcgctaagatgaggttgaacgaagaagagtacatgttttaccacagcaggggcctcttgggtccacctaggaagccttctccagtggctaatacgccaaaccctgatatcgtttcctatctcaaccagcccatttctcaaaaacaattgcaggtctcacaggtactcactctaatggagctcataccttattattccatttcacaagtctttcgtaacactattactaacccttttcactctgttttagtttcagcaactaaaacaccaacaaatgatgaagcagcagaactcagtgatatggggacccaatactgccactcaggctaagggccccggaaggtaccagatgagccaggcccagccaatggcacaaaacagagctcgaaacaacgagttcaggggggtcactaagaacaaccgacctctggggttgtcaccatctgcatggccttctctacagcaaggtcagagccagccaaacgggtctggcatgagagccgtctttcttggtaatccggttgaaaaaagggaaagcgtaggcaccggtgtcttcttgcctcgtcaagttggggcccaaccagaaacgcgtagaaagcctggtacgacgtcgtttcagttcttcaagattgtagtactacagctgttctcaatttattatgtttgaaatataaacatagataggacccttaaatctagtggttaacatcattgaagggtcagaggaagcatttttattttggtacagggtatttattacacttcccttaatcagattcttatttttttggtcactaatctatatttgtatgtgtttattgtacagcttgtgctacagttttgcttccagctagggttgttcaggccttgaacttgaacttggatgacatggttggccaaccccagcttcatcctcgctacaatggaagatttggcccagaaactggtacataaaacaaacccttatgtacgagtttttattaaattgtttcttatctaatagtgtcgttttttgttaaaattgtcgtttccagatgtgtctttaaggcttcgaagcaacaataatgtcgttcccaataatcatcatcagaggcaacgcaacatgagacctcagcagctacctgtcgtgaaccatgaaatccggctaccccaagattggacttactagggttgaggctatatctactaatttcctattttttttttgttggtattttaggttataatgggtaagaatggaaagaaagaaaaagtaaaggtttagggatatatgttagtatgctatatagtatagtacagtgaaagaaaaataggtctcaagaaagtgaaggaaaaaaaaaaagaaatgaaaagaatcatattggagaaaattggtgaccattttgttcttttgggttaggcttagatgattaataagatgtctttactttgattagcacagccttttggtctcttgggtttatttttttatttttggctgttaaaagaagaagaaagaaggtggtggatttactattgtccctcttttgttttttgtattagggacaatatgagaagtttagggtttctatgttaatcactctgattaagctttttcattgttttttaatatacatgtttttaatattcagttcccaacttgtctctcatccacaccttggccaatgaaatattattaataaataattttttttgattaacgaataaataaaaagtattgtattttcaatttaccttcatgttatctgtgttttaagttaattaaatatgtttagtgatgagattatgtactgacacttccatccatggaagctactactgtgggggaactttaacgcttttatcgagacccggcaagctggatttttgatttgtttaatgtcgtaaatcaaattggtttatttagttttttgtttcatttaattaaggatatttatttaaattctaattgatcttaatttggaaaggtaatttggattgtgaccctttggggacccaacttttttaagtttttaaaactaaacttagagaagaagtattgttgattgtaataaatacatagggaagaaagcttttttggtgtttagttatggaccaaccgcgtgtgctctgcgctttttacacgtgtcggcaagccttatgttatttgcaattcattttatgatatttctttttctttttctttcattattatcctctttagccgtttgtttaaggggttgattaagatttttttattatgaaaattttgtacctaaaaaagtcaccgattgagatgtgcaaactgaattatacatgcatttttcttggaaattatctaaatatcaagacttacgaagaaaatacagagttaaatgcattatgcttataaatttatttatgacaaattttttatttgtatttctgtaagtaattaattataagtatctatgtttttttttctaaaagaaaaaaatgttcttccttgtacttattaactcacgttttgtaatttgatgtacttgttaaaatggaataagttacaagttaattagactaaaatactacgccattttatggtttcttttacatgaatataacgtataaatattttttagggtaaattaccaaaaaataaaaaaatattttttagggtaatataaggaatatagacatggtacgggcttttaaaaaaatggtatgggatatatacctataaaaatgtgatttgaaatgtaaatactttgtactttttaaagaaaaaaaatgtcgatacctactattattatttactcgagcaaacttgcaaaatctaactagttcaaatgccaatccatttgaacatattaaaaaaaatgtcacactgttagttaaattaaccagaaaaagcatcataagaaatttgaagttgaatcaatggagtgatttttacatgttattttttgagcatttcctttggtatgaaatgtgacactagtttaagattagatgatttgctagaataaaagtggttatttggtggttgacagcgttacacactcaccaccaccaccccacgtgcctcgctggaggtcacatggttcgcacgacttttggtcgtgggatattttcacgcgcccactctcctgttctgcgcgtgggacattataggtgaattagttgcaagtggaatggagtggagtggtgggtttgcgtgcgttcctttacgtttttgcgggctttttacgtgctttgacttggtctctccattccctctctctttctctctctctctccgctaatctttcccgctaaaagaagtgtggtatttttgagattttccgaattgatgtgacaattttgcaatattaatattttgttcacttgttacgaagattcattattattaaaaaaatttaacaaaaaaactagacatccgttttcattaaaaaaattaattaaatatttatcttaatatatattttttatgaaattatcctaatataaaatgaccaaattaatcatcttcaaattttagttcttcatttaaaaattttacttttataaatttctactcattgacagttttttatctcaaaaaaaacgtctactcaaacatctttaagcatagatcaataaatgaaa

SEQ ID NO: 185568 - DNA, 4792 bp, Cannabis indica
tgttaactcggtactgattctgaattcatccgtccatcatttcctccattgtgaatgttagatccagacacagccatggatcgtcgagtgaaatccaacaatacttgcctctgttgatcattggtgtgtggaagacttgcacgcaagagttctactggcaattcacgactaatagatcttgctgcatctgctcctatagcagccatattggttgggccctgaacaagaagagactgcatgatactatcgaacttatttacgcaatacttagttaaaaggccaaaaaattcatcaaatgaagcctgccaaagagatcggtttgtcatattatagttgctagcaacatggggatctgtcaatagttcagttgctctctcaagaactgatttcaggattagagaagccccgtctccagaagaactgccaagaggacgaagtggaggctgttcggatgaacaaaccactgctgcaagacaagcactaagagaaccaaggtccatttcacaaatgcatgttgcaacaacctttgcaaggttatctgtagtttctgctgctccaggatcagagggtagtccaccaaacaagaaccgtaagtgacggaatatggccatacaaactattcgcatgagatcaccaccagggaatagaagctgaaggtaccgtgccaaaagtttacgacccttgtgtagagagactaatcttaagaacacaagatcatcctttggaacaggcccaactgtatgactatttttcccaagtggatcaaccaactgaagtgatgcagcaagcccttccaacacagcctgtcgcctacgtctcaattgcgttccactgtcagggagcagattgaattgcaagaagcggtcaatgtcatctacatcaagaagaagacagagcccatcctcaatcgcaactctagcagcaagcattggttcctgctctaagggcttctcagtatccttctgttcagtacccccagagcctgataaagttggactgtccacttcaagaagaggacgaggcctacgaatagaagagaagggaatcctcccaagagcatcaacctgaagaaaagcatgtggttcattattaggtcgtgctcgtggtggaagatccctcaagtggactgggcaaaaatgatgtctcagcttagcgccagaagattttttagcaagactggcctgatggtaataatcatctacatatgggtcattactatgtgttgcagcaagttgcattctgagaataccctcaatttcatcagatgtcatgtacttggatctgtactgtggccacccaacatcattcctatggttattcatatcagaacccatctgaggaaatcgaaagggtctgcctttctgaaccattttcggtctttgatcaccaggaccgagcattgcatcaaatttgcccattaaaggtggggaagggggaagatgaggattaaataattgagactgcattcctgacatatggttaaatgatggctgaactgaatggtgcattctctgttgctgctgctgctgctgctgctgagccattatctgtggaggcattataccattttgatgagacaactgttgctgtaacatactatttaacattccagggtgatctcctggatacatgccagattgattagcccattggttcggcatccggttattattagcagacagaccaggagtaagttgtggcacacttccaccaaaatgagatccatgaggtaacccggccagttgaagctgtgagttagaaaatggcgaaaggtttggtgaagataatcccccctgaggtcctccagcaagatacggcatattcgggtgacctgaatgttgattaggtgatgcttgttgagatctgccacctggtggaggataagaagtgaaggaagatttaggcactggaataggttcactggaaaaatgtggttgatgttgttgttggtgttggtattgctgctgttgctgttgctgctcaggatacgatgaagttctgtacaaagagtttgattctaggaggcgagcagctgaagaaaatggctgtgaagaccaccttttgccttcagacatgctatcactttctatcatctgatggtcattccaattcggaaactcctcttgtgcccattctgtaacagatgagcctgtaaagacaaataatgggatttaagattacagtgcaatgcaatgcactaaaaaacatcaactagaatattttttaccagtttgcttttggtcagaacaaattatacagcacaattagttaaagacaagatatgaaagcaatcgaaaaacattcaatttcttgtgttgttcaaacaaagggccttaaaaatagttattcaacatcttcagaaacacccccgcatataacattagaatatggcaatacttactttctctggatacaacatcaccaactggccccatgtttctcgatccacttaccacctggcaaccaaataagcttttagaacacgcattaacactgcaaaagcctaaagagcataaaaatgcgatgtacacagccaaacaatagagaaaaagtttcatgtgaaaatcaaaattttccctaattgataacggacttaaacccaagacccacccagtcattcagaagataactggaaagtggaaaagccactagattttattaaactttacaataaagattgaaccgtcgatgatcattggtcgcatgatgtacccaatgatcttctaacaaatctaaccatcccaacatagaaatcaataaaagcgattagcaagttattgcaaatggagaatcttacacccaattaagtttaagctacacacacccactaatccaccataaaccatccctcaagaaattgtcaaatatagattaaaccctgtttccagactcgcaataaatgcagctcatcttcaggccttcaataccatcatttcttaagcgtgaaaaatcataacaattaggactttcaattcaatatataagaaaactactacttccccttttcctttccactatgttaagtgtgaagaacatttgtaaattcaaaaacattaaataattaaacatttgaaaacattaattttcaagaattgcctgcattaaaatgctagtgtccacttaactaacctttgaaaatgcacttgctaggctatcaatatcagatagagaccttgagataggagcctgtattgcatataagaaaataacaattagttccatccagctaaattagtaacaataaacataaacgttaacaccacagcagaacagactgaatctcaaacttcttttcgaatgaataaaattcataaacttaaattcaaaggattatttattacctcttctttaccataaagaaactcctcttcctcaaacccagtagcaggcatttccacttcttcatcatctaatccacctaactcaacttcttcaaggacatcatttccaaagaatgcatattgtgaagcatcaaaaacctcacctttattgaaacatattaacaacactagtcaaacaaagatattcaattacaaaaaccaaataccaataaataatcagtttattaagcaaaaccagtgaaagagacaagtatgaagtaaacacaagtcaaaaacaatagtaattcagatccaaatcaatcagcaattcccaaaataataaattctcaacttagcttaataaactccatacatttgaatccattaattattactatttctattccaactatcttaaaagaaaagcttagaaatctcattgaatgaaaatcaaaacaactcaaaaatcagtaagagcaaaaaaacgatttcttcccacctgtggaatcatttcccaattgcttgagatcttgatgattgggagtttgttgaatactactcccacgctcgaacgcttccatatctacacctctctaggctctaagtctaatacttcaaataacatataaaataaaaatcgaacccaaatagcaaaccaaaacccaagaatcaaaacaccactaactctcttccttcctaagtcaaatcagagaaaagtaataaaatctaaaccttttacactaatcagaaacccaaaaccaacaaacgaaagaaagataaaaccttttgtaaacccaaatttctagggttattgttaggatgttataaaagatctgtacagtgattcatgacagaaattttcttaatttttaaaattctagggttggatttgagaagggaaacaaagggaagaagggaaccctaggtagaagataacgattgtctcaattttttaggcttaaaattcaatttattgaaaagagaaggagtgactttgaattgaaatggctttttttttaattttatttaattaatttgtagatttattttctctttctaagacaacaaaaatataataaataaatatttctcaaaaaataaagaaataaatattagtagtagactagttgttatgataaaatataatttttatttttcaaaataaataaataaataatatacccaaataattaaataatgattttagagaacttttttggtttcttttatttttaattttttgggtatttatgtttgatttgttttgtggggatggtggaggtgaagaactattggttgggtggcttttttttggtgtataataataataataataatacataaaaatcacccaaaaggaaaaatagttgaaattttgagaggcatctttgtgactttggcttccctcctttttggtaataattaaaaagattgctacgaggtatttatagtgtttagcattacgataaaat

SEQ ID NO: 185569 - DNA, 5855 bp, Cannabis indica
gacatcacgtatggaatttgtgaaaatagatttagtatacctttctgaaattttcattatattatcttagcaatttgtaagcggggcttcagggttatctgaactcgtttttcttgcaaattcattttcaccgaatgagcttttggctcatattgtcttatttaggtaattaccctggttctgctgtttcgtgtaagtgtgtttaaaagcatgagatggagttgaaagctgatttttttttatactggattttctgtacacacattaatcttgattttttttggatcacgtttcaacatcattagacataaaaaaatattgtatatgtataagagcagatacgatcccttaatatttactgagtacatgaatgatgtggtttactgattgtgttttgctcgttttccttgtacagattgcccttgccgttgcataattgtcttgattggaagtaccaagtatctacaatagctgaagaaaccccctagagacgtgttgatgactgagttttatacgagaatggttgttacttgtaatttacccttcttgagaaaacactgaaaagggctgctagcaaaagtattaattctggactattcatttcttattcttagatgcaaacttctcaaaaacaccagcgcgtaagcgttatccatgggttgtaccacaaacctgtgcaagagattgattcctattgtatgcctcatttccaaattttagataccaatatgttctccgaagttggtagccaaggaaaaagtgtttcctttgagacttgcaacgagaaattctttacccttgactcatccccagcaacaaccgagtttctcaactgtgattctccttctgctgtgagtgtcttgtcaaataggagtccattttcgccacaaggctcccacacatgctcatctgatccacatcattcccctgacatccactctggatcatcatttagtggctgctctggggttgatgatagtagtgatttgaagcacagactcagggagatagaaaaaatgctgggagttgaatctgaaattgttgacagccatttttgcagcttcaaggctgagtcccgccaagctccttccatggccacttggaagatgatggagaataataagatggacttaccgcgcgttttgattgaatgtgcatgtgcggtctccgaatctgaaacaacaagagcaatggaactaatggaggtcttgggaaatatggtttcagtctctggggagccaattcaaagactgggagcatacatgttggaaggattaagagcaaggttggaaagatcagggagtgcaatctacaaatccctcaaatgcaatgaaccaacgagctcagagttactctcatacatgtcgatcctctatcagatagtcccgttttggaggtttgcttatatatctgcaaatgttgtcattcgggaagctatccaatatgaaccgagaatccacataattgatttccaaattgctcagggaagtcaatggatggccttgtttgaggatcttgctcgacggcctggtggtcccccatttgtcagaattacgggtgttgatgattctcaatccgcctttgctcgtggagggggtctgtccttagttgagaagaggctgttgaaacaagcccagtcactcaatgtgccatttgagtttcatggtgcagccatgtgtggcagtgaggtaaagttggagacactgagaattcgaccgggtgaagcaatagtcgttaattgtccatatgtcttgcatcacatggcagatgaaagtgtgagcactgaaaatcacagggaccggttactgaggctaatcaagagcttgtcacccaaggtaatgacccttgttgagcaggaatcaaacactaacacttctccattccttggaaggttcagggagactcttgattattacacagccatgtttgaatcaattgatgtagctcgtcccagggacgataagcagcggatcagtgctgaacaacattgtgtggctcgggacatagtcaacatggttgcttgtgaaggacagcaaagggttgaaaggcacgaacttttcactaaatggtggtcaagattgacaatggccggtttatcaccataccctttgagctcttctgtcacatatgctgtgaaggacctgttgagggaatttaacccgaattttagaacagagcagcgccacggggctctttatcttggctggaagaacagagctatggccacctgttctgcatggagatgaagagggttgaatagaaagatgcagattgtaaattctttttttttttttttttttttgggttttttagtactcatgtcgattagtttttttagaggactagagacggtggtgcgtatagtttttgtagaaacaaaaagattaagttcttttccactactataagagaactatgaatcttgtgtaaaggtcttggagttgggggtgagaaacagttgtccttagtaatgcgaaatagaagaacttcgtttgtattgcctgaaaaaaaaaaaacaaaagttctaaacaaaaaacccttcactatgaatgataccaaggaattgttatgtttatactttataatttatataatcattaaaccttttctttccaggtaaggaacattattttgctttcatatatttccacgaaaaaagaactatcttagaatgaaaggggcaagcggagaagggtagttttgtcatttacgtagtcgcagcaaagcagcgtcgaattcgggcgcgttggtgaaggaagtgccgatttacgtaaaaatagcaccaaatcgaatcgagtcacgtttcgccaactatggaatcataaatttagaattggttaatttctcatttggatgccaaaagtgacagattgccatacattacacttcattcatgattcatcaatttagttgagtttgtttttgccaacgttttttacaatctcctaccatatcgattaaaaaataaattatatatttacatataaaaagcaaaaaaagttaaaaaacagtcacttgctatcccctctcaaaccatgaaatttaaggtaatttctttgattgtaattcaatcttggtttatatgaggtttctctctgtccgtactcttaatttgtgattttgtgatctcataattaacctgatatgttatttaattttggggtgtgaaatgaataaattgcaatagaaaaagggtggagagacagatcagaattaagcgtaatgaaaagagacgaagagagagaacggcgtcgtattcgagacaggcaaagaaggcaatcaatgacattggaacagagagaacgacatctcgctagacgtcgtaagaattatcaactcagaagactcagagctgagactcgaacagtacttgatgataagactactattgctacaatgtcattacaagaatcaacaaccatgatcaactcaaccccagaaaaagattttcaggatgatgatgttgatgatcaagagaaggaaaatctcaattctgaatgcctggattccataagtgaatttctgtgattaacattgtttacttatgttttaaagcttgaaactcattgaccctttaaagattgttcattcattgtttcttgctttaggtggtcttgaaattctggctcataaatctgataatgtaataaagaagatacgattgagtcatgtaagaagccttgctcggtcgttgaatcgtttaggaggtggggttggtggtgatactaaatgtaagtttctttaatgcctaagattttcaataccacccgcactacctaaatatatataaactattagtggagtttgtcaaaaaaatttatgcgcactataacactacacctagtctacttttgaattatgatactttagttgtatgaatctatgtttgttgaataaattatatgagatttgttggattgatagtgcaacttggagttggagacaatgattcaggtagattaactgctggactacgtttgaatcggataaagcgtcttgcaagggagctgaatgtgtctaatactgatactgatggtgaaagccaccaaggtcctgtctttgctttcactaattaattataataataactataataatagatattatagtttgtaaatatttagttgatgatgattctaattttgtcatgttctaggataaaagctttcattatgacaaagaggtgaattttcattgccaaataaagatcaggaatgaatttcttttagctggtccaaatggttttagacaaaagaaaaggaaaaaggtaaatgggaaatggattataatcttcactctttttctatattgttctaactttattgaagcatctgtcccgaaataatatgttatatactaattaattcttaattttataacccttctgtgtattagcagataagtttgactactgtgtctaattataataaaagaactttgtcaaaattaacagcaacgtgacccaaattgctttttatcttgatgaagagggacatgttcatctttactccaccatagaacttctattgtaattttgactctctcctactgatcaaatgtcagtactaaaagaccccattcctttgtgattcaatgctttttgaggcaaaattgattccttattcagctttgcttttatggtcaatggtcatccttaaaactttattctcttacaattgaaacttctgctggcgcacacataaaccaaatgtatgaaaaagcaagttgtattgattcataactaaaaaacattgtgcaatgtgaacttgtgtagaaaaactagtggaaagtttcacgtctttttgtttggtggaagagtcatgttataacgtagttctcttttcataacacaattaactatgttgaatgagtaaatcttaatcagaatttttttcttatatcgatttcgtttgcttttgaagttgcaggttggagaaggctaacctgaattggctgagaaagggcttcttgcatataaatgaaatgaaaactgactggggctctttgacttagagaatattaagggaacaaaatgtatgggttctttgcaataaattcatagtaaaacagaactaggtctaatatcttttatctattgtaagtacgaatacatttctttctttattaataataataatattattatttgattcgtttgagcaaatatttcttcggttgtcatgtattaatttaagatgtaaatccttaactgtggtgattgacatggtaatggtatggtatggagtagtgagcaaagattgtggtctgtgcatgtaaattggttcatcaactaaaaatgtacactaaagattcaaagcagtattaattccagtcatgagattggctaaacctcttaaactagctcaaaccataatctatagttaatgtttcatatttgatattaaagaaataaaaactaatgtttacatcttaagttaattaaccatactactttcgatttctcaatctgtttgtttaatatcttgagatcagtgcattcaagttagctccatttgatatcaaaaactagttataaaaattcgtgtacgtttaatctaggtctgtttaaataggaaacaaccattaatgaaaaataagttctcaaaccgaattaacaattgatgccttaattaataatgcttatttatttaattaatatctataaataaaatgtagagaaaatcataaacaacaagctttcatagctcagttggttagagcacccgtttagtaagcgggaggtcttgagttcaactctcaatgaaagcaatttgtgtttttattttttcaattaattgctaacaggcttaattccaaagtcacgggcctagcccactaaaccacactattctttt

SEQ ID NO: 185570 - DNA, 3553 bp, Cannabis indica
tggcaacggcatatatatatatagtacagcaattaatatatatgtatatggtaatttaaaggtacttaagacatatttgataacaatcaatgatcaataattagcatgaagttgagatgaacttgagtgcaaatatataccatcaactgatatggaaggaaaagttgagttgactcactttgaacttggatatatattgcatctatatatgctagcttttgacgcggcgcatctggttcttatctgcataattgtgtatttcctttgagatttgatgcttaaaggaatagtaaattattgaactaagatatatatatatatatacatatatagcatgttttgtaaagagagttcaagcagattccttgaatctacgatggatctgtttccttctcttcttccttgtgcattcttttctattttttgttttttttttttgttcatgaagatgatccaaaaataaccattattattaaggttggaccacacactttttgcagtattagtaatgtgtataaatatctttattaatttattatatatatttgactgtatgcttccctataccacatacgaaaacggtccaagctatatacatatatatatatttatatatatttataagagacacctaatataatatatatatagtatctgatatttatgttaaaaacgaaaacaaggaatttcattgttttatgtaagaattgcaacataaaacttgaaaccctttctaaattaaaacatggccatccataagagaaaaagggccttcaacaacgattaataatctactaaacttattatgctcttaaagagaaaaaagaaaaagcagcatttgacattgaagcttgagaagaccttcttcgaagtagtcctttctcttatacttcactacctgaaatacaaggattatgtgtatcatatatttgtctatgtgaaacatgtgataaatatgtataatacaattaattattgggattgagattgagatcgagttgagttgagtaagttcataccataatccctttgcgttttgcatttatggcaaatcgtcctgctagcataattgtgttctccacatccaactctgtacaaacacaaaggacattctatattagaaaagagaatcaacctcagcaatctgacatttcaattttttttttatttgaacactatattatatgctgaaaatgttgatatatacatggtttgttttaatataacccgataaatctatacgagtctcattcgattatccttatttgtcaacatcttcatattttcatatattaatattaattagctaggtcattgatagtccatctaactagtgggagcaacatattaagaaatctatatatagcctattatcttaaagtttttatatctgatcagttttaattggatcatcatcatattcatatgacatgatcactagctatatgataatctagagaaagataatgtacaatgcaggctattaataagcttcatattatattagttttctacgatgaatgtgaataggatcactgacctagagcaaaaccagtcaccagatttccagccaggaggagcactgctgttatcagaaccataagcagtcatcatttgggcgccatagccaccaccgtagtcatttttgatggagccacacctgaaacactgggatcggctagcgtagttgtggcttccacagttgcagaaccagtcaccagccaaaacctctgtcctattattgtaacaataggtagaagggtcaggcccaccgtacttggggtactggcaacgctggcattgatccctcttcttgaaattcacatgttggcatgcaccacacatccaatctcctgatccagtccagctcattctctttctctctccttctacatgtcaaaacaaacaaatttatatatgtatatatacaaaaatcagaaaagaatgttttaaatatccttaagtattatagtcatcattccatttttaatataaaattaacaagtttggaaatgagctaactactaataacataaaataatgcatgtgttaacaacaaaaagcacgccgtaatatgatttcataagatcttcatgcatggcactaggaaacaaattttttcaaatacccttaaatcatacactaatttaatttaatctattttttttttttaataaaaaagaaagaaaagaagaaaagagcttgaagcaagtttgaagccagatagaaatgcacaaaataatagaacgaaagatcgaagagttgaaagctcaccgtgtggaaaagtactatagtgatctcgagatcaagagcttggaaaaaataaaagaagaaaactctatctctcttgctagtttagtactacttttctttggtagaggagtaaattgagtgaatgagttggtgatctttgttgtttgggttggaggggtttatataccctcatatgtgggccatgcatgttcctttgtactttatatatttattaaatttccttctctacgggggattctttactcaactagctatagttctctccttttatttatttatgttttattaattggaagggaaggctagtatgtatctctctctctctcgttgtgtgcatgcatatacatacaaattacttcaactacaatcccactcatatcatgacccatgacccatgacccatgcagtcatggccctttccttcccctttttacatgatatattcccttaattatttattatattggaaaaacagtaacactaagtaagaagaaaaaaaaaatatatatattccataatgtctctgaagtataaagatcatcttcgtactgatcattgcattattaatcataatagtgacaaattaacgcgtacatattttttgagtctgtaaaataccttcatacttacagaagctcgaatcagccaaataacatccaataccacggagctaggaaaacccgctagtactatagcacttcaaaattatataatttattcaaaatataagattacataatacttattagatggatatttctatttataactacatttttttgtagaaaatcacgtacaatgcacatgcgcacaagaggcgaagatctacaaaattacatatccaaagccatactatatatattatattacaaattaaaaaggaaaaacactaattaattctaaatattataaactatagtttgtatatcgatctatcgactttttaattttctaaattaattaggtttttataaatatgctctagctagctcaatatgtttcgcccatgcgcacccatgaattctttctatatatgtattgtgtccggtctgtttggttataattattgaagaactgattctattttaattcatttggggtggagccttatgaatttctcaaagatatatataagagttgttattggtttaacacttagctttactttttttttttcttcaattatcatttttctctaaactttatgtggtgatccctttaaaatttttaaaaattcatacaacgatgtagtacatcatttaggtgccgtttggtaata

SEQ ID NO: 185571 - DNA, 3363 bp, Cannabis indica
agagagagagagtgagtgagtatgagaccgatgtatagtactagtagtgcgatcatattcactgttattgattcttgggttctttagctcttttcatttgtgggagacattgcctagtttacttatttcaattagggttaggattttttggttccaatgggaacgtattacgttcatacatcaattatcagtttatcagaaggttttaataattatgtctacacatatcaaactaagttcgaattacattaaattttaatttagtacataaaacacagccacataatgggatgctttccttctaaatcgaaaatcatgtaagttcaagtaacatatgatttgttgctcatagcatagtgaaaagaaaaggtccaaagagctccttcaaagcactaggcaggcactatgcctagtatattattcattaattattattgtgtatcaaaatctactacagtatacaggaaagaggaaatcaacttctttactccaaagatatacaagggaaaaaaaataggaaaagaaaattatcttcgtaatccaaagtttgaatgggaaaaagtagagataaacaagtgcaccttgcagaacgggatgatgggcgtgctgtctttttagttatatttcatttggaccatggtttcaaaatagacaagacaatgatgatagcaataaccagaagcaatataatggcaattatcatgcattttcttgacctcttctgtaagctcttagctgtttgtagagcttctgtacctgaccttacatggtccactgcgtttgtgacctgtgtacatcacgttgaaactcaatataccattgaaaaatgctaatcattatataatccaaagatcaaaaagaaaattaaaaagttttctagattttatgatgcatataagttagtctacaagtaactaaagtagataaattcaattaaagaaaagtgtatcaataaagcttggtaaattcagtgacaatactgatacatagtgcacgactgcattctcatgaaaattcatactggaagcacttgggctagtctcagtgttatgggcctacacatttttggtcctaaactcaaaacaactagcccactgaagacagtggcactgccagcccaatcaattgctgaaaaaaccctctataaaaaagtggtgcaacactatttatcctcatgagtaaattatgaatgatacataatatctgcaccaaacacaaaaaaattacacacagtgacatgattgtgcgtgatgttttggtgcatgatttcggtgtacataatattacgtaaagaaagagtaacagttttttaaaacaattacattactatttttttttttatttttttaaaaaaaaagtgttacatcaccgtgtcatgttttgatgtatattttggatgcaaacatgtaaaacttaaagcacgggcttgacgcttggttgtgaggaacgtttggactgaagctaatgccatcactatatgggtaggaataagtagaaaaattgtcttcttgtaaaaaagacaggttatttgcataggtcttcaacttaacccgaataattgagtgagctttaaacctaacatctactctgataaggggttaaaaggtgagctttccttactctctagcccaaaacagcgaaaaaacttaaatgccaacaaacacgagtataagtatgtacatggtactaagtttcattttttcaaaaaaaaactttcgggtgagttaacattttgggaattttaatttctttctaattgggatgaaaggaaaagaaagtcatttacgtgcataatcatgggcaaacaacattacattgtgtgcttaactcatgtctttatgtacatatacgcaaacatatatggttgaaacccaaaatatagttatccttcacttcatgactttttgaggataattgtgagatatttccaaatctacaagacacaccatcacccaacccataaaccaaacttcacaaaagaaagggtgaaacggtagccaagtaatcacacatgacacttctaatagaggtaaataaaaagcctatcgtttgccaactaaatcccctgtaactttgttactgctaaatatggtcaaaggacaaacactcaagtacccttatcattcttccatggtcggaggacccctacgactgtaatagctattattactaagagaatgataatgacaatgcacatcaattttcaagactttttctggagtttcttagcatttttaagtgcactgttccctctttggagatgatcaactgcgtttctaacctggataacatccccatcaacacacattcacgcaacacacgcaaacccccacatgctaatcacacatataagcaaacctgattctcgatgttatcgatatccgctccttgagcttcaactaggactgccatgtcaatgtagacctgaagaatggggagaaattaagttgtgacagcttactttcaacagttagttagttctaaaattaaaccttttatttcatggtaagcaagttgtacctggtgcaaatcaagaagctttctctctatttctttcactgtgtgatgcctctcctgaatttcttctaaagtgtttagcacctacagaaaaaatgacattggcgagtcagagaaagttccaaattttagtaaaaaattgatgtttcaaagaataacagaacctgtcctcgtcctgattcttgaattgccttctgaaatatttcctcgctgtttccagtttctatgaggttgtcaattgtctaataaagatactaaaattgttactacaataacattcaagtttaaatttaaattctcattaggattttggctcacctcttcatctggtctggtacctgtaactgaacaatcacaatcacacaaaaagaaaaacagcgtgattagtacaaatatgatcaaaccatgacagaattcaactatttttacagattcattaactagtcatatgaatctacaatttcaggggctgtaatttgtagattgagacattcaaacctgtcataacccttctctccacaacctcacgatattcatcttgtattctttgtctgagggtctgaaaataattcactactaagaataaagtggaaaccaagtcatcatagcataagtatagatatacctgaaactcagacattatatccctgaacttttttgtcaaagcactgccatccaaaaactattatacattagccaaacttgtcctaaaacaaaatagcttaatgataaattgttgagaatattaaaaatttcactgtttctgaactttgtcatattcatccttgctctgtcaacacctgttcctttctcacatccaggcttctgtctattaaataagttctg

SEQ ID NO: 185572 - DNA, 1494 bp, Cannabis indica
cttagtgctgcagccaggtatgggattataagcatgaatcaagaagatgaaaagaaattatgactgtcttattatttgatcatacaatacagagtgtatttatagagatacacatttgaaacaacatgtaattagttacaagttagaaactaacagccaagaaggagaaactatgaaaggaaactaactgccgagctaaactaactgtgggaaaattatagctagtggtgtggtgctgaatcaaaacaactaatctttaaacaattaacaatgacaagattaacaaatcacaaacaataatcggagagaacaggatgaacagagtaggaaaactcaaaaaagaataaaacagtaaaacgataaaatcaataccacaatatattttggttcaaattcgatagatcgatgtgatctatagctctactccagtcatctttattgattgagcaagaacatgtacaatacagttgagatcgattctttgatgagttctctcaaagtatttcaactctcatatttttacccaaaaatcttctttatctatagaagattcttcatacaaaacccaaatccaatctctctattttctctgtacttgtctttgtacctctctttctttctcaaacttagagtctcttcttgaaacatgtcaatcaagtgttcaaaaaggttaagtgttggtggtattattaggtttaagataaggatcttaaaatcggtggctgcaagaagcaaggtcgttaagttagttagccaataaccaatttaaccaactctcctttgagcgagatctccacatcaacataagtatgagtgcttttggaagcgaatatgagagcttccaggatcactgactaagtcactcgctgaaagagcttctgaataggataaagttagttggagtcaactatccaaaactcctttctaagaggaacagctagccatctagaaatcctttctaatgaaggctacttttcttgaagacccttcctagaaggactagaaagccttccaagacctactttcgcaatttaacaacttttcaagaatgatttttagagactttttcatttagaggaactataccacattaactaactgattccttgagagggataaatcaaacttacattaatctttcaaattcaaacatttcttttatctcatttttggtattgttgctacaacagcacaagggtatcgaatgagttaggggcagggcgtccggacagagctaagagtgcaatgattgttaccttgaaactttgtggagttctttccttgatattaattttggctttaggattcggacacaacatctgggctggtttattcagtgacagttctgaaatattgaagttgtttgcttccttgactcctttgcttgcaatatccatagtaattgattctctccagggtattctatcaggtaaggattaggaactactcaatttcaatatgttttctacttcaatttcactttttttttttttt

SEQ ID NO: 185573 - DNA, 1412 bp, Cannabis indica
gataattttgtccctattcgatgtaagctggctaaagaggatcattgattgtttagattgaaacaataaatattcataacgtgtttgtatttggtatatatagttgttctatgtaatcaagagtacaattatgaatctataatggagttaagaggaattaataagttaagaaatttattcataaatttctgcttattggaagcttggttacatcgactcatggttcccacactatctgagataatattgctttgtagaatcaattaattaatttatcaaatcaattagaattctaaagaagactgtgtattatttataaatttcattaaggaagggcatatttgagaagaaaagagttataagggtttattagttaattgagacactttgtgagtctaactaataactaattttaaatagtaattggtctaatgattaattataattattaaatagataaaattagcatttaaataatcagaatagaaaaatagtacttttagaaaaagataaagaagtttcatttaatgaaacaaagtggcaaaaaaataaacatgcgggccacaattatgcatgcgtactatcattaataagtcatctagcgccattgtggaccaaatccctaccccacgagattgatctctagatgaggaagacttcttagtattagtccatccaacagagttgaattaagaaaataaatatccttcatgagtttggcaacaagggtttaagctcaaaacgaagatgagcagcttgcttcgccaacatagcttggttaaaaacaaaaacatcacggatccccattccaccatcttctttgtgccaacaaagctttttccaagtgcaccaatgtaattttcttttatccaccctccctccccaacagaaacagacacacaacttgtgaatctcatcaaccaaagtaacaagtaatctggaaaaattcatggaatattaagtagggatagattggataacagatttaataataagctccctaccaccactactacaaaaatggtattttgctttagtttttaagtgacatataaagaatttgcgttagtttgtgtaactaatgctatagccatagacgcaaatagttttattttttgcttcacttagtaaccaatactaaaaggtttttgctttagttcttaaccgaagtaaatagtaatgcaccaacgcaaaatagtttttttactttggttatgaactgaagcaaaagaaaaaaaataatgaactaccaccaccaccacaccccatcagaccaccacaacaccccatcggaccaccacaaaacccaacaacaacaagactaaattctgccccacaataacccatcaaacaaccaaaagcacatcaaaccaccatcacaacctacaaaaataaatcagagagagagcccg

SEQ ID NO: 185574 - DNA, 6715 bp, Cannabis indica
  modified_base (6708)..(6708): a, c, t, g, unknown or other
tcgtttaaactggccatccatccaagtccatagggagtcagttactgaatgggcacacagttgagagagagacctgaatctatcaaaaggggaaatctgggtttcgcagtgtgggaaaggcattgcgtaccacagcaataatattaattaatttaccagatattcgagtgcagtttattgacacagcattgattgattacaatcaacagcccatttgcctgcctctcatacaaattagaagttgcacgaggagtagctgtctgctgataggtgatcgatcaaacacagccagatttaaagtatttaagaacattcaattccttccccctctcacctttttcttttactttctcccaaaatttaaccttcagttgtaagttatcagctatgttagtctctcttttcctcacccccttctatttttccccagaaaaaaaaaaattatttctttcaagttagtggttggctctttagatacatgctgggtggtttcagattttatttctcatctaggaattttggatcggtcttttgtcattataaattggttttcagtgttgattttttttaaattttcggttcccgattggtcaattttcagttctcggccccatcattcccacaatttttcgttggctccctatattgattgggtggggtcgagtgaaacagcggtgattaactactaatggcttaagagatgataattgaaaaaagaagcttggtattgtagtctactactctacaactattgtcaagttttgcggctcctatgatgaaatagttcattttgttatgtgtttgcttggtgggtattcattttgatagtctatactatataccaagtttatgcttaaagatgcaacggttgcataaagtatatatttcatttaatgatatcatttagaataatcatagaatctagcatatcatatgtgaaggaaagtaattctgagatggaacttaaatggacagattcaaattgagttgagataagactcgctttcagctaaacagaaaaagcacatccagacaactgaataacttaaattgatgtagtatttttttatgcaccttgtttctataacaaactaaataaataaaaacaatattatcctttcagaaaagtaaagaagtaagcattattgtaaaccttgctttggagaagaggagagctaatttgttaatgtttcagtcttctataatttaaatttcctcaaaagaagaataaataaagttcattcaaaaataaagtaatattttcatatattaaaatttgagagttgcgaaagagggaagagcatataagtaattgacttaatttttttaatatgacaaaaataaataaataatagggttaatatatataagatatacttttgccatcaatttagttttataataaaaacgaagttaatttatggttaaacagcagagtttggtcaggtctctccctgactcgtgtatgtaaacaaacgcaacctatcaaggaagaaggtaaacccataaatttggatcagggtttggactttggaggttcaccacctggcttcggatttgagcgagtgtgaggaagacagcagcagtagcaacagcatcacttgtcagaagagccagaaatcagaactcagaagtgatgaaggtggttgctttagtaagcggtggcaaggatagctgctacgccatgatgaaatgcatccaatatggtcaccaggtccttccactttcaaatcccctgttatatttcagctactatactctttctttttctttcaaattcattttaacaatcattaccatcaccatcttcttaaactcgactgcccactggaatttgatttctaatatatcttcttctccacctattcatgttgtcatcggttaggttgtggcattggcgaacttgatgccagttgatgattcagttgacgagctcgatagttacatgtatcaaactgtaagctttttatttatttttaaagaagaaaattaatgaatgccccagaactttatttaatgaagaaatatgccagactattgttgacatttgaggctagattggatagatttggttgggtgagtgtgtgtgtttgtgactctgagcttcaattacccgcaaatgtataattaattagctgtttggattggactattgattgcttttatcaggttgggcaccaaataatcgttagctatgctgaatgcatgggacttcccctattcagaaggagaatacaaggatccacaaggcaagcctttatgcagaaacttttggtaaaacctgtatcttatatttcggaaggttccatcgttttcttcacatcgtcttgctatgaaaataattttgaaatagttatatgggaaacagtcacaaaatagtataactagcttcgtggtcagatttcagatgtagaaggatttaagagtaaaatctttttgaataaagttatcttaatgtgatctttgttctcgaataaaggatcttccctacataacaagagcttgcagttttactaggcgttttggtcttctcaaagcattctgtgttctgttatagaatggtgcatgtaaagcttacttttcagtttccaatgaattttgtggacttttcaggcatgagaagcttacctatacaacaaccccaggtgatgaagttgaagatatgttcattttgctaaatgaagtgaagaaacagataccctctgttggtgcagtatcttctggtgccattgcatcagattatcagaggctgcgggtggaaagtgtgtgttcaaggttagggcttgtttccctggcatatttgtggaagcaggatcagtcattgctccttcaagaaatggtaatttgtacttttgtatgtgactttgttgatttaacattgaaagttcttacatctcatgaaatgattttcttttctattacaatcagattgcaagtgagatattggctattactgtgaaggtataatttttaatttcacttgttatttagttatgacttttcttgctatattttggaaagagttcagccgtctattaaacagtatttttttctccttttataggtcgctgcaatggggttggacccgacaaagcacttgggcaaagatttagcttccctgagtccctatctgcataagttgaaagggtatgctatttcccccctttttgagcttagcattgtaatttttttttggctaactatcatccttggcaggttgtatggaattaatgtttgtggtgaaggaggggaatatgaaacattaacacttgattgccctctctttgttgtaagtttcttcctatcccatggatattttattgttccctgcttagttaagaggcttctcttcttcatgatggccgtgagtatgcagtcactataatttattcagaatttttttgtttgtgtaatttgatctgttttaggtaatgacctctgcaactagaggaaatattttcagattgtttatattttgattttgacctcataatacgtctacacttgccatgatgttaccgtttcaaagtttatgttaattgtaattcatttttctgctctaataaatatacatttttgtggttacagaatgctcgaattatgcttgatgagtttcaagttattctgcactcttcagattctattgctccagctgcggtccttcatacattggcttttcatttggaacataagaaatggcagtgttctttgcctggcagtggcgaaactcaagagatctgtctggagaacaagggttctgtctttgaagtggaaggagacagtgcacaagtatgtgatgctgcagtccagtctgccgctgaagtgctagactcaatcactattgcagaaaataagcttcacatttcaagaacacagaaaggtgatacgttttccatttgttgctggttggaacattcagccaattcttcaacaggtaatcaaaggataattggcttgcagtactcagatttgcaagcttctttttgtttcccaggttcattccttatggtcagtgtttctagtctgcaacctaatcattatttgttttctgtatattttggtaggtgtacaagaagatttgacagctgtgctaagacgaatggaattgaaacttgcagaatatggtttcggatgggagaatgtcctctatattcatctctatattgctgatatgaaggaattcacgacggcaaatgaaacatatgtgagatttatcaaacaggagaaatgtcgttttggtgttccatcgcgcagtacaattgaactgcctttattggaagtggggctgggtaatgcatacatggaagttttagtggcaaatgaccatactaaaagagttctacatgtacaaagtatttcctcttgggctcctagttgtattggaccgtatagccaggtgcaaagctgcttgatacttgttactgaattgataattgggattagcaatgtgcttattcttgtttggtcaattatttaattctagagattttctttgcctgctctgatttcatgtttttgtgtgttgataggcaacattgcacaagaatatacttcatatggctgggcagttggggcttgatcctcccacaatgatcctatgtgagggaggcgtcacagctgagttggaaaaggcattagaaaacagtgaagctgtggcaaaatgctttaacagttcgatatctacttcagctattgtatttgtcgtttactgttcagcacgtattccctcatctgagagacatcagatacaagataagctagatgtattccttaagcaaataaggccttcccatttcaacaaagagagcatatctgaagctgtcgatcccatttttctatatatcctagcccctgatctgccaaaaaggtgtgtagttatatatcttatatatttatttatttatttatttatttgtcaactattttttgtacattttcactaaatttgtcttcagaaatttggtcaaattcataatcacatgcacttggcttatgttttacagagcgcttgtggaagttaagcccattctttttattccggaggatattgaagaaacaaatggtactttgaaagacccatcttgcatacggggtcctagttgttggggatttcagcatgaaagctggcatgaccaatgcattaaaaaatgtgttgttcctggagagctatgcacaattattttgtgtgttacaagtgaagttgcaatgaaactcggttctgcaacttcaggtgatgaaaatagaacggactatgacaattatttcacagaggagcagttaagagagatatcaagattttgtatatatcttcttgacagagttattacagaaaatggtttctcttgggaagacattatggtaggtttgctttatacacacttgttaaatctgattattctgactgtcttggtatatatattttgatgtgtaaagtcatgttactatggatgtttgtgtcaaatctttacatcatttaggcttagggagttctttaaaactttggtttaaaatatcagatgcgattgtgagaaagtgaaaactaagttgactctttttaattgcaacaatagactaaacaaaagatcttttgaataaatgtgtcatttgggggaccttttgtaccacacaattttgatctatattttttgagtcagcttcatatttgcattttgtattttctttagacacatttcatattatatatatgtattcatattttccagttttcactgttttttttttgctgctagtatctttattttcatttgtattgttctcatgtaaagtttattttttcagtacttgaggctatattttccaacaagccttcatgtacccctggagaaattgtccttcatgttcaccaatgcattcactgaacttgctgcaatggatcagacactgaaaattgacaacgagcccatcttcaaccttgtccctgttgtgggcgcagggaactctgccacatccatggatgatatattcacctgtgaactaatggctaggagattatgagtatgatttcttctcttgaagagtccttattttttaattttcctatcactgattcataagctttaagaatttgaggggaaactgaagatttgaaatcctttaaagatagcagtctctttcttgacccccttccacctttaatgactctctgcaatggcttcatggaatgatcaattcaggacaggtttttctaggtaaacgacttgccatctaggcatggctcttaactatcagctctttttattatttttttttctttttaattcttattattgtgtaatctattatctgttagcatgttgcaccattaatctttttgatgttgtaaaatctttgtgcttgagctgtaagttcatgtctttatagatcaacaagattatgttgaactagttagcaaggaaaaaaaaaaatctagagaaagagagagttgcagacaattttggataagctgttaactcaggtgtacttgagtgaaagtaaaccgtcaaaatgaaatgatcacacagaacattatgatatgatctcacaactagacaaatactttttcatttttattgtttgtcaaacaccatgcacagacattttaagaggggctttgttaacttgccacctttggaccatactaatgtgattgctaaatgtcatatccttcttaatcaaatgttgaattcagctttatctcaaaaaaaaaanaaaataa

SEQ ID NO: 185575 - DNA, 6116 bp, Cannabis indica
aaaaaaaaaaaaaaaaacaatatatcacccattttcatctccaacagacgctattaagtgaattttgaaaacaaaaaaatcatttcaaatgtgaaatataaaccataattttgaaatttgtgacggttccaatacattttcagttttatatagcctccacaaacctaaaaaataacttaatttctttaatgttatgatccttaaatttgtatgaaagtaggactgggaagacgcaagcaatcatcttcatatctatcgtagcttaccagtaccataacacgaaaacttccactcaactttataaatggtgtaaattaaagtattacttaccatcttcctttgacatttgtatttgtagctggcacacatacaaagattgaagataacgactatctgcattcctcaaacgaattgatcaacgcaatattcacttttctagccgaaaaaagaataagaaaagaagaagatatgaaaacggcctacgtgtccaaattgagatacatgcgtgtgagatttcactcagttttataatatacataaatgaagacacccttatgttaaagtaactcgttcgagatgatatctattcgctttagaattgatacatcattaaataaggaggtgaaactgaaaagtaaataattaccttttttaacaagtgcatgaattattgtaaatgctctgtctgtcataacaaatcaccacactaaaccctttcttctcctgaacctgtcaacacggtcagtactcatcctagatttttcgggcttgattggttttttagacttatcaagtcgactatctaaactgtttctagaaatttctggaagctccgtagccaactcaagtgtgtccgaacctccagcttcagatggttttttctgactctcagattctacaccatttttcttcgaactacttgcactcggttttgatttgccaagcgtctgtacaaatttctttagatgttttatgaattctgggtatagttcaagattgcagtgcccacctccactaatccagagcggttcatatttttcattacatagctcccaaaggttcttcccatgggacaaatccacaacttcatctgatgtcccctggacacgcaacaaaacaaatgtttatcctcatttcaaaaaatatatttattgacaagaaaaattaagaacacagcagaaccaaagaaactactgaagtttaacttgtatcaaccgaagacagctgtagaaagagccagaaaaatttaaatcaattacagctctatattatttcaggtggggtacattgatcatcttgagctactgaataaacatgggagaacctctttccttcaaagcttcatgagttttttcatttcattttaacttttagacagtttgaacctcaaaaacatttattattgaaatgagatttgtacttcacatagatctaactatctcaggtgtatcggccgttcaggttgtttatttaataaatcatgtcaattccaacgctacctgtcacagcccattatctagaaattaaaagcatctgatttcattgtttggtagggattaggcaatgttggatattgaatccataattttaaccaaatttcaatatctccaaagtcaagaagatctagtaagagaaaaatgtccactacagaaggtagggtagtcaatccataaataaactttcttaaatttttctctcataccaaacaagtaacacaattctcgttttctctcctttccacactaaacacaacaagagaagagcactaaggcccatctccccattctctcttgttttatacctctctttttatagttttttctctttcgtcctaccaaacacacacgaactaagttagcaagtgacgttaaagtttacagggatctcacaccaaagacaatgaagtactttccacccataggacaactttaagctcaaattatgcacaagcacttaagggaagagagagaatgataggacattaatgctcatctacagaatcaatagaagaatggaaatcacaagttaaaattgcttgtcttttcctccactcttaatacatttttatttttttgtcttttccttctattttatgattttgttttatttttgattaatttattaataaattatactaaataattttttcacttattattttcctccacttgtacattctgattttttgtttttttcctctattttatgacttagtttaatttttgatataattaattaataagtgttataataaataatttttcctatcattttataatgttactccatttttataattttatattttttataaataaattaataaatagattatagcaaataaatcataataatatatatgcatatgggaaaatataatattttaagaaaaaaattaataatttacatgaaaaacaataataagtaggaaatattttctctagaacaataaaaatggattgtgtgcctatggcacacatacatctggtagtatatatatacacataaatgtgacagaaaatgatacttacatgtatgaccagaacagggcagttcaccataccaattttgtcaatattctgagggaaggacaaaaagaaaataaagaaataaataaaaagcttgcacacaaatgaaagatataaaatccaaaaagccttaaaacaccttaccttgtaaatatcaaaccagtaagtccgcttaacagggtacagcaccctcagccctgacaaatagggctatgtaaaaccacacctctcaaggttggtattcgtgatgcaagatcaactgtgggaccactaccaacagattgaccatatagtatcaattgttcatctttaactccatacttctccttgaggcatttataagctgcatcaatgtctgcataggtgttatattccgttggctgtttcaaaaagacaggatgattacaacatattgagtaaatgtcaaacgaacaagctgtcaatgcatcaaaattgaacacaagttctttggcaagcctcagataagttaactaaaatgcatcacacacaaaaaggacaagaaaatatgcatattcttgatttgagaagcaagaacgttccagtacataaaatccatgtaaatgtggcattcagtgtaacagactccaacaacacaagtttcagctttttgaaacatccaatggaacaaattgattatcttcaatgacaactaaaaaaaaatgcaaagtttaatttgcatatgtcaatacatttcccatacaaaagtgtacgaccaaattatttcaagttaaaagtggtatgatgatggtgaaaccactgctctattattgctgtgagcatgatatgcctgccctatttctaacgtttgatcataatccaaagaaccctaatcacacccaacattcccaaactttggaacagatgagaattttgttgttgttgttgttgttgttattgttgtttattttatttgtttatttatatttttgaggaaaacagtaacataataataaacattaaatcaggtttttgagcacctatcccatgtggcacttagattgtaatgttgaaagattgaactacaagaatgtgttaaaaattgaaatatattgccaggatgaagatgataaaaagaaattctttagttatgagattctcaatgttagcaaactagaatttagaagataaggcatctaacctttccagttgattgtccatagccagagtagtcatacctgcaaacaccatgttaacgaagacaatgaaattgatccaactaaatgaatatggtaaattctttgaaagcagacggtacaacacagaatataattacgttccagccacgagataccattcagtctaagagttgactagatacaaagagtactcataggacgagcacctttaaatgagcaatcttctataaaaagaaaaaataaaggtttgacgaggcaattgcaccaagtgttaagaatgtggtagcgtcattaacataagactatcataaataaagttcacctttattcggtaataaaagcctctaagcaccaaagagagaagcatatatgagtcaaactagaccaacctagccccaacttaattctgttcattgaacaatgtatgtctagcccaaacctcacagtggtggaattccttaaaccccaaattgatcatttatctccaagaaattcaccaagaaaatgtccttcagtcagaaacagaatgaagaatggactttggccagtgaagtgatggaacaatatataaaagcttaaaatcaataattagtatgcaatttgcaacccacattccttatgcattcttgtgatctatcatagacataactgacatgtaaatatgtcttttagtaacctatcatagaaccctatcctctgctacatagaggtacgtgccatctcatagtaccccttaacagttttgatggaacaatttagtcatttcgtggcagcaatctcacatgtacagttctatgctcatggaaagtttttcaaacgacattttgttcagcacagagctgttaatggtacctgacacgacgcattcagttctcctttttgaaatccctcacgtactgaattccaagccatctaagttattaacacatgctaattggctttcagacgaatttagtaccgatcacctttcaccatcttgatactttccacccatcttcctttctcagaaaagagaattgaccagtggccaccactcactgtacacttcacataaagaactaaagcttcaattgtctctaatgggagatcctgatgctaaatccattatagtctaaaaactaaagaaagaaacaattttctgcttatagcttaaatcaccacagatttccacagatccttgcaattaaaaagaacagtgctaaaatactctcaaccagtacatttaatatacacaaactccaaaaggttatagcaactaccttgcagatgaaaactactcaaaacccagaagcaaaaaatatatatattttagtaaaagtagtatgactggaactcaaataccttgacacatcaagtttggaaaggagcactcaccccataaggttaacgcgaagccgagcactcaattcgacgaagagctcaaacatctggcccaggtcagcggcatttccatgagaatagagcaaagtagacgaagcccgcgggtgcttgacatgaacggccacgatttcattccctctacgggtcttgagcttgagaacgtccacgtcatccctcctggcaacttcgggaatgtaaagcttgtcaccggcggaatcctcggcgatcaccgtgtaagagggcgggttcggcgggaagaaagcgaatttggcggcgattgacgatgtgactccgcccatcttcttctcatcagaagctctgaactcataaaggccctcagcccccaccacgacactcccaacttcctcttgttctctcctctccccctcttttagatccgaaatcctaagagagagagaaagtaggagagagaattttgtttggatttcaggaaaataaagaaagagaaagtggggaaagggagctaaaaaagagggaaagtggagagaaagaagacaaaagtttagaagaagagagaagtggtggcgcgtggagaagaggtggaggcgcgtggagaaagtcaaaattgagttaaggataagaaggaggaatcacatcactcacggtctgattcaattcaacgttgaaggaggagagagaagatttttagtattccctgacgacggcgactttatatgatttgctgcctatttctactctgttggatgctatttctctacattgccaccacgtgggctgcgggatgtgggattttatttatttatttatttattttaagaaaataataatggacaaacaacatttatgtattttttttgtcaagaaaaagattcataatatcaaattcgttacaataatattttttaaaaaaattaccaacaatttaactgccatatctattcttatcttgcttcaggtgatttgtgttgactagaatcttttaggtgtgttttaatgaagtttgttattaaggattgcactagggccattactcacagattttaaagttggaaggaaattaatgattttg

SEQ ID NO: 185576 - DNA, 1042 bp, Cannabis indica
aaaaaaaaaaaaataacaaaaaggattgtgtgattgtggaatagtactacccacgtttctttctttttatatatattttaaaatttattgaattttttttatcaagagaattcattaatcaatacccacaaattacatatcaaatcctgggtatattctttcaaaccaaccatttttataaattcttaacacattccacaatttatttctccatttttgaacaatttagaaaacttaacaaataaaacttttgtcttaatattctctttcacaagtagatcaatacaataataaagtgacatgcattgttatctccaaacacagcaccccgccattgctgtatagaagacattgttcaaaaagttcttattagacttatcgtaattcaaccactcaatttattcattataaacattagaccataacatgattcttagccattgacaagtatattgaaattaattcaaatattatacatgttaaggaagtcgattttctaactgatcatttataccgactactcgtgtaatttttataatatatagtgaattgaaatttttcataaattgttgattttaattaaaaatatatcattatactttcttagttgttagaaaaactatttttagtaataaattttatcttcaaatatttttaactaagaatttgagaaatgtactctttcactcccatttcccatttaagtcttttctataattaatattattaaacaatatatgtcttattaattcatcttatctttcgtacttaaagtctacatcttttaccaaatattgtgtctctagctaaaagaagatatgcacatggttatgattaaaaggtatataatattttaatatgacatgccaccacttaatggatatatgtgaattgtgaagcttatatatatatataattaatgaggaagagtaaataatgttcctcttagcaaaaggaaaatgctatattctcatttaattatttgagatatatatggacaatatggtgtgaatagtaatgttatccagatttccagtaacta

SEQ ID NO: 185577 - DNA, 729 bp, Cannabis indica
ccccttccaatgaccccccatttgatcaatgaaggttggcttgtgaacatatgtttcagagagaaccgtgacaaacaggatatggcttggagattgaagtggaggaggctcaacatgttcagagaaagcaaaaacagatgattcttcctctgttaaggataaagtggaatggattgagtgagagagggagtccattatggtgaaaagtgtgatgatcgagatagaaggaaggagtggcagatgaagattgtgaagagaaaacccagaaaacggttagagattcatgtatacagaagagggaaaatttgaaattgaaaaggtagttaaaattccaaaagttagttaaaaaacacaactgctacagacctcacacaaggcacttttcttggcatcgtaacgaaacctcttttagaagtgtaatatagatatttctcaaaagaaaaatattaagtattattgtgctgacatattgccaaaaaaaaaaactatgttagatatatttatttgtgctgaataacatgatttaaaatttattaaatacaattacatccttttaaaaagtgataaatatgtatatttaaaagagtaatattataatttaattaattaatttttctcaatttcacattcaattatcaaataccagcatttctcttcctctccatcttctctaagctttccatctatctatttttcttttttctttttttttttttaagttaaaaaacg

SEQ ID NO: 185578 - DNA, 3877 bp, Cannabis indica
tcatcatatcgtgtcacgaattgtaacgctactacaaagtgtactgcaccgctacagtagcattaaaatcagtccaaaattaatgtcactacattgcacaatagagtgtgaattgggcagcttgtgtagttgagcaaatattttgcgcagatgaggccctgtgtaatttatatcatggggatataaatatactcttcaaactttcaacggtgatagtaaattatggctaccaatattatcactacacattttaaacagaacatattcaaaacatttgactatcaacataacctaaacaagtgaatttaatgagagattttttcatttttacacttcaaaatatttttttttcatttttacgaaattctatataaaaactcttattacaactaacactgcaatctaaatcgcaataaaaaatcgtatagaaacttctattgcaactagcactgcaaccactttaaaaactctaaccgtaaatttgaaaaaagaaaaaaattaaaaaacagtatattgaaataattcctcatttaataaattacaaaacatgtaattagaaatttaggttcaaagttatacaaacagaataatcaagggtcattattaatataaccgtgtgattcaaataatttctgtaacaatccaagcgaaacagaatcactaaacaggctttaattgtttgtccccgatcgtacaattgtgccaatggtggcatttaatcgttttttttcacactttgtaaaattatttttttagaaatcatgaaatatatatatatatggttctattgtataatttgaccaaaagaatcagtgtgagtgtgagaatcttctgcaggttaattcgtatagcatctgtggaaagcctttggcttcctcctctgggagcttcaagaggcttgcaactttggaaaatgcagcatgttgtctagcataagaatggtcttcttttacgtctttgtaattcatttcttgtttagtgatcttgggctttgtcaaggcccattgcatggcccatatggccaatggacgcatgtagcagagagatctgtatcggtcatctacgttccaactttccggagtctgaaatgagtatctgcaaccaaaaatcatttgataaaattggggtcaactgacttggacagcatgaacgtgagtcatatacacaaaatatggtagatgtgaaaatgggttcaagtcccggattgctgcttaaagaggaagaaataaagtctctagctgcttagctaaagagaaaactaataagatgcaagcaaatttgtaaattgagatgtggactcctgtggacttgggtataaataaatatatggtaattctcctcatttttaaagtgtcgttttcttaatttaacacctaatgaaattactaacccaaggccttgttgagaccaggctgcttggtgaacaccggctgcagtcttgaatgccatttcaaccattccctcctgaatcatcgtagcagcaacagaatacgttacgccagcccatatttcctttgattgcatagccgacttgtcaactcttccgtcaggcagcattccgttcacagctccacgtgaacctcctttcatttttagcacattgaaactgtaaactttctcaagtgcaagcttcactttgtcttcatcaacaattggcgaaagaccacacacttcggcatacctatacgagtataaaacgagtatcagcatgaaaagtgcatatccaaaatccatatatatgacacaaaatctaagtaaatttctggttgaaaataaaaattgtgaacagtaagtgttccacctaatagtttactgattctcttgtgatcaaaatcaaatcaagaagtgaaatcataacaatgcaaacttagggccgccatagttttataatctttccagaaattgatacgtataattataaggtcttaggaggtggtaagcaaacacacttgtctttttttaactgaatacttaccattgtccagccaactgatcagcctgaatagacgaacttgaactaccattgctattatcataattgaagtaggaaccattccataaagtgtcatagacacctcttgccttttgatatctaatccaaaagtagtttgcagatgcttcatctccaacctcatgagccatggccgaagcagcctggagagcggccacccacaggccaccacagtatgcactaacaccagtaacagaccatgcatcatatgtctgatcaggaaacccttcattctcaatcattccatctccatccttgtcaaattgatccatgaaagccattgccatgtagaccgagggccaaacagctttggcaaaacttttgtcaccagtagcaaccacatccctgtaaacttggagaacaaactttgagtttaagtctttccatctgtctgtgttaaacaaattgtaagcatttaactcaaaccaaggatcgtttaatcctatatcgtgtggaacagcaccaatagcttttcgtggaaccattttcccatcactcatgatcttcatacggctaggatcatgcatcattacagctgctgcaaagtctctctggatggttagttcaagttttggaaatagcattagtagagaaaaagatgaataaaaatggacatcataggtattccacattatgtattcttgtccttcaagataaaggaattgtcctatattttcttcttcatcattgagcaaatatgctccgaaagcagaatttttcatagcaggaccatgtatttgctcaaggacagatgtcatcctttcaaggatttcaacagcagtatcattgttacgggacatgtctatggtgtctttggcaattactttgggacttctaagggagaattttgtttctccaacagttgatatacgttgcaatgcatgcgatccatctgcaaagagaaaagtgttaggccttaggataaataaaaagggtatatgggtcactgtaatagggggtattgggagagtatatatataggagactctaagaagggttttagggggaatgattttagttaagtgagctcttagctcttgggagagagctgggtctcaaatacccagcaacattgtcatcctctttttctatatcaatatacaactcactattttcctataattgctattgttatactaaattgatagaaaattcctatcaaaaagttgccgtttcataaatagagtggaaccagatatttctcctcccaagaggtatttgaattccgtaaatacctgtccaaattgtccctcctgcattgagataatagagctcgttgaaaagagtgattggatacctgcggagacactttcaccgtttaaattttttccaaaaagctgcatctatttactttactataatataaatcatatatttgatcaagtaccattcaggaacccttttgtcttcaagaataggtctttgccattcttctatttgagattcccaatcagcatgctctgttttagaagtagaaaatcaattgtgtgatttgtcagttcacaagttacaaactgcaaaatcttctgtttagttcaatgaaaattgtcagaaaattgtctatcctatataaatatgttcatgtattattttcttaaataataaaacaaagttgcgcaagtagtactaccaaggatggcatcgcgggcaatattggcagctgcatcaccatgagaaccataaaattttgtgtaccgcctaccatttaagcttatgttagcaaattttataactaaacacaagcaatgaggtatactctttagtcagactgaagtgactagagattgagatatctacctatgataagttttctctatgaatctcacttctgggcagtcccatgccaatgaaaatgtcacagagcgt

SEQ ID NO: 185579 - DNA, 1229 bp, Cannabis indica
tgcagtgtctgtacacataatggattctttttacaaaaatgatgtgccaaaactatatataaacataactcaacaaagaatgtcctgtgtatgttttttttgttgttgaaataaaactctacatactaaaaagctctgctgcaagctcatcaaacaacaatctctgaatttccataacaataacataaatctcatctcctaaatctatctttcctaactcacttcctatcactatttcttttgagttcttggccttgtcatactccttttcattgccaacaagtagcttcaagagatcttccatggcatcacgaatggggctcaaccttcttgacacagacatttcacatgttggctcaccaatgcagggcaggataatctccacaagccctgcgtttatgctgtcaaataaaagtagtctatctgatctcttccaagacatttgatcaccatacttcttttctaaggtctcaaacactgagacacttattggaaattctagagaatcccagctactaaattcttcaatgttctttccaagaagatttacctcttttagcaattcgataagataagagatgttcctactctcttcaactttaaaatctttcattaaagcatcattctcagtttcatcatcacttgagatcaccatgctagattcttctttgtaccatgtttttgattttggaagttgatgttgtctcttcaagtctaggacaaagaagaaatgagatgtttaagaactaaaatcaaaaccaatcttaatagtgatgttatctagttagcttaccacaaatgtcacccttgactcttcccaggctttcagagctaaatggcagttccagcacagaaattggactaggctgataaggttcctcaaaactcatcacagaatctggttcaatgctggagcaatgtgaaaaaacagaactttcctcttggaatccagttgatgaatcctgcaattgcataaccatttttaaaagtgtcataaatttatgaaacattaatatgtatactatgaactatcaaaatttcaagaaataattatcgtgtatcaataactatatagtctacataatgcatcagaaaaagtacaacttcaaggcactcaaaatagatatgagaaatttgaattagaaaacaactaaaatacaaattaagcacggtaaccaattgtaaagaaaataaaataagacaacaaaggaattttcataaaatggtac

SEQ ID NO: 185580 - DNA, 4098 bp, Cannabis indica
tataactagatgtcctgtggttctgtttctttatttagtatgtacttgaatattttgcaggacttgcgtttcctcctctttacttctacaatggtggagtcaaggagttccttgcaacgataaagcaacatgtttttattgtgaggttggttgttcttcattggattttgttatctttttccattacttgtctataaactgaaaactgtatttgtattgccaacaaatcttggttaaaataaacgaattagtggaattgcatcttacactaacacattccatgccaagaaatcgtaccttcatgcttctatttggttttgtcctcaagacctcttatcaatttctaaaaatggtatttctttccaaaaagagatctttctccaattttatttttatttttaaatttttatagaaacaaaaaggttcttgagagtagacaaaaatatctttcatggcatggcatggcatgaaggcaaggacatgggttcatcaaaagtatttgtttaattttaatcttcaaattcttgcttgtgctgagtgaaaaagaaatcgtcatttcaaaaaattatttttctagctagatgctcatacagaaaaataaaaagaaaaatgaagaccattaataaagcatgggatggagatatgttatcttacattaaaaatagtaagatattattattactcttatctattttgccacaactaagaatccatccttctcaacaactttgattaatggcaaaacaacagtccatcagcacaacaaagcactaataaagataaagatgaatgatcaatgtctaataccatgttgagaaacaagccctgtgcttgacctttgatcaggaaagagattgaactgaagtgacatcataatcattttcattccacccatttgtcatgaaatcctagctctaacattttgtttaccaattatttgatatctgatagtttttatcaatataagtcgtctttcttttaataactctgaaagatttcacttgctatgtccctcagtctctttattttttccattagaagaactgtattgtctagtgaagtattgtgttagttatggagactttgaagtaggcaacataatatatcttacaacctcaaatttgaggtctgccacagaaaaagtcgaggaacttctgcaagttttaaccttttagaaagtatacacattatgagtccaatattgtttaatgaactcttcagtattcttaagttttctcacccaaccagatggactcaaatataagcctgcacccatatggcaatcttaatggaatatggctgccccccaacttggattgatcatcacccaatccaatctctccgttacagtatgttccttgttttttttttattttacccaggtgtctatcaccattaaattccatttggagctaagttgcaaatatttagaaatatctacacgaagtgctccaccatcacatctttggtagataagtttaaacttaataatggttgtgtcttcggttatgttgttcaggggcaccatcaaatgaatgataaaggctaaaatggaagtgtttgtatgtttgattttattcaaaatgataagactgatccacaattcttccacgaaagcattaaacctcgactaagagtctgtataacctgtgctgaaaatgaagtaaagttttagttaggagcatgttgttgcaccaacaaggggaaaatggtggaatactgaggggtccttaaacccctacgcatggcatttatggtccttggtggtttttctaagtaacacctgtttcagaggcagattgaagcagaagaacctttttcagttttctacccatttcaacacttttcagggttggtggcctgcttcaataagttggcactttaaacttctaacatgcttttaagagtagccagagagctattgtcaaatgattccatctttaacaactgaagcctcctttaccattagcctctacttttcctagtggtataaacagaaaagagggaaaaaggacttgtggatgctgatagaaattgagtagtgattgtaaatagaataataatatgagtggatcgataaattgaaaaaacaatacaaaaacagaaggacaaaactatactgtacagtcccatgaagacaacaaaaaaagttaatgatattcttgtgtttaccagtaaaaacaaaatgaaatatggattaccagtaaaaacaattccgaatataatatttaatcaattaaaatgcttactattgaagaaggaacaaagacctctgactgtggaatgcaccatatatatttatatctttgagaaacagctttattgagctttgttatgcacaaacattgatttacatgccatttattttaagtttttgttgtatgatgtctccaggtcagcagaagatgcaaatgtgttccttattaatgattttcaaaatcctctccaggtatgctttattaatatgcttgatggaagcttgttatcagaattaacctgttccgtggcttatgcaagtgaaaccatgtgaaacagtgaaaggatcataaatgtctttttttggaaatatttttctcacaaatgattctcacctttatccttataaatagataggaaagagagaaggccttcaaaattgatgaaaactgtgtagatatagtttacatgtggtgctggataacatgccatttcctatgcatttccacttctgatattttatcttgacaactttcactaattaattgatgcatttcctatgcgatttttttggcatatgagaatggaacactttttggcttttgtatggaaaaaatctggcttactatttgtttatttacttttaacataaaaaaatgatatattgaactgaaatgcaatcttcataacatactgaggtttactgatgtgttgattctacagagaactttgtcatctttggagcttcctagggctgtttccgttgttagtgatcaatctgtatccattgatgttggcgagtctcccttagatgaaagtcaggagagttccagcagaaatgtccgtgatggaagattaagtacattacagtacaacggaagaacaaggctgaaaccccaggatcctgctcgagatctctctattcatgtattggaaaaattctctcttgtgaccaaatttgctcgggaaacaacttcacaaatttttggtgagactcataataatgggtttggtgctattgaaaagagaaggtataaccatcaatcttccatcgaccatcctgagaaggcatccaattctgcagagaaggcacctgaattagttcctgtagctgcagatcctctggaggtatccttcgttttatataatcagcatttacatgttttggataagtgatgattaattatatgatgtttaattgtgaaaaattgaatcaagagcgttgttttccctgatttccttagtttaccttgctcttgatgtttgataaattccaaaggtaaagaaagatcccatttatatctacatgaaaggagaacatcttgtaggtttctttttaacttatttttggtccaatttctccaaatttgactagtacgtattaaaagtctaaaattcaaaattttaaaaagcataatgtgtaatgaatgtgacaagaattgctacaccattaaaacaaaaaaggaattgctgcaatgctatctctcatttcttactttaaaccctttacttcttctggttggctctcatctcctattagacttgcatgctcaacttgtaattctggcttgatggatcatcaattaatgcgctaatcctaattatagcttcttagactgtcttatgttcttatagtcattgttattactttgaagaaactgaaatcttcctttagctgagatttacttttttttgaatgtcatactatgttgtttacaatgcttttattttatttacctactctgctaatgttacagtacactattttgttggttctcatttgttgtcactctggttgacaacaaataatacagtggatatctatagttgcagtggtcaaatcctatttctagacagctttgtaattattgtgggtatctggcggtcaagcttctgtcacaa

SEQ ID NO: 185581 - DNA, 3775 bp, Cannabis indica
tataatataatttgggatctgacacattttaatttaattattggagaattgccaagaagtattactggtgcttagtacattcatcggtgtcataccgctatctattgatgtaattaaatataataatttttagagaatatcattaatcaatcgtagggtaccatctatagaaaatgttaaacaccattgatactaatataagaatactctaattattaatataaaaaattactaataaatcataataggaaatatatatgtgatgttgggcacctcaaatactctatatttaagtgagttcatatgatgatttcaaaaaagaaaaagagctgaggtcacatgccaaaactggtcacacgtcttttaatatgatttcctcttgtaagtgcatcttcaatgatactctttattttttttagttatgttagagagtttcacattgtcactcaaaaaaaaaatagtttcacattgttttgagataaaagagtttcacattgttaatgtgtgggaaagatatagaatatataagaggaatggactactccttccattgccaattagttttgagatagaatcctattcaccttatcccaaattttaacatggtatgagcaaaaacaaataaacaaaaaacctctaatgactatccgaccccaccaaaaaaaaaacccaattgaaatagaggcaaaaaaaagagctactaaaaatctaaaaataattgatctaagagccaaagtcaaaaaaagtcacttgtcactacaagaaatgtcacttttaccaacacagttcgctactgcgctggtataagtaacttttcccaacgtatttcgcaaactgcgctggcaaagagatcaaagttttaccagcgtacatttacaatggctaaaatttaacttttaccagcacatttacgccctgggaaaaatcttttttgccagctcttttcattttatgctggcaaaagttctaataccaacattgatttaccaaccccttttgccaacacatcataggtaaattctattttacaagcgcaataccaacttttgccagcacaaaaatgtactggaaaaagtgacatttcttgtagtgtgtaattcgaggatattgagccaaaaaaaataagagccacaaattcaaaaaaaccgaaccaaattaaaagcaaagcaaaagactcacttgtgatcagggataataagttcaaaaaataaagtcgcttatgatcgagttatggtgagcaaataaaatagctaccattttgagaggatgttagagagtccacattgttaatgtgtagaaagataatagaacatataagagcaatgaactactccttccattgcatatagaaaccagataaactcaaacactagattattttaaaaaaaaacaaaaagctaaaaaataatatttaaaataattttcctaataaataataaaataattattatttttactttctcaattttttacactaaaattaataacagaatgaatgaaaatttataaatagatgtaaattaaatagtaaaagatacttgtataatttatatctatttatcaactataatagaccatattacttacattatgtgtaactataaatagatagtctcttatatcaaaaaagttcacccaattactaaattattcattcacaactgaatcaaaaatcagtaaacaataattgcaagatatatacagagagagagagaattaatatataaatataatgtgtacattaccaatgtttgtggtattgaaatctaaattcaacggtaaatacttgagaaggataagtgaggaatatggtatcgaaaaggaactgccgcaaacgtttctgaattttcttggagatgacattacgagtcctgtggtgaaatttgaattggagagagccaagaaagatgctgaaggggtgcacatacgttgttgccataacaacaaatacttggctccaaatggttcggggtgggtctttgcctcggctgaccaccccgacgaggaagagggtgatcaaaataccctcttcaagcttgtcaaaactcaaattgatgaacaagaatatttcaaaattcaacatgttgggttaaagtattttgctcaaatcttggtcacagacaacaatcacagttctggtttgttcatgtgtcctaaagagatacctcatccaaacgatgctttcaaagtcttggattgggattcgcttgtcatatttccgaaaaatgttgccttgagaagcaacctcaacaaccaaaaatatgttagcccgcgtgtgttcaacacctacccttttcttcagttcgatgctgaggagatcgctgatcagacggtagtaaacgagatctccacctttagtgatggttttgttcgcataaagaacctttccactaaaaattactggaggcgcggcgacggcgattggatctacaacgaccatcccgaggccaaggacgatgacttaggttatttattttggccaatcaaactaggtgacaatattgtcgctctaaaaaatatgggaagcagctacttttgtgagaagtttagtgagggagacgtcgagtcctgtgttaaggctggggcgaaaagtattactaatgaagccaaattgtgtgtgtcaagcagttccatgttaaggagtatctacggcatcctttttcgagaagaagacggaagagtatacaatctcaacaaagtgtacatagatgagatagtggcggataatcctgaggacatagagaatactttaaccattaagttttcgtacaagaaaaaaagctctagtaatttcaccaacagcgtttccttcaagctagatgtgaaaccaacccttcatatcgacgcaattccagtcatcgtcgatggaaagatcgaaatatcagctgacgttggagggaatattgagtgggagaaaccagacacagtggaaactttaaccaaggctaccttcactgctaaggctcctcctaataccacaacaaaattcactcttgtagcgattcaaggaacatgtgaagttcctttctcttatattcagcgcgaaatactctacaatggcgataccgttattcagacgatggaagatgggatttacactggtgtcaacatgttcaactttgaaatcagtagcagccagtacaaacctcctgcagtttaattataaaagtttgaaatatatatataatatatatataagcatgttaattgatttcaggtgtgctagctctttcttgcatgtttgtccaatatcaaagctcttcctggccacatgataattttctttgtattgtttgtaatagctagctaccctttacttttcaaatgttatacacttcaaccaattaaattaagaactctcttatttacaatacacttaattttacttaaataaaagtttaagaaagtctatcattttttattttgagcatccggaaaatgtgagagcgcttagcatgaatctagaccgcttatacctaagtctggccctatgtgagtagttttcatttggggcattaatgctgtcaatatatttttttttaagaaaatcaaggtagcattgtcttcttcatgatatagattacactaaatcagaagaaaaaaagctattgatggattaatatattaaatcaatgtacaaacgtcatctcaataaaaaaacctattgatgtattaaatacacattaaattaatatacaatggtcctctcaataaaattacactctcatcaatttttttactttattctttataatacatcactaaaattttattt

SEQ ID NO: 185582 - DNA, 2771 bp, Cannabis indica
agatacaagtaaaattagagagaaaaatacaattgcaagggcctcaaaattgagcctagcacccaggttgacaatcctgatgcaatggtttcgatcattcaaatacaaattatgcttcgagcattctctctgaaataatcaaaaaaagggtaggagaccacattctcaaattctagaaccttgaaagtattaaaacatccagtaagctctgaaataagcacccagtgcccaagttgacaaatggcttggtgcgttgagttctgcttatccgattttgattttgtcttgaccgtttgactagtttttcataataactaagagccatgaactcagaagagtcaaattcacaacttcatatttttacttttttcgacagggtgaattactcgaaaacttagtagttttgagtctctcgtttccgcagaagagcaacatttctgagaactagtgaccaattttgctataacacataaatggactaagtgatgtgaaaatattacttaggcatcaaaaaatacatccccgatgcgttttctcactcacagacctgggcgctggacctaaacaaccttcactaaaatggccataactcactcaatattgatctgatggacgcgatctaattctaacttgcacttcgaagctatttcaatattctatcaagtcatgtctcacacttcaatcaaaattatgatgtcatcgactccaaatttcaccacaagtgagttataaatttaagttgcaacttacccagagcgggtgttgccagtgcgactcaagctttaaaaattgaaaatcaacctctaaagttaatttttaccgtcaaatcaacatctacggtcaaaattgagctccaacctttaaatgtatattttttcatatttttttggattatttattcttatttaataggatctcgtccacttataaaagaagagctccactagtccattttttaagctcagaaaagcaggcataaggtcagaacatctctttctaaaaattaggattttagatttagctatttgtctgtaatctatctcgtgaaaaataaaactcgtaatagacgtaactccattactgtcaccatacacagagtgaactactataaattcattgcgtctctcatatatatatatacatacttaacttataatttattctcgccaatctagcaagcagatgtagctgaaaaatctgtgtccaacatcatcaattacatttcctagaaccagtctatttattattgtttttttttttttcgtgaaatggaatttatgatgcattctcaaatatgaatattgcatcctaaaaatattaaatgaaaaaagattaggcaatatgattttatttgaattttaaaaccgtatccaatcagataattgtaaatggttcagattaatcaaactattagcacccaactcaattggtcaaaattagtcgtagtttgaaactatatattccagattgtatgaactgcatgattctaatgaattgttaaaaataaaataaaaagagaaaattaatagtatcagttaccaattaatatacactatatatacaatatatcttatagttaccagattctcgtagaatgtaaaagagtagttactcgtaattagtgcaattaataataatcattgatattgaaccatgcttagcgattatctttatttctcatctttgaagaataaaacaagaaagaggctataaacaatgttatcttataaagcaaaatattgtgtacatgtatatggatctaccaagctcaaatattctcatattgtagtttgactgcctcgttattgttacttatttaaattaagttattaaggtattatgatgaaatataaatatacatttatatatgtattccaaatctgcagatttggctagatttgatggttcttttttgagtataacttgtagtgtgggatgaagatcagaagcaaagaacatcctaaaagcatgtccatttttctgaatcagaagaaaaaaaaatggtctttatgggctttttttgacccttttgtgactcatttgatgaactgagaaagattattttcactccacgtttcattttatcacctttctccgacaacactatggagtccaaatatcgagcccatttgtgaaaattttgttcatataaatattttatatatatatatgtgtgtgttaaaagaaaatctgacaacagtaaaattatgggcatgagttactctggcctcagttccaaagtaattggagccccgagcttagttgcataacccttcatattttgaggggtaataatcaactaatcaacatgggattgttttgataacaaatcttacattttgtgtgtaactaaataagtaatcaaatacaaggcttacaagctagttagtactagtagttactttgatatttgataaataaaaaggttgtggagattcaaaaggttgcgttcttacatattccatattaggacatgttatatacatactctattgggtattattacttttgtagcataaacagcagcattgctcattgaatctttgactatgaaagggtttttttttcattttgtattcttaattgttatgataataatggtatgtaaaacatttcccatgtgatgcatagggccagaagtcatgcatatcgtttttaaagtcaagaagcacctatcatctacccagtagctttaattttatatgtaacaaaaaaatgatatttgaatttgatcctttatgaaaaatatgactctccatgtgaaaaggtct

SEQ ID NO: 185583 - DNA, 799 bp, Cannabis indica
ttttttacagaaaattattgtggtgatgagtacagtgatctaacaagtggtggagaattgggttggaaagatgttgctcctaagaaagtaaatagttcaggttcaagctctaccaaggcaaggattcctttgtctattagaaagaaatgtaatcaaacttatgttcaaaattcactcaaatccaacagtaataacaatgatgatgatgatgatgatgattggcgtatcgaaattgctgtcccgaagacaacaacacaccagcagcataatctttctttggctgatcttaacaatgaagaatctgagggtagctcggttacgaaaaattatgagagattgagtactgatgtgacaagcttgcaggatattggatatgaatatgttcatatggatgacaaacaggaagaatgctcctcttcaatctccaatgttctttctcatgattttgaaaccaaaattgtcaaagtttgtcatgaaggtggtggtttgcctaaggccaaggcaacagaaagagatcagaaatttgcacctgaaaacaattgttgtgatgaggaacagatgtatcctattcctaccaagattcgggaccgtgctagtcttgattcaactgtgactgagtctgctccaagttcacattgctgtttgcaaatggcgaatgagatgaattgtatacgaaatcaacttgtgcagattgaagacaaacaatcaagtttaatggatcttttacaggtaaaaatttaataaagttcaagtctttttgtgttcattgattcaacattatggttcattaagcttaaag

SEQ ID NO: 185584 - DNA, 3584 bp, Cannabis indica
cttcttgctcaagctcgagtattagaaattcaatactccttcaaaagggttacgaagagaaagaagaagaaaaaaatttaaaatatttattttatttttttaaaaaaatattatttaagtggactaataagattgtgtaacgtgtatactgtgtacatatatataatctaacatgtcagttaacagctaaaattagattgaagtggtaaactggtaacagaatatgagttttggagattttgccattaaaatttagatttttgaggttaattgctagcaaagtgagagttttgagtattttaccgcaattattccatatatttagaacataatcattctttcctccctataaatacaaataaaataaaagtaattgtttttaattatttacataaacattaataattacttgttaacttttctagttagttttctctttctgcatgaagaatacttaagtaggtcaaatatacactaggtcctataattaacgtgataaaattccctaaaaattaataaataacacacactaaattccctgttgaatcctatcacatgcttttttaatagattagatataaaggcattaatcttgttataaatactataaagacattactaaatacaaatcttaatagttcaattacaacatattaatgtctaatgaatgttgtacaccaccataaagtgggatacaccaccactaatggtgacaacctaagtatataaacagaatttggctcaagctcctactcgaacctctccaacccccagaccaaggagcgcttggccgggagccccgccgctaggccaagcgcttcttgtccctggtaacacttaacgcccactattgtatgaattcaagagttcattctggatgttcacatagtcagcagaagtattatttattgattcaccatccacgttgtgaatacagttggggtacaaaggtgattcaactaagtactttgtctctctagtgggaaaattagcttctctttgttgatgcttttccatagctcttaacccctctaattccattgccacttctttcattgtaggcctttcatcacttttcaccctcaaacatctaccagcaagatttgcaacttccatcaaagctttaacatttgcatcactaacaatatcagcatcaaaaatatcaagtattctatcacctttcaaagcagagacaaaataattagcaagatttctgtcattctcgtctcttctaaaatcaatggccttcatgcttgttaataattccgctaacacaactccaaaactatatacatcacttttatcagttaggttgcttgaatacatgtattctggatctaagtatccaaatgttccttgcacaagtgtttgaagttgatcttggtcaagaggattcaatcgagaagctccgaaatcagacacttttgctgtgtaattttcgtccaaaagtatgttcgctgtcttcacatctctatgtatgatttgtgttatagtctggctgtgcaaataagcaagagctcctgcagtttctgaggctatctttaatctcaactcccatgaaagtggtgaaaattcgttgcttatgttttgaatatgctcaaaaagattgccatttgtaataaattcatacactaacaaaggaacttcagtctccaaacaacatccaaagagtttaaccacattcttgtgattaatctgcataagaacaatcatctcattgatgaattgttcaatttgtgtttgaatgcccacctttgacttcttgattgcaacaaatttattttccatcaattctcctttataaactattccataacctccctctccaaggattctgctttcatggaaattgtttgttgctttcttgatttcttccaaagtgaaaattttagttgtatccttagatcctctgtggcttgaaaatctttgttgtaacattatgcctccattttgttcaaagaatttttctcttagctttgttaactttcttttcttcattccccaaaacattaaaccgattgtagccataatggctacaaatcccatgcttacacctgcatcatataaacacatgtatatttagtatagatattattggtttacaacttaggataaaaattacataaagaggatgactgttgattaatactccctcccttctgaaagatgtggtttttaattgatggttgtttatgtgagtcactttattaataaatttttctctgttttattctattaataattagaggtaaggttaaaccgcagtgatgtgtttgagctttttgaggttctatggcacaagaattagagaagatatatggaagcatttggaggatacataccctgcaatacatttggataattatatagtgtgatctagctgtttataactattaatatccatacttaaattcagtggaatgttctacatactggtagttattctattttctattacacagttacatatgaaatcagatattctataatctattttcttgtgaattgtgtctctcgaactcattgtaagagtctaaaatatatgtgttttgcttaattttgatctaactctgataaataatatagaacgtaattacatattaaaatattttcatagagggtagtagatcaaatgtttgaatacttactcactataatgtagtcaacaattcgatttctggaattgtccttcacatctatgcacatggtttcattttggggcaaatatcccttttggcataagcacttgaaactacccggtgtgttttggcatattccatttttgcagagatttggttcttttttacactcatcgacatctaaaaaaaaacatataaataatgggatcatttatattatatacaatcaaattaagatattttttgtgctcattttccatgttacctgtacaaccaaggaaagggtttccttcataaccctttgagcaccaacaaaggtagccatccctaggaattgaatcaacacacacagtattctccttacaagcgtaactcgtcatattcttcttagcaacttcacaagattcgaacccaacagcaaagtcaaccataacaggaacctgagtaagattggtaaattcttcaagccttgaaaaattaaactcagtttcttccataaaaaaagaatagctacacgggttaaaactccaaacacttctatgatgattgttacttctcaaactaaaacggtagctattaagtccactggggatcgaagttttgcaacagcctacacgaggatatgcagcccgttgtgtagttattatcgcccctaaagccattgatggttgccaaattatcgcaacctatggagtaaaacttgttcctgacaaaggaaacgctgaaatattgattaaaggcttggttgaagtctgagacattatttttcaactgtgtgccgttctcagtgtaacaatcttgggcaataggcagcatgagtgttacctcgccggctgcaacggatagtttgctgacgctgaaaccggagttgaaaaggtacggctttgaattcttacaatagatctggaacaggtatggtggttccatgaaacagcctttgtcaag

SEQ ID NO: 185585 - DNA, 3705 bp, Cannabis indica
ttaattaaattttacttttgacaccataaactatttcaaattttgtaaaatgtatagataatcttacataaattacaaggtatataaagtaaaaataaaaaataaaaaataaaaaatatactaaaacaatctttttagagggcttttaaggagtgcatattatataaaagtagagtattgctaaaagacatcattggtatatagcattattctcgatatcatactattattagtgtaattaagtatcgagtctcatataacttaagaaaataacttttagataatatcgctaaccaatcatgaagcgctacaaatagaaggtgctggacaccaatggtgtccaatagcaatactcataaaaatagtgtgtagcaccacctaaaagtgtgtcttagaaatagttaacaatattctgtaatagttattatatgaattataaggaatctaaaatttaattacaccaataacaatttaacatctttaaattatggtagacacactaatatcttttaacatttatgacattgttcaacaaaattaaattgatttgtataaaattgaaaattttgttatttaagttgatattttcaaatttaaaattaaaacaacaataattccctttgaacaatgaaaaggctaaagatatcaattgtagtctattaattaattattaatatttataaacaagtccctatcgaaacgacacttggcaaagtataaaaggctcacccaacaaaaatttaattttttatttattattttcgttgaaaccaataaaacggtgccgtatctccctacaaatgggagaacacattctccgataaattcaccgaaacctccgccgatcgccggcggaatctgcccggtgagggttccggcgacgttattgacttgctgctgaaattaagtcacatcattgttatttatataggtttcggaagaaatggcgtcggaagatgcggtgactaaaacgacgagtgagtctgccgtcaccaccatcgttaacctagccgaagaggcaaagcacgctagcgaaggagtcaaggctcctagccatgcttttattagtgttggaaagtctctcatcgctggaggtgtcgctggtggagtgtgagttctttgttaatcttttgtgttgttcttagttttctttaatcttgtttttgattttaaatttttaattatttagtttttctgaagtttttttatgttgtaaattctactgtttgattgctttttgagaattttaatttttggtaaatggtttaggttttgattcaaaggttcgttttttgatttagctatttggattattcgagtaaaaaactaaactatattttaaaaatgaggaatatgaatttttgatgaataaaattagggtgaattgtgtggctttctgcattttttttgcaaattttttacttgatcagtcattatttttcatctgggatactttgaagaatattaaaaaaaattcttagctaattaatgcgaccataatagttgttttgcaaatatcaaaccattcaaattcaatgtagttattttgtcaatttaacattttcattttgttaatttggcgaaaatattttcgggtatttgttaatcaaagttgcaatttatgtttgtatcgtattacttaggtctgtgaatttaagggtgaagtttttcattgttatctaaatgttttatcaacttggctgatgtaggtcacgcactgctgttgctccattggaaagattaaaaattttgctccaggttttctcttctagctttagactggaaattgggggagtttcattgttaaaagctctaattactagagtgtcagaatatttttaatttagttttagataccatagaatcagtgaccacccattggactaaaatttattatgtagagggcagttatgatgagatttaatgtgattttggagttgagcacagtgaagtaacaaggctagttttttattctttaccattgattacaatgggatttcattatatggtcatttttaaattaagctagtgtaaatttatttgctttcgggttacgcaggtacaaaatcctcacagtatcaaatacaatggaacagttcaggggttgaagtatatatggagaactgaaggactcagaggattgtttaaaggcaatggtactaattgtgctcgcattgttccaaactctgctgtaaaattctatagctacgagcaggcatctaagtgagtttctgcttgtctctttggttcatttccctctttgaaatatcatatgttcattgtacgtatttgtatttaaggctgtattttattttttatttcttaactttttgcttaacaggagcattctgtggttttaccggcagcaaactgggaatggtatgaataatttcatgctcttcatatgaatgagctaaacctgtgaatttattaaatttttattgctagtcaatgtcatatggtttgaaggcactatgttggtcataatgatatagttcttaaaatttattgtactcatctgcttttggtataaattttgggggtaagggaggaagaattaaatggctttttaactgttagaatgattcttttgttcttgcagaagaggctcaactgacacctcttttacggcttggagctggtgcctgtgctggaattatagccatgtcggcaacttacccaatggatatggtacgaggtcgactgactgtccaggtatcattttagcatatagaactttgctatgagattgaatatgaattcatttcattaatgtaaagggattttcttttttggtggattaattcttttttggcctatattttcaccagacagaaaaatcacctcaccagtacagaggaatcttccacgctctttcaacagttcttcgggaagaaggttttcgggcattatataggggctggctaccttctgtcataggagttgtaagtaaactgttttttatttatctgaaaattttctgttcaaatatgttgacttgtcattggcttttaaaaggtaccatatgttggtctcaactttgctgtctatgaatccttaaaagattatctggtcaaaactaaaccatttggattagttaatgactctggggaactgagcgtgacaacgagactcgcttgtggggctgcagctggaaccgttggccagacaattgcttaccctctagatgttattcggcgaagaatgcagatggtgggttggaaagatgcatcttcaatcgtaactggtgatgggaaaggcaagccctcacttgaatacaccgggatggtcgatgcattcaggaaaacagttcggtatgaaggatttggagctctgtacaagggcttggtccccaattccgtgaaggtgattttctaactccatgatcaacattcttgaaatctaaaagaattagtaatcaaaatagacaagtcatggtagtaaaatcatatttgagcaatgctatgtgttataataaaatgctctgatcattctcattagatttgtgaacaagcacgagttgacttacatgttgaccaaacatggaattggttaatagtatataattattgggcaccttgctttcttaggctagttttttagagtgagttttacctaaggtggtgtttggttgggaggaatgaaaatatagaaataagaaaatatttttaaaaaaatgataaaaaggttattaatatttttttt

SEQ ID NO: 185586 - DNA, 3752 bp, Cannabis indica
aatcctatgaccagttgataaaatcatcctgacaaatctatgaccgaaaggttggaaatagccccatcaacccgttgttaacaaactttggctaaaggacactcaatcaaaatgtggagaattaattcattcatactttagcacaccaggcaaatgacgactacatcaacatgcccaccttttcaactagttagcttgcaactttccactatttagctagcaacagtaatgaaagggttgttgaaatatgatttattaactttttttttatcgatctcttgctaaatagaaaaatatccaatatacttttgagaaaattacattctataccttttttatattgtcctcttttatttttagtctcttttttaaagtctatcatttttactttttttttaaatattgtaccaattttgcccagtcacttcaagatactctcttatgtcagggtattttggatacaatacatataaaaagaggtatatttcaattaaatataaaatcagagctaaatttaattaattaattaataaaagtggtattttttttatctttttgagagtcaatataacatttattagtaatttaaattatgcaaaaaattagcatagaggtgtatacacatgacatgaccaaaatggttggatggttgttggagaaaaagaaatttaattgttaaaacaattattaatatgacacaagtaaaaaattaaaatcaaactcaaaagtgaattagccatgtaagagttgtgaatttgaatcacttccataagaagataaactgggtgggacaggaatatcgacagacccttcaaacatggacacaactttcttcattccaggacgaattgaaggctcttcttgtatacaccacactccaattttcaccattttttcaaactccaacatgttcacttcttcatcttgcactagattccttactttattagccttgaaacactcacaaacccagtccaccaagatggcttctttctcaggaacattcacatcaacatgtggacgacaacatgtgatcaccaacagaacaattccaaagctgtaaacatcggctttagctgttatagccatgttcttatgccactctggtgcaacaaatcctcttgtccctctaataccagtcattgtccttgtttgatcaggcatcagcagcttagccaatccaaaatccgcgatcttagcacaatggttttcgtctattaatatgttgttgggatttatgtcacaatgaatgatttgattctcacattcttcatgaagatacaagagtcctctggctattccttgagctatacaaactctttcattccagcttggcttcacctcagatttgtagagaaaatttgcaagagaaccattactcatgaagtcataaactagcagcctgttggagccttcatggcagaagccaagcaaacgaagcaagtttcgatggtgagttcttcctatggacctcatttcattgcgaaactcaacttctccttcggctgcaactttctctagtcttttcacagcaatggctctgtctccatatggcaatattcctttgaagactgtcccaaaagcacctctgcccaattgctcattgaatccattggttgcaagttcgagttggtggtaggtaaatgacttcagtgagagtacttctttatcattctttgaatcaagctcgttttcactaggcctgaaatagtttctgcaaagaaagaatagagaaaacaatatgatgataagggaaaaacttgtacaagtaagtccaatgatcaatgtatcaattctatgctctttcttgacatgtttacttgtgccagcatctgtattgatgaagctgttgcttccattatggaccttgattatggttgtatcgaaacctattcgcccagctttggcaaatctcaagggaaacttttgtttgtagcaaccatttctgttagagaaagcagcttggcaattacactcattcaaacagctttgtttacaagtatccttgtcaaccagtgagaggaattcgtaagtgtccggttcccatctcaaaccgtctaattcagctatagaaaccaccttgtcacagccttctatggttgaatttctgttgcagcctaaagtcttctggtttttatcaatgtaatctaaaccaggaagacaaagacaaacaggttcttgatttataagctgacaatatgaattgatgccacataatccaattggagcacaaagattggtagttgaagaccactcaacaaaccagctgctgttctgaaccaaattatgagagtacaatctaaatattccatctacatctattgtcaaacgacacataactaagcttctaccttcaataacatttttaatgttgaaaccagtagagttgacaaggtataattgaccattagaatcaagattcagacttaagttgtctccttcagtatctgaagtccagtactcttgctcaggcaagaatccaccttgaaaagttgccaagtactgcccgagatttccacttgtctccaactgaagccgaaatctcctgtggagtgattcgtctttgacacggctgaaacagctggtttccagcactagctctgtcctggcaaaagggtatctgtaggatgatcaaaactctgccaaatgatggttgaatttgagttgtagaggacaaaattgcccgaatcgagcatggatgctgatgcagctggctgagatgaatttgcaatgagcgccttttgcaggccttgttcatcttgcaaaacaagtcttccttcactccctaaaataagtaaaacatcattggaaattggaggtccatcccggttagctgtccatgtaaccgttttctggtttattttctcaaaccaaattccaacttcatagccattgttttgtgttttgtagaaaccaaatgcaaactgaccagaacttgataaccaatatgagttagtcatattgggattgagagaagagcctaagctgattttggtatcatttttttgacaagttatcatagaaatgttagtcatgagaagaaagaacaaaactataaaagcttccatttttagtttcaatgccttttgagtttttactaattcgttttaagtatcactcccatgatgtagagacttggtctccacattcaatcatgggacctttcatcattgaaaaggaaaataaagccatcactattgataacatcaaataatatctttacatcgaagaaaattcctaaactagtagtgtccatacagcttgtagtatattttataaaaatgcaattaaaaattggttctttcatagtagtgaaccattacacggctgctattgttttataataaggaagaatgaaagatttttgactttcaacataagacagatcagaacacagactgtttaagataatgaaacattggaaaatgtaaaaacatttgttgattatagaattctaacaaaactaataattattttatttgctattaggacaaaaataaatctaattaattttggtggagcaaaacccggtcttgaggaaaggctcagcatgtatatatactaaaatactagcatcatatttttgttaataaaataataattagaaacattaatgtaatttaggcttagctaaagccaaggatagggtgttattgggtagggtcaacacacatttaaactaaaatttacacatgaattataatttttttttagttcatcttttgtacaatactttatcttgaattccaata

SEQ ID NO: 185587 - DNA, 2793 bp, Cannabis indica
ttttttaggcttataagtaattttttaggcttagttcccaattaatttcattttgtttatttatttatttattggtggaaaaagtaaatattaaaaatagcatattcttctaaaacccatatctcacggaaagaagctggaaatatccaaacacaacacaaccaagttgccttcttcttcttcctttgtcagtctctgtaagtaactgtactaccaatctttctctcctttgggggttttcgaggtcggaattcaactgggtcgtcatattttttggggttttcaaaagggatattcaaaagaatcgatctttcgtacagttatggtgaagtctacccagattggggatggtggtgatggtgggtctggttcggcttcttcaatagctccttttctaaaaaagtgctatgagatggtgaacgatgattcaacagactccataatctcttggaacgataccaacgacagctttgtcatttgggatatgactcaattctcagtcggattgcttcccaagtatttcaagcacagtaatttctctagctttatgaggcaacttaatatctatgtgagtctttttgttcttcttcttcttctgggcaattttgattttgctttaaaagtttatgtttggattttttgatcaatttggctggcaaattttatgccatttcctttcttgatggacttacccctttcttgcattgaccttttgcccattttggattcattttgatgatttgaatggtctcatcacattcattgtttgtggctcatgttttagttttgaatggtttaactctgttaataaacttatgtgaattaaggtgaagtgtatgctaatttgattttagtaaatttacagaaatttcttcaaactttgttgatctttatagaagtaacaactgttaattactagtacaatttatgctgtggaaaaagcttcttgaaaatcaatcaatagtgaaatttagtatgaaaataattagtaattacatatgaaaataataatttttagtatgaaattttttgagtaattacacctgattcttatcagggcatgagaatctaagagtgtgaaattacttcaaattatgcagttacaatataattacgtgatcaaacaaatacacaaaagctagcctgagagagaaaggtgtctaagtaattatatactaccaagcaatcccatacttgatcaatatggaatcttaacaatacacccccgctctatggtggcttactctgggcctaatccacaagtcacccctttcacgatgtcagtcccacttgtgggtgtatgactctgataccacttgataggaattttctatcaaattgtctagaacaacaagagaatagtagaaaatactagtatatctcggtattcgagagactcagtgctctcccaaagccaagagctactgctcagtgctcaatacaaactcattctccctaagcataagcttctttcaactctttttatattgtactcagaagacaaatttagtaattcatgagtaacaaccttacttttcttatttacatgacattgtgtgtttggttagattggccaatgaactctattgtatcaatatgctgtgttttcctttccatgattggtaaactagacagtggtgcccagctagaacaccctttaatttcttctcaatattgttggtattaagtattgaaataatagtattggtttacatggttttgactgagatactcaaataatggaaaccataaatgttgacagggatttagaaaagttcatccagatcgttggatgtttgcaaacaatggattcattcgaggccagaagcatttattgaagaatatttgtagaagaaaacattctcaagatccagaccagagaaaagcattccaacagaaagaatcccatccagaagaaacctatgagaaggttgaagatggtctatggagagaggttgagaatctaaaaatcgacaaaggtgcactcgctcaggaattagtcaaccttcagcagcaccagaaaactgctgacaataagatgttggtcttgggagatcgtctccagggaatggaaaagaatcagcagcagatgttgtcctttctagtaatggctgtgcaaaatcccgggttgtttgttcagttgcttcaaccgaaagaaaacaattggcgcatgagtgaagcaggaagtaggctagaggaagttacagaggatgataatcctgaagcagcctcggacggtggtatgatagtaagatacttaccatctcccaatgaaacttcaaaccccgtgtttacatcaacagagaaaccaaccgaaaccagttcatatccagatgggatgcaggattttttcttgaactcagattttatgaaaattcttatggatgagaaattaaatccattagaaactcattccccgtttattctaccagaattagccgatgacaattcatgggagcagcttcttttggccagtccctttcgcgaagataataaagattcaaaagacgaagaagagaccaataataccgaaaccccacaaggcgaatgtagaaatttcgattatttagaacatatggaaacatctcacaactttgagatggaaccagcagtttatgaaggtcagtttgaaatgtctcacaacaacatggaaagtttggaaagtttaaatgaggaaatgggagtactgttgtcttctgagccagaaaacaatggtgtggcatgaactgaaatatggtcacaactcacaagacattttatagctaagatatttcaagatttttatgcaccttt

SEQ ID NO: 185588 - DNA, 2219 bp, Cannabis indica
ttggttgcctctctttgctgagcaacatcaaaaagaaatataaaaaaagttcaaatgttaatatcgtgtacacaaagaacatttaaaataaataatatgaatatatattaaaaaaggacctgatagaaatcattgtcaaagtcgtcttcatcatctttgaaaatatcatcaaggtccatatccaaatccataagtgagagttgagagtagagagtagaaagtaggggaaatgtatgaatgggttcaccactaattgtattggcctgtcctctctcttctctatttacttgccctccctcttttggggcttttaatactagtagctaaaaaaataagaaagaactttaaaatacaatctcttcacttcagcttctccatcctatgattcaaaatagtcaccaaaatcttactttctttattttaccttaaatttttacatttctccataaatcaacttctctattttatctccatatcatataaatattatactttctaaatatatattattcattcaaatattttctctaactatcaataatattctcatatcttttaatatttacaatatttctcccatataatatattttattttattcttaattaatctaaatttataaaaatagaatataaattaattaaagaaatcaaatcaaattaaaagaaatacaacaacatcaaacaataatacattttaatttgccaaatagtcagacaacaaaagaaaatgacataatacattacaatttagtctccaatgaagtaaaatatttttttttacatcattgttttcaggtaatcacgagaatatgcactctgttgttcttccaccttccttagatgatcaaaagtttttttttttgccaaaacctagatgatcaaaagtttgtttatcattgtcggtatcacaataataatggcatgagcatatatagaatgaaagtcacatgaaaaggaaaattttaaattatcgtctctaatttatgattaagcagcaatgatttgtattcagctacaataaatcttatgtccatgccaacacttcacaacttgagacatctcaattctattgctacttagaaatttgatgagaactagctgttgtttttagttggtgatggctccaacattgacttattcgagcagcattggctcccctctttggaaggacctctcagctttcattgcagcagatcagcaactatgaatctagagagggctactgggaagtccatatttgtgccaaattctagggattaattacataccaattttcttttacttcaagcaaagtaaaacaaagctgaaaatgtatattcgatgtgcttgtaattggctctattctctacttgtatggacacacacttattcaaaacaatcgacttgaattctggtcttggtactactatacaatctagagcaacaaacgatatacaactagcaatctcataaataccccaattaaggagcaaacccaccaaagagaaactaaaacaaaacatgaaacaccaacttttttaaccagtagtgcaagaacaacaactcatataataaagtaagagacctaaagcaatcttcttagttgcacaagcctcttggacagttaaaaagttcagattatggtccacattctagaagaacaatcctagattgctcctcagcttttcctaagttaaaaacataaaacattcataaactctatctcataagttttgacagcatagtttctgtgaaaagacaaacacaggttaagtagttaacacttccacacacctataaatgatgaaacaaacaaataataaaataaaaagaataacttttatcaaggcgatcagttattataatagagaagtatattaatttttctagtaataaatcatgtagctgaatatgtagttatgttcatataaaatccaataaagtgtgttcatatgagaaacaaaactggtaattatcaagttagacaagttgatcttatttaaagttgaaattttagctagaagagaatgtaccaactaccatgccttggttgccctttgctaaaaaaaaaaaacaacttttgtcatatctcaataataccaatcatatatgccactcacaaataatggccctcctaggtttggactgttggacaaagatggaaaaattattggttcattctctgaagaaggtaaatctgtgccgaaaaaaagaaagaaaagggagaaaaccgctccg

SEQ ID NO: 185589 - DNA, 7619 bp, Cannabis indica
ttttttttgtttttgttttttctacatgatagcatatattaggaatgacagaattattattggagattagtggtaccctctttcataggtagcgtcctatattagttagtcatattgtttaaaaattattttcgtaaattatacggaccgacataattaattacaccaataggagtatgacactaaaaaaaggatgttaggtaccaatgatgccttttaacaattctcattagaatgagaaagattaattacaacttcttattacaatcttttggtcaaactctacgtgtgaatgctggaatatttctttaaatttttttttatagtgaaatctgttataattaatacaatattaaccctgtaaatttaaaaattctctcataatttataatatcgaaaacaaagtttttgatattccagtctatcacacgagtttaaaaaatttcaaatttatttttgatactataactattcaaaaaattttaaaaatttataagaatattataataactataacaaattacaccaccataaaaaaatttgcaagtatttttggacaccgaaattgactaataaattataataagaaattacactcctcaccttagaataaattataataacagtaacactcctctcacattagaatatgtactctgaatcatttcagttttattgttttcattgaattatatgcaaatctttcaatcaatcccttcatgtaaaggcatcacatttttcccaccttttagcttcagaaacagacaacaaagatcactcaaatcagtctggtttgcactcttgtggttacttagccccattccatcatgctgatactgtgggacccaattattaccaaatttttttaataatattaaaacaatttaaagaagaaaaaaattgttagtcaaataaatactccacacagaatagttgagcgcatgagattacagaagcgggaaaactgagatgggttttggttctattgaacatttataagaggatcacaccaaatcttgtcccccattagaaaggaatttcaactttacagaaacacttacaaaattttcctttgtgactttagtatatatattttcctatatagtttatatattgttacatatatgaattgtatatatgtatttcctttttccttgctttttaattttcttttttttctctccacttttctctgcaggatcttatcatttttacttttggtttcattttaggcagcagacctagcaaaaattgcagtgttacagagtaacaaatatataggaagactcaataaggctccataacttgccccatacattcttctcccctaacccaaaagaatatatatccatcccaaaaccattcctctgttatacagtttaccactgttgaaattcttccttgattaacaaaactacaaaaacattatctcactgagataccatctatatattattctataagaccatgttcgaataatttattatttcccagaaaataaatgttatatgttttgtaatattttaattaaataatatgttttgaaacataaaggaaattatgaaatttaatatttttcttttgtaagaaatgatatggtatttaaaataatattatatgaattcacactaaaatattctaatttaaattacttttaaattctattattaaacatatatttgttagagattttattacaaaaaatagaagaaaattaagatattacaaatttattccaatataaaatacaatgacaaagaattcaatgttacaataccaatacttttacactatatatgtgtatatatatacataaaaaaaaatagaagatcagataatacaatataacatatatatataataactgtataattagacattaaaattagtaaattattagtgatttaatatttataattatatgtgcattgatataaaaaataaagttctattgtcataaatatgcattagtaatataatttctccattagggatattttattgaattctaagtgtggcacacatgttatttatgaattttggtatttttttatattttatgcccaataacagtagaaattcgacagttcactaatagtgccactttgatacggtttagtgtcttagattaagtggacaagatttatggatagttagaatatcagagttatacgagatatttgattatgactattttaccctagtttaagagattacttaatggtgaagtaagggtattttagatattttccacctaagttttatttgattagctttggtgaatttagtagaataataagtgatatatgttgaataaaggacaaatgattcaagagaattttaaactcaacaaaatcacactctttcttttttcggctacaaggaaagccaaagaaagaccaagagcaatatttcaaccaaattcaataattcagcaaggatttcaataggaaattaagtgaggattttaaagaaagatcaagataaaccctgagctatttacttcattttgaatttgtaagaaagtttgggttttatatatgtcttagagaattgagttttttttttttgtgtctgtgagttaaaaattgttttggggtttggactatgattgtttgtagctatttttaaatggaaatagcagctatagcatgaaatgggtaagcttgagttttagatctcatcaaagctttcccaacaatggtggattttatttcatgagttcttttatgcatttaagtttttaattatgtttagaacattattttagggtattctagaaagtttgagcaagtttggggtataaataaattagaaaagattgagctttataactttgcaaagaaacggttcactatttccttaggcagaccttggggatccggtaacccattttgggtacctcaattttcgtattttcttgatatttttgccacgctatttatcgatagaaaaacttcagattatgagtttaagtctccaaaagtgttttagctagacacttaccaattttacgttaatgtaatttagggccttcgatcatcgagcagttttttcacttagtttgactgacacacccctgattacagaattgaggtaagatgagtataattacatattcacatgtttggcatgcatattttagaaagtacgaactaatgctaccaacactagtacgccttgagtacttagtgtgttatacctgatgttcgaaaagtgaaaaaagtcaacccctcgatattgaccaagacttacaaaggccaaataagttcagacatcctacttgagggtcccatggcacctctaggaaactcatagaaacactaaccaactattttgttggggggactcacaccttaatgtacccaacctagggtttattgacccacacatgggctttgatcctaacctcaatccaacaaggaaatcaactaggacttgacttatttaggcattaaatggctagaactttaacataaagttaagatgacacaaggaggccactccataatgcatggtcgacctatgccatcttttggcataaaaagatggcacaggtctctattctcaaaacaccaaagacttgtccaaatgtggttcatcaacaccaaagagtacaacacaagtgaaagaaactatttttcactcaaacaataagctagccgacctatgccatctttgtgcacaaacaaggggcacaagttggccacaccaaatggcaaatatatttttttgctaaaagtacgtactttttcttcattaaaatattaaaaccaagtgaggaagctcactaagtggtgtaacccacctaaccgacatgtgccatctttgtgcacaagaagatggcacaggtaggccacatcaaatggggaggattttctttgtccaaagaatatttccaacaccaaagtaccaaaaacaagtgagaaaagtcaccaagaggtgtagcacacctatggccgacctgtgccatctttgtgacctaaaagataacacatgtttctcccaccaattggctaaaaactaatgtggctaaaggacttttatagtatccatatggtaaaactaagcaagaaacaacatcaaaggctttgcataagccttagccgacctgtgtcatcttttggcaccaaaagatggtgcagatctcccgttagggttttggacattgagataaggttttatgaccttgaaacccccaaaatattgttcaccatcaaaaaacaagtcaaacacacaccctgagatgtcgggaacatgtatgtccaacctacaccataatgagttgtcacggatcatgatgacatgacacaagttggatttggagctaaaaggtacttactaacatttggtaaaatcgacataactctcaatttttatcaaaataacttggttcagttttcattttaaaaatcttttcaagacagatctatgtgtgtgtcatggtcatagtataattatgaagtatcaagctcaaaatttgtttacaaaataggttggcacattttacccgagaattaattggttttactaagtatgggctaaaaggggatgttaagagagttgtgtcacaactcttgcgactttctatttgccttagacgaggtgtggcatcccatgttcacctctctctaatcttgtcattcctaaagcacaataccacataagcaagttcaagacaaggaaaataaccaatttcgacaataatgtgggatatttgcctctgaaaaggagatatttttcagatcttcagttattcatcttttttattcattattttatagaaagatacgagatttaaagtgagataccccgacttgtgggggatcactaacaaaccctagacctatataaagaaatgttagactagggtttggaagaacaacaactgcctacaacacatcatcccttgagaccttttctcttcacattttccttaagttcttcatattggtacaaaactaagcctttatcatacaatcaccattgatagacacatttaccaagaagaagtgaccattctctattcttgtttcccatgtttactgttcccaagaacatcacaaccaccatgttattcggtctctgtgacacttttacccttaagtttcgatattgattttgcctagaaattcctttttgtgctattatccatgcacttttgagaacataatgctggtatgctagaactaaataatgaaaataaagtagacgtagcctcattaccatcgtgacatgaggggtgaactactataaatccctagtgtccttttttattttttgtggttttattagccaaattaattcattgcatttctcttatattttcacaatattcttaggtaaattgataaaaaattgcatcaataaagtgcatgtggtattatggttagttatgattttcagatagtataaactagtgctaccaacactattatgcctagagtgttgagtgcatgtagtactatggctagttgttacttatagtatgaactagtgctaccaacactagtacgcctaaagtattgagtgcatgtggtattatagctagttatacttataatatggatttattctaccaacactagtacacattgagtactacttgcatgtggtattatggtcaatcgtactataatcaagaacgtccaagactcagttatacatattggacggggactcatggtaattaggcgtatggggacctaattataatttggatctatgtttatgtttcatacttttcttactgagtctgtagactcacagatatattttcatatgtaggtaaaggtaagactaaagctgaatcatagtgattttggagctcagtgaagattgtaaatatcaggatggttagacctggagtgtttggatcttcaggacaacatgggctcaattttattgcattattttcatgtttgaaaaatagatttttggatcccgagttttataaacagcttgcatttatgtcgtatatttatgaaagtatttataattataaactttttattaaacacgacccttactttttggagtttgggtctattaccaagctttgactaggtatatcgaacagtgaagtttaaacctatttttgctttcgttaaaattggaggttgtttgctttagtagtgttgcaaccctttccctaacacaagaaaataagtgcacttcctaacaattataatcaagttttattcctattgttattattgatagagaaaaaagtgtgtaaaacacctcttcaagagaagaccttaagtagctgaattccctcagatgttattttagcacttttagaccgatagatttcttctatagcgggtcttaccttgaataggtagtttctcgctcccacctgcaagaaagccaaaataacaagatctgagtccataagcttattcagtgcccaaaaggtgctttagcacatgttcttagggcttatgtaatgccctactagtttagacatgctacagtgttttctcttaattgaagtgcactcttttgctaatcaaagagtttattaaaaaatatgattaattaaaattttcataaattaaataacttataataaataaacataagatttatacaatttcgggatcccattttcattttacaatcatttgcaaaatgttacatatatgtcacccaatgactattaaaacatgagccaaactattctgaagacccaaacactccaagtttaattgcctcaagatgcaatcttcatccagctccagactaactattgcttagcttttgactttcccatacttacacatgtaaactatctgtgagtcgatagactcgacaagaaaagcataaaacataaataaataagcgacctataactaggcacccatacacctatttataagtctaaaaataagttagaaatgttcttgactaaagtacaactgacaataatattagtctatattcagcactctagtcgcacttatgtgatggcgccaatccatactttctaaatgccaaacatatatctgtttgtatctcagtgtaactctatgtacaccttaccaataccttgatatgctaatctgatggctactaaacatgcacgctaaacatgtatacatatatgcatctattatactaatcttatctcgattctgaaatcaagggtgctggttaacttgagtgaaaattgctattcgacgatttaaaagccgtaagtcacaatttacgtaaaactataagtttctctatcaatttatagtgttgtaataacctaactatcaataaaacacaaaaattgggactcccaaaactatcccaaccaatgaactggattccctaaaacagtggactattttctaaggttctgtctgggaaaaaggttcactatttctgaaaaacggtgaaccattgttctgcaaaaaactagaaaaacttcactccaagctcagtgctaccctaaacaggttgcttgtggcttgaagatagtctctaaaggtgacatctaacaagcatgtatggtcatattttattttcctgactttgaacatgttagtttttccatgttttgaagctagaactcacttgcaatatcatcaacacaaacatttttataatcaagagttgatgatctc

SEQ ID NO: 185590 - DNA, 2363 bp, Cannabis indica
tctaccccccagtttatcttcctcatttccaataacattgagatcacccagcataatccagggggaatcatcagcccgaataatatcagccatattttgccaaaattcatctttgcaattcatatacggagtgccatacaccgcatagaatctccacgacaacttcacaaaaggatcccacacaacagctccaaacatagaatcatctttatagacaacttgcatacataagtcattattccagagtaaacaaaaaccacctgccaaacctcttgaagcaatacagtcacaatttgagaaccccaacaccctagcaacttccttcattctttcgacaccaactttggtttccataaggaaaatacactccggcttgtatttcctgacccagaccgataaggcctggactgtcgggtctttagtcagaccacgacagttccacgaaaagaatctcatttggatgtggggggctttctaagggccgcctcctcacccgaatgaagctcttgagccaattccacttgaacttccaccaaattattaagttcatcttccaaatttcttacagaatctccatcattctttataattacgccagtttttcttttgtcatttgagagagtcttaagtctggaacttttcctctttttttgtcctccctgcagcgagaagaaccactcaaggaggcaccactgcccaacttgaaaggagtagtaataggccctggagaaaaagccgcaagggaaggcatcgcctgatcaaattctcgaacagtattcgcatttctaggaacataaggcattaaattcagactagcctttctcttccttggctgaggacagtgatgcacatcattagataaatcaatcgggtcatggatcaaagtaatagtaggctcaaacttatcaatcggggcaggccccattagttcttcagcaagcccagatatactagcatcttcaggccatgggaaatgggtgggctcaggataggaatggggttgtctagatttacaatgctgaatatgtgggctttcagtcatctggccatacgtgggccctaaatgggccatcatagtggtaatgatcccattatctctagggtcagggattgggcgggaggtgaatttttgaatgatttcattggttttatcaatagggttacccgaattgcatctacgtaaagtcccaggagaaactgacctggctctaagaaccctatgaagacgtaattcagagatattcccattatcaatgctgcatccctcattaccctttgtgtaaatggtttgtttttctaccaccttcagaaccttaccctttgttgtacctgcttctttctgcactctaatcacctttctagtagcattccttttttgagactcgcctgggggatcccgctgttgatcagaaacggctacttttttgcccttctccgccctgtgagctctgaggctaatcggcgatgtttctttgggaggaaattcctcggcctttcgaaaccaatccatctggtttctgggattaaaacaactgaaaactgccatttctgctctgatccaaggcccataagcagggacagctttcccctccgagggatatgcgaatgcagtggctctgaaacaatcctttttatcatgccccaaatacccacagttatagcaaattttcggtagtttgtaataccggaattgaatccattccttccttccacgctttatatccagaaaaaaaccaggagttaattgataataagtagcaatttcaacctggaatttaagaaatccccttcttgctatggttcgttgatccgccatgtcaaagcctttgtatttccccactttcgcagcaatagtaggggtattgactatttttagataaggtcctggtaaaccagcagcctgaacccaaaacacagccttccccatatccacattactccaaatcccatcttctggccattcttgaacaataagaagtttcccattgatgagccagggacgattctctaagacttccacgcagtcttcttcctgatcaaagaaaatcccccaaagacccactttcagagtttttaaacctccagtttcctttcaccgttttacgccatatctgggaaagaatttctttcagtctggatctagaaacccccttcccttcgaaaaaacaggccaggacccctgttcgtgcgacatcggcatttatctcaaagtcaggttctaactcaagagtcatggactcaagaaagtttttccgcatctgctccagagcctcatcctcttccttagattcattttgagtactcacgagattccactgtagtctcattaatttcgacacccttattcccaatctgaacattta

SEQ ID NO: 185591 - DNA, 3185 bp, Cannabis indica
gtcttgtttggctgagtttctactttcgcttatagtttctcaggaatctcttcttaaaaaactactaaaaatcactagctaacatggtgaagtttcacaaatttctaatcttcatacatagaataattatattatgatcaaataacaacacataaagtacctattttttgtaccaatgaataacagaattgattgaagagattatttacctgaggctttacttcaacaatatgttgacctctagtgaccacaacaggctcattagcaagaacactctcaagatggtcaagaagttccttagcttgagatgagccaaaacaagggtcagcatcttgatgatgccaaaccaaagcactttctttttgttctataaaagacccatctgttgcctcagtataaagttccattactggtaaaccaatccttttccaatcaaaatccactgctaaagaacaagtttcccatgaagaaccactattccacctaatcaaaacatttgaccaaaaaacacataagaagatttgaaaagagagaaaaaactaaaatggtgtcaaatttgagttgttattaccttgtgaagtagccatgttcagctgaaatgcccaatttctcacatggtgaaaaccattcactaagtgattctcttcctcttccactagcaataaagacaacatttttaggatcaccacataagtgattcaatacagagatgattatatcagaaggtgctttgttaactgaagcttgtgacttaatagtaccatcatagtccaatagtatcaacctattagttgtgtttttataagctgtcattatatgttctaatgagagttttctgaaatttggtcccaaagccacaactctaaatcctaaaccaaacccaattccccaacatctcttagagtaatgatctttacaagctctctcaaggtcttgatcaaaactcttagcccaaaatgcaacatcatgagaactaatgtacttgtaatgcttctcatgcctcaatctcttctccatttccggcatacaaatcgcccaattcaaggcgtccgagacagcctcaatgttccaaggattaacccgaatagcgccactaagagaaggagaacaaccgatgaattcggacacaatcaaagcactctccttaggcttatcattaacaccaccaacaatgcccattgccttgtccaaaacagagctcccctgtctacaaacagtgtacttatatggaaccaaattcataccatccctaacacaattcacaacacaacactcagcaatggcataaaaagcaaacttttccaatgtagtaacctgtcttttaatgaaaacaattggcttgtaaccattattttcatcaccatactttctgttaatctcttcagcaatggagtttgtttcattctcaacatcttgaacatctttaccttgacttctagcagggttagtaatctgaaccaaaacaactttacctcttaagtgaggatgctcttccaagagttgacccatagcaagaaacttcaagctaatacctttgaacaaatccatgtcatctacacccaaaacaacaatctttccatgatattcttctctcaattccttgactttttctgcagtttcagaaagagacaaaacagactgaagctgacccatatgaataccaactggtaagatcttaatcccaactgttctaccataatattccaaaccaatataaccccttttagactgataatccaaacccaacatccgactacaacatgacaagaaatgtctagcgtaatcaaacgtgtgaaacccaataagatcacagttcaacaaagcctgaagaatctcattacgaacaggtaaagttctgtagatttctgaagatggaaaagggctgtggaggaagaaaccgagtttgactcggtggaatcgttttctgagtaaggtaggaagaatcatgaggtgataatcatgaacccaaatgaaatcttcatctgggtttatcacttccatgattttatcagcaaaagacttgttagcagaaacataggctcgccattgtgacttgtcgaacctcgaagctccttggcttggtgaaatgggtaacatgtaatgaaacagaggccatagatagtgtttacagaatccatggtaaaacttgttatgaatctctggtgacaagaaagttgggacgcaacgaaagttttcaaggagaatttgggaaacctcgtcctgctccgaaacatcgatctccacttcgagacaacccacgtagattacttcaacttggggaccgaacccatctttgagttgtagtacgaggctgtctttatcgagttcaaacgaccatttcgaggtttctgaatttcttctcgctcgtatcggtaactggttagaaaccacgatgcgtcgttcttgtacggcaccggaggatgtcggagacgtaacctcgtcgttttcgaactcagacgacggcgacggcggtgatattactcccggtaaagacatgagctttgggaaacgattcattgcccagagatcgtcaatggaaagcaaattcaactggtctaaacgcgatgatcccgataacatactgaaaataaaaatcaaaacttttttcttgggaaatgataaaatttcgattttgataatgggatttggatagtttcgatcaaaggtttggtcttttgggatttttcatatgtgggtattgcagaggtaaatgaatctaagtgtaaggaaaatcaagaacgttgttgatacaccttccataatagagagagaaagttagaaagaaagaaagaaagaaagatctttttctctcttaactataaaaatgtgatttttatttattattatttttttaattttgaataagtaattggataagaacaagatggtacagatgaaattttgagtttttatttattattatttttttaaaaaaaaaaattaatggatagatatggttagtacgtaagtgaaaagtggatgaatctaacggtggagatttaattgggttttagattgtgttcattatcgtatacagtgtggtcgactgtagtggataattgttgttctaactatatccgacttaacatgctcttgtttgattttttagtacgtttcttttttatttatttatggaaatatggtaaattacaattttggttttatgatttggagatttttttttt

SEQ ID NO: 185592 - DNA, 847 bp, Cannabis indica
ctgctattttctttctcctcataatagtcaatcattttgtttatattcgtgatatatttattatttattagttaatcattttttttttaatttaaaatgtgtaaaacaaataattgttactgatttatttataattttttaaaataataactaacaaaatataactagttaatttaaaatttaattaattaatttaaattgattagagataataatttttatttatttatttttataataacaacttttttaacgaattaatttaaaattctatatatatatatatatatatatattaataaaaattttaaattttttaataaatcaataataaaatactctaatgaaattttcgataatcctcgaaataaataataatcatataaatactatgatgatgatgatacattatggggaacgagcaatttaaaatttatatataatttaattgtataacctttaaatttcttgattaaaaataatataactaataatacggtaaatagacttatattttcaataactaaaattattattaataataagcaattagaaaatataattttaattattattatatgttagataattttttaagttagtatttatcacattgataaacaattattttttttgttgcgcgtagctatattacttagttatactataggacaaaaccctatttaccatgcttttatcataaaggacaattctatataaatacctaagcatgaaatcctgatatccaaattataaaagcatgcatgataatcttaaaaataaagcctaaaatattcattcttgatcctacatgtttagtatcatctaaacaaagagcaaaaattcc

SEQ ID NO: 185593 - DNA, 1207 bp, Cannabis indica
ttctcttctctcaacgactcaaactgggcaacgatgcttttgatctgcgcttcaatggcgtcatcactcaactcaaacgcgctctccaccactctcaccacgcgccacaagctcaccacaaccagaaaccctcctcctttcccctcaagaaaaatctccaaaacaagcgccactgctaaaacgacgccgtccaccacatacccgggacgccttaaaatcgcgctgcggagcccgacggccatagccactgtcttcgagaatagtaggccgaggatcgcaatcccaacccagtggtaccacttcgttggtcccaatcgttcagcctctgagtgattgtggttattaacatttttattattgtgcttgttttcatcgcaagaaatcagagacgaggagagctcgagagtggtgagaattaagtcgacgaggataagaaaaatggagatatatctaatctttttggattcgaggaaatcggtcagcttctttcgccatggggccgggtttagctggttggattgggtgatgaagaagagcttcttccattgttgcctccttcgccaattcttgagaagattttgaatggaagtttgaagtgattcatcaatggcgattgagttggttgttgaaattgggggcttttgtatgcgaatctggtgaagggaagaggaagatgaatgggagttggtattgatggtattattcataatgaaaagatttgtgtgattgaggtgaaggtgagagcagtttggtgtgtttaatagaataattagagagagagagagattaagctttggagtcacgttgagtagatacaagtggctctgtactgtatatatgtgtcgtcatatagcttgaggttacgttaagcatgaaacctaagcaataatccatttcagtaaagttgtactacttgtttccaaaagtcggtaaaagctaccctaactaactttcaaatatttgagtcacgttttgtaacctttaagagtttaatcaaaataagcaaatacaaaaaagacgttttcactcgcgcgtaatattaaaataaaacaatttttttctgaacttttacaataacagtgatttaatcattctcttagatttagtatcattaatttgtttaaatgctgacgtgtctttgtaaattaatagcttagcaccctaaactttgacaactataaaattgtactcctcaaaataaaaatga

SEQ ID NO: 185594 - DNA, 2876 bp, Cannabis indica
agagagagagagagcccatagagttgatttgttaaatcttttagagagaagtaaagaatcatattgaaaagatatgtgttagtgatcctcccataaaaatgaattatagatggctttaaaaataccaagaatagaaaaagaaaagaaagtaggcaatatatataagagcccaacatgcagggactaacaacctacacttctcaattgtcatggttcatgcatattttattattgtccccataataaataataaatgaataataaacaaataactaataataatagcccaagttaaatggccttaaatgacaaccccatcaacattcacatggccttgttcccctttcgttacttgggtcatgaattattatagccaaaactaacaataatttcgtcctcagtgcgttctatatatgtgtatatatagggccctataaatatatatatcatatgcaaaataaaaagtaaaaataattacaggaagaatcttcgggagggattataaaaaagaatgaaataaaaatgaatagcatatttcataaaaatatataaatgaaacaaaacacaccagagccatgacagagagcaaaggggtacgacattaagaaaaaaacaagacagagaagaaaaagaaaataagaaacaagggaaattattcagcttgagagagtattggtaataaacaagccagacaatagctgaagtttaatacttcatgtccaatattattattacaaatatatataaatttatatattatgaagatctttaaaatctatataccatcaaatagtacagacacatcccacacaacaccctgctccaatatttgtccttgctcaacttccttacgacattaaaaaaaaacgagtacttttctggatcatacatatattatcatcactttcatatcatcaccatcaccttcatcagcttctgcttttgcatttctccattgctctaggagctgtaaattattaatagttaaacattatttgtgctcaaaaatatatttaccatatcgagagacatgtaattatatatcggttaattttttaagatatgtaaaaaagataattattattattaattgttaccgagtccaattgcttctgatcctttcattattcgcaagcgcttgcatgaatcaacaaacatcctgcatatacataaggccaagtaattattagaagagtaataaattaagttaattaataaataataatatagtgattattaattatcattaaaaatgaatataatattaattaacttactcccatggaacatcaccaacgagcatccaatctccatccttgtcttcataggatggtacatactcagaactattcagtagatccatcaactttctctcattcatgaagtctatcattccttcggccccgtaattaccttcatcatcatatataattattaaaaaaaaaacaataatacgttgcaagatctacacatattaattaccttttaatatcctataatacaataattaattattattttgtcacctagctacctagttctaaaataactttagacctatcaaacttttgtctgctgttagcttctaaggattgaagtggttctttctgattattctttctttaattaatacattactatcataactaataaataagttattgaagataagaaacaagcactatattaaataaaattatttaactaatatatctctttagacaaaaatcagaaaacaatcttgcgttcagacctcgaattttaacacgattaattattatttttttcccctaaaactactactgaccttttttattatcttcatgatgtaataataaataattttatacatatgttttttttgtattaatataataaatgtatgaaaacaaaatacatacccatagtgaaggaactgaacatcttggccaaggcatcagacagctcttggtaactctcatacatcttcaaatccaccttacgaagataaggtgcaccatccatgcaaaccttaacaaatgcgccgcttccgctgttgttaggggcggcggcaccaccgcctccgctgatgcttgtcttctgatgatcacttttctcttgctgaactgtgctgctcttttgagccattatgttcttcctgtaggacctcacaggtggccaacccacaacttgtgccctgatgatagtatatataaaaatgggaaggaaaacaaaataccaaatattattattgtcaaaatttttgtaaagataattcactttttaaaataaaaaatatatattttattgaactagtgcactgaaaaagtataaaaggaaagagaaaacttttttctttttgtgttacaactaaagatttataagtcaattaatacataatgattatgagatctatatattgagctaatgggtgaaaaaaataaggaaacttacttagctggtggcttagttagatctttggagagatttttgtccttgttgggagaagaagtagtagtagtagtagcagatgaagtagttgtaggattagtagtagtagttgtagttgtagtactaacagtagtagcagtacaagtctttttaaggttttcagaagtgataagatcttggtcaatagagttgtgaagatagttcagtttgagatcaacagtctccgaaaagcctctcttcccggaagccctaggagtagttagttcttggtcggttacagtattagtacagccgccaggcagccctagacacagctcagtctctttgaagttcaaatctcggtcgccgccacctccgccgagcatattagtcatgttccgacggtcacttataacttccatcaacaccacccaccgccaccgcaataacaagaagaagaagaagaa

SEQ ID NO: 185595 - DNA, 5436 bp, Cannabis indica
aattaaagagttaattcaaatttgatgattgttatacctaaatgttgaccaacaatgaaaagcggacacgtgtatcaatgcttgaatatgaatcagctcaaaccgcgcattattaaatgcacttaaatgactcgcctcgagaaatgcagttaatagaaatattcgaactcaccgctatatagccaatagcaagacataagtaataactattgactaatgagaccagcgagctaaacaggtccatctcgggataaacaaaatgtgcaatgaaagttgttcaaaacgaataaacaaagagcttgtagctcactgatccacacacttgcgagtatgtttaaggaatggaaacaacttcaatatctatttgcctcgtttttgacgcgttaaaataactaagtgaagagagaagatataaagatggagaagtagaattggaaaaagtaccaagtgaagagaaccttcaaatgcaggaactaaggtactatctgtcagcaagttccagcactgcttggaactgctgaacattagcttcatctgaagatagctgaatcactctcttaaaatttgaaaggtttattgttatgaattaaggtggaatttgttagaatgtaattcttagaacaaaccaactgcttttttcttagcctatttaaagggcttgtaattaccttgtaatgtcagaaacaattcacactgaactgacattaagagagattgagtgggaaagtgtcattgagagaaaaaaccaagagtgggagtttcggaaagttaaaccaaaatcagtgctcttggagctgaactcaagctaagttcattagggatctcttttgtaattctctaggtgcactcaacccaaccaagcttgtaattaatatgttaatgaaaaagaaaattcagagaaataacaagaagtcctttgtttggtttaacttgtataaaagtgatgtgtctcaagttctttaatattccgcaatttttatctattttgatttctagttttaattgttcattggttgattatgttagaaataaatctaactttcttgtttgagttctgtgttgtgagattataacaaaattattgagaaaatataaaaaagtatggtgttgaaatatatcagttagacgtaaaatagaaaaagtaaaattttaatgatgtattatatataaaagataaagaaaagaaacagttgggggtgttgtttttacaaaaaggtgtaatggtaataagtaaactcattaaacaatacaaaagtttaataaatggtaggattttggtaattgaataaattttatgtttgatgtaattttatatataaaaacaatcattaaacaatacaaaaatatcaaaactatgtacctgaaactattaaacaaaattaacatacctttgaagatcctaatccataatataattagtaactaggccaaataaaaactaaattggccattgaacaactaattcaattattaattatatgttatacattatacatatgatatatatacattatataaataatatatgtatatttacagtaaggaagtcattccaatttatgagagatatttcaattaacctcaaagtatcttggatcttcaggataatggtactccacgtttaactgaaaaaacaaaaaaacaaaaacaacaaatcattaacacaaatcaaaatcactaaactaatcatcaaagatacacattttcaaaaaactaccctcctcccctaacattattgtattaaaaaacccgaaaactataacaatgtagttgttcacattggtggctaatgatatttttaattgtttgtaactttgttcatgtgggcagggagatgggtctaattataccggctcgtggaatacgtcaaggagaccctatttcgccttacttattcattttatgtgcggaaaaatacgagttgcaagggcagatagatgggtgttaggtggctcaaggacattctcatatgctctttgcggacgatagttaaattttttgtaaatctactgagaatgaagtcggtaatgtgctggaattattgggggaatatgaaagagctttgggacagaaaatcaattttgataaaagctctgttttctttggtgccaatatggaggaggcaataagagatcctctttgtgatagtatggatatttatgaggctgatgaaagcactatgtatctggcgttacctaatactatgggagaaagaagacaattatcttgggctaacatgaaacacataccttgccctcatcatcatccgagtggcgttgagggaacacaactctcaaatcattgtagagatagaatcttcgttcctcatcaaggccctttttctgtggtttggaatcagggtcagatttgcatctctgtaatgacttggaacttttcggaaacaggcatataaatctaaggtgaatagcataacgcaaagcaccagcaccattgctactatcattgacccttgaacagccatgaacttgtttcttgcaagtttcatggcatgtttctgccaatttttgttctttccaatcctcttcaatgttgcagcctttcttaagcgcgaaagaatttaagcttttggattgttcatcaaaatcggcctcagccatgccattgttgctaaattcacttccttggtgtagtagagatggtgtagtctcatttgccttgcttgtttcaaaattactctctttgtcactgcttttagagctctccatgtctgtcttcccttgtttcgtttgtgtagaagctatcgtgatcttctgccgcaagaaagtctatcaaagaaatagagatcaatcatgtgattccaacaaactcatggcattttacactagaatctatcacaaattttctatgcatttacagtcaaagatagtcaatggtgaaagttcatctatcactattaaaagcacattttttttcttcagctataaaatgaataaaaacaatgcattatctcatcttacttttgtaccggccggcatgtcactcaagtcatagttgcaaaaaaaagtgtggagaggtgtcttttctggattgctaagaacctgtaataaggcattatccaaaagatattagcatgagcaccattaaaacagggtattataacttgggcagcatatacttttaagtttcataagagatataccaattgaattcggcccttcataggtatgcgcaggcggctcctgacagtttgtgaatcatcattgttattgcctcgtttcaatctttggcttttcaatttgtttgatgatgaatttcctgcaagatcaattgatgcatagtacaacaaataacagtctccatccacactgttcactgaaaaaggaagcttttgggattgtggcgaaaagttccctccagttatgcttagcacagctaaaaagccttcaattccctactcataagatcacaacaacaacaatttgtagagtcagatagcctacaaagaattcactaacaatcttactaacacaacaacaacaaattcgtgtttaccttgctcaatttaccagataagaaccggcccgataatagagattcttcgaatgaaccaaccaaggacctcctaatgggaagcccactcaaactttttatgaatctcatacattgagaagaagtaggggctgatcctctagacatagagatgcttatgtcaatactattttcaacagaagagggatggaactctttgtaaaaaacatcatcttcgaatgatttgcttgctatcccgaaatcctcttcttcagaagcaaagatcatgcctgattcagaaaactctattgttttctctacattacttaatactgaatgaccataatccaactctcttttggtatttttgtatcctgttgcagatttcagtctatcagaaaacttaggaccaaggggtgacaatgaaagaggagatgacatccccttttttgatgatgatgatgatacagatatttccccattttggggttttatatttcttggtgatcttggttcattcaacaatgcaggtgaagataaacaactattgtgagatggtgatttcccattttctagaaaagggccatcagtgaaaagaatggactccatgacactatcatgaggtatacacttcttttctgagccacttgataaagaccaatttggcaaggtataatggtctttgcttccaacatttgctttcttatgatcttgcacagcagaagcacttaaattaccaatcctaaaagtggaatctggaggaatatttctgctaccaatgtccaaaggatgacccccaaaatgttggtctggaaaaagcatgttattcaggggtgacagcaatcgctttcttactaaagatccactagacttagtttcattagccgaaacagtgactgcagcagaagaatggacatgagaagctgacacacttttgcaaccaccattgccaaaactattactgctcgattcgaaacctacaatcctagaaacaggacggtggatattccttccgtatttaggagcaaattcacctgcattgtctacagaaccaagcctcaaacaattaacattgccagtaacatcagggaaacttgaaagctctagtgatgttctccgatggaaatctccaaaagaggagcacatggaacttccacttacacccacttggctagagcttccatgattcataccatccaaatcacagctactcacatctgaaattcgaggagggctttgtaaaaatgcgcccaacaccgctgcagcggcttcctctgaagttccagcagcagaaacttgaggtaagcccatcataaatttttaaaaatataaaataaaatccagttatctaaaggagagtaacctaatgctataggcctttgttgcctgcagcagatttaactactttaactaatgtcatctaagcaccaatgatttcatcctaacaaccacaacaagttttaatttccaattcaatcaatataaccaaccaggacacaaaactgcaagttccaagattcttggtacagctgagaaaataagtgtatgccaaaatttaatactatgtatccaccaaaggcatcagcttcttggacatttcagttaccacttccttaacaaaatgtgaggaggtattgaagcatatttcacacatctgaaattcactagtagcaaaaatctcctggcctccataccagcaagataagaaacacatgttcaaggttgtaaaattaatcaaaagcctatatacctgaaaaaattaaccattacataaacaaatcagtgctagttcttgctgcctcaataatccaacaaataccaagacttaaaaaaaaaaaaaaaaaaaaaaacaaacaaaaaaactcatattgaagaagcacatgtttgaaccatcaaaactctcaaatttcaatcatcaaatgaagataatcccacaatatgaatgat

SEQ ID NO: 185596 - DNA, 2770 bp, Cannabis indica
ataggctatgttgcgtcattttgttcgtgcttcttatctcttccatgggtttatgctcttaggttgagatttgggatctaaatactacagaaagaattatgtgtctacctcaaaactgtgttggtggctcaccaaaattttccaccaaagaaagaggtataattttatttatttagactgttgactcaaagcctcaaggttttggtctgaaattatttattacagattttactatatttgatttgacatctgagtaagtttcttgtaggaatgtgtatggctattcaagcatttatcccatctgaatcacaaggagctataaatgtcctagctgggtatattcgtttttttttctttctaggccacctgaaattaactgttttatcgttatcatatttagtggcctttgtagcacattgagacatcatccttgattgattgatagagataatgatatttgattgtatatactagttgctttgttctataggcgtgaggtcaaattatatcctagttgtcagtttttaccgtcaagttacacctcttgaatcgcatctttatgtttaattattttgggggttgtcttattaaaactagctagttcagggttatgaggttaagtattgtttatgagggctgatacacgttgattattgcattgaggttgccatgaattgtgttactactctctagaatgaattccttggccaaagcattgtaccttctccaaaaaccatagtccactttaaggaatatggttgtgttaatttatttttcatgatgcagttatgaggatggttcaatgctttggtgggatataagaaataacggggttccattgacctctgtcaagtttcattcagagccaggtgggacataacttttaaagaactaccctcatactaatcattcatttctcttatgtgacagagcctgatatttgtgtattcttatgcagttctaagtctatgtattgatgggtcatgcaatggcggtatctctggatctgcagatgacaaaattgtaatgtatagtttggatcattcaatggtaattctacaacatcatgtcaagaaaattcacacacacacacacacacacttgaccgatctagtaaaaatactagttttgtgccaacttatcaatgtattggctaatagtccattttcacatttaagggagagtgactgattatcattcaacctaattattaactaagcttgtgtaattatttgattgttaaaaaaatattatagacaaaattatgtgtgagaaattctggttttgccccatgcaagtgttgtcattgactgatctaattaatctcccgtgtataatactctgtaagttttgtagtagaacgggaggttatgttcctttcttgactaactattagctacaatgatatttgtaattgatgatttgtttgtctatttgaaatatgaaattcagggcactttagtggtcaagagagaaattaatttggaacgaccaggcatttcgagcatctctattcggccagatggaaaaattgctgcgactgctggctgggatcacaggttgggatcattctgttttatttccaaattactatttggctagttttctatttatggttcttttgtataatgtcatcatatgacctcatattattagcattgattcatatttttgaatagagttaattatttgaggagtaatgtactttacagaaatcaagtcacttttattgaaatttcttaccacatgtggaatgtgtcaagtttgtatataatgtgtgtacatatatatatatatatatatatatatatatatttatatacttgtctgttatcaaatggtatttaatctgggaattctgtttagcagggtgcggatttacaactatcggaaaggaaatgctctagccatattgaagtatcaccataagacggtaaatcgatttatactatataaaagtaaaaagaaataagagaatacttagttgctgtacttggactcattgattctttctctactgtttatgtttgaagtgcaatgcggtctcattctctaccgattctaagctaatggcttctgcatcagaagacacaactgtggccctctgggagctctatccaccacaaatctgaaagaaaaacatctcttgttgattatatatagctctttgtaaatattggttttgaatttgatgtaacgcaatgcaactctactcgtctaaatctagcttgtttaagttgaaacttgagagcttatccttttctcacttaaagaacatttcagttaccttcagagcttctaaatcttgcttgtttaagtgaaatcttatttcattgtttatcatgcaaaacttttattttgtggaatttattttacacatctttatttaaatattatttgaacgaaccagtaaatttcacgttttatggctggagatcttgtacttatggtttggtgaatgcaaataattggattatcaaatttcacatgattgcactgagttttttttaattcattttcatgaagttcataatttttataatataaatgtttataacaattttttcttctgcgttacaggagtaataatttcttattgttttatgatatataattgttgtttgatatggagtctactgactagcacatacatgaagaagactttatgtagattttgcccctttttattctttctttatttttcggtttcttatcattttggatcccttggatgttatacttatttttttttgtatggataattacataa

SEQ ID NO: 185597 - DNA, 9102 bp, Cannabis indica
aatccctgtttgagctgatccttcagcttctgcaagtgcatcttcagcatctacgggaatggcaatgttgtggttcagcatcaacatcttgttcccaaccattatttctttgtttcggacagtggctttcactccatggccagtaatggagacaaagtctcgtgcttctggccagacatgattctcttcatcttccctgaactttttcgcatgctccacaacagccttggccaagggatgctcactgttcacctgattgatatcaccatatgagcattttaacaataagatagagaaatacttaatgttcaattgatttcatatttaaacatttgaatccatactaaagcactgtttccataaaattggtgagtcttgcacaacaatgacagcttacctcagtagcagcaacaagctcataaaattcgcgaagtaacatattcttcaggagttttgttttaacaaccacaggcttcccaactgtgagagtccccgttttatcaaatacaatgcaattaacctattatttaagaaaccacaagaacaagataagaaacactcaggttacaaacaataaagggaaagtaattagtgtttgcagtgaagtataaattctactatctagtacccactgaccttatgagcactttctaatgcttgaccccctttgatcagcacaccttgagaagcacctactccagtgccaaccatgactgcagtgggagttgctagaccgagagcacaagggcaggctatgaccatgactgatattccaaactggagcgcaagctcaaagctgtccatggaagatggtatccaagactctgggtagccatggtattttccagccaaaaaccaggcaaaccatgttaagaaagaaagcatgatcacctgcaaaataaagccacgcttttaaattttcacaaaccatgacctaagagcatagaaagacatttatatatctgaagtaaagtacttaccagtggcacaaaatattttgaaatgcgatcggcaaacttttgtacaggagctttagccatttgagctgactcgacaagttttacaatctgtgacagtgcactttctgatccaatccttgttgctctgatatgcaggacaccattctcattcaaagttcctccaatgactgaatcacctttcctttttgacactggccgagattctcccgttatcatgctctcgttgacatggctttgcccccatatcacataaccatctgaagcaacttttgcacctgggataattttaataacatcattcttttgaatcaacctgctgtcgatttcttcttcgttaatcacatttcccttttcgtctagagacaataaagttgctgtctcaggtgccaagtccatgagcttagcaatggcatcagatgtctttcccttggccaacacctctaagtatttccctagcaggataaacgagataagcattgagctagtctcaaagaaatctgtgcctttaaaatgtgatgaagtagcagctctcaaaaccgagtagactgagtagaaataggctgcatttgttcccaaggcaatcaagacatccatattagcagaaccacggcgcagggctttgtaggaaccagcatagaaccgccaaccaatgatgaactgaactggagtagacaaaacccatctcaaaatctctccaatacttaacatgttcacaactttagtatccaagccactcttaattccaggaatgtacataaaaaccatggaggtcagaaacactggaattgtaaagaccaaactccacatgaacgacctgtaatatttcttgatctcttcatttctatgagtttctctccctccacctccttcaggaatatatttgccttgtaacgcttagacccagttgtctcaatcacattaatgaaagttctaggccctgtcatatcaggtttgtaagaaatggagatttttttcccttcaagagaagattcaagagcgagaacccctggaagggcttcaagagactgctcaataatcctcatgtaatctccagtttgtactccattgatttgcaggtctatcttgctcatgtcttccccagaactaagaagaatagcttcgaatccggtgtcttctatggcttgcaaaagctgaatgtagcttacaactttaggatcatactgaacatttgcttcctccgtagctaaggcgacttgggcctcttggacaccctgaattacttgcaaagctctttcaatggtggaggaacaagaagtgcatgtcatcccttttatacgtattcggcatacttgtgtggatctgtcattagtgtcgtactctggaatgagcgtagcttcaaatccaacatcatcaatcgtttcacgaatggtctcctcctgagaagtggtacagatgatagcatgatgattccgaataaatgagaatgacatatatcagcacttagaaagcaatccttgcattgccatgcagtataactcagcaagactatatacgaagtctatacacatcaaattctggtggaacaaacgacccaaaagacaaaagcagaaaaaaaaccaaagcaggtcagcatgctttaaaaagtttggacctataaactaaacaatgaaggccaaatcgccaaggtaccaaccaaccaactacccatacaggaaaaacaaaagtaccatgccgttaatcaaagctttaaacacgaaaagaagtcataaaacaacaaaataaaacagaatgggagttgggataaaaacagaaacgctgtctttttctaactcctataataatgataccactagcttcagttaaaaattcaagtcaaaggtaaaagttggtttgtgcgtagccttgaaagtaaagaaaactaccatatttttgtgggtcatgcaacaaaggaaatttcaaggccagaaaagaaaacaggtcatgggaaattgacattatctctcaattatctgagtttgttggaaaagcaagcaaaagttaggtgaaaaattgcgaactgaaaaagacagaaaaaatgagctatttcgtttttcttcttctttttcccctactgggagctaaatcagtacttcaataataagaacaatggaacaaacatcaaatctattactgaaacaacatacatatcataacataagaaccacatagttttactgaaaaataaatttaaatatataataaaatttcagttccagaaacaaacaaattaaaagtaaagacaaaaaaaatgatgttaaatctcatcaaaactagcacagtgatacgagacaaacagcataaatacaattatatatacattatggatgtatatataaaaggtgataaaatgtttgatcaacttacgttaacgaaatcagggaagaagataacttgggcgcggccattgaggacatctacggcggcctcacgaatccccggaaggcgcttgatggccttctcaactgaaccagcgcaggcggcacaagtcataccgacgacactgaacagtactttagcctcggccctggacaccgtggtatcgtccacggcggctcccttagggtatttcggcatcgacggataatgaggggtcggcgaaaggccagccgaccggctactgccgttccgatttatgcaacccaacgccaacaacttcatcgccatcggaaatgaatattaaccaaagaaaaggagaggtaatgtcaatggtgaaattaaaaaaaaaaaaaaaaagaaagagggtttatatataaaaagttttggaaaaaaggagggtaatttaaaaaaagttatgacaaaaaagaaagagacagattgtatattaatttacactgacttgtcgcgtgttaaaattaattattatttttaaggctatttgtacccctaaaataataaatacacaacaaacaaaaaatataaacttaaataatttttaaaaattatttttaatatatttttaaattttttttcctcacatgttaatattaaacttattttagtttaacttttataatttttctaactcatgtatatacattttttatttttttaaaaaaattcatataattttttattttaattttcttgtcataatatttacaatataatttatttttatttaataggtatattttttaagaatatgaattagaagaaaaaagttgaaaaaacttagtacaattaaatatataaattttataaaaaaaataaaaattattaaaatagggtgttttaaaaaaaaattgggtgtaaataaattttccatttctttttaattttgaaaataatttttaatagactatttacttgtcttggttaaaagtaggaaaattctccaatacaacctcttaaaaagaatacaccgttgtatctaatttgtttcgccatctgaaaatattttttagtctatttttttttcatagtcatatacgttatagttattgaaaatatcttgtaaaatttgtagaaatttaaaaaatttaacacaacaaaaataggattcaaatagtttattgcacgcgtaacctttttatttttatatgcatgtgaaatagattaattgaacattactttctatattctaattgtaagtgataaaaataactgcaggggtaaaatgtaattaatttgcaaccttagaagtaaagaaagaactaatatcatgatgtgataggccctcaaagaaatgtatcatatcactttagaggaaagatagttcaagagaagcggagctcaaacaagaaaagatgtggagcataactccgaaaagagaagagcaaaactctagaaataaagaatagagcttgaagaattcaaaaaatgaaaagaggaagcatgcaaaggaacatacgaaaatcaatccacatggaccaatctgaataggaaaaagagaaggacatataggaaaattaatcactgtaatttttctctaattttatcagtacaaattctgttattgtcttaaacagagcacatataaggcccaaaatcttgatcattgggtctagataaaaatatgtagtatcggctacttccaagtgttctttcaataaattcaaaacagtctatactgacgaaactggaagaaaattatagttttacaaacattgggtacttatgccgctaaaaataaatattaaatttatgccgcttacaaatataaaattttgggtaattatgccgctatttactctttctaaaataattctccacaaacaaaaaagataaaaaaaaaataatattaagggtcatttttcttcttagcccaatttctcaccaaaactgaatggaatgtaatctaatgatccaacgaatacttctgggcctgaaaatgaagcccatcaatttactgtttctttccaacttttttcttaaattttttgagctggttggtgaagcaacaagaacctctgaagaagaagaagaagaagaagaagcggttttcttgagcaggattgggtgattttttctgggcttagtttttttaaaaaatagtttttgaaattagttaaccaatcaatcatatatagctccttaaattaatttctcctttgagctccaagattctccaaaaccccttcgctcacccacttcgagatgatgaagaagctttctcgtctactgttaacttcaaggtacttccaccacttcaactctactttattctgatatccattctcttttcatcgccacaaaccacaacttttacagtttttgagaatatttttgttaaatcgctccttctgtccatataaaggttgaaactttccataagcaatggtaccatatatgtttatagactgtcaatttggacgccttagttagtttttgtgcttgtgtaggtgtattattggatataattaatttatagttggagtttgctctacattttactataccctgtttacttaacttgcattactgtgtgtttagatattggaagctggggaaagttatgaaagtagtagttttttaaaccttaaatatattatcatttgtttttcctacattactttttggagtcaatatgagcacacaatctccatcagggtcagttatctcttcaaaatgtagctagaagattcttgttttgtaggagattatagtataattttatcaatgtcatgttctggtaatttggttatggaattcaacattataatctaccatccaagattcactttccatcccatgtattatggttcctggcttccatacacatttttttatttatttgattattttctgaatccttgtagtttttttctttccctgtttgtttatgaattacatgctttccagctccgtttaagttatctgcattggattataataaaatgtaccatagccatggtctcgtggtttctgaaattgcaaattcgaataaaagtgaaaacataataataggaaagagaatgggaataggaacagaatggaataatattttttctcgcattgaaatagtctttccttccattttaaaatggaatagtcatttcaccaaaatagtagaaaggccattacattggaatgacattttaatactttaacatgcaaccaaacaaaaaaatgaaataaaaattgtttcatttccattccattccatttcattacctccaaccaaacaaaagaatggaataaaaagttcttgttcatctatttggcctcctctcacatgttctcttggtaacaagtttgttattaggtcctgtgactattgtttttattaaatcatactctcatttgggaggaataaaaatataggcataggaatggaaatgggaatgggaattggaataggaatggaatagaataaaatttaaaattaataaaaaaaattattaaattttttaaaatcttgcattggaatagtttttctttccatttcaaaatggaatagtcattccaccaaaatgatgaaaaggttattccatcggaatggtattccaatagttttaaatgcaaccaaacaaaggaatggaatgaaaattgtttcctttccattccatttcattacctccaacaaaacgccaccttagtattgacattgaacttattatatttttccaggaagatgcataatctatcataattctgtttcttttctttccgacaaagaataagaacaagatttatttgggaatgttaatctgtcattcttttaaaaaaaatccaaaaaagatgactattgtgatcaatatgagactttgaataatttccttgttcttaatgtatactaaggaacttgaagtagtttcattcaaatgctatcaagctgattcttctacttgttaactcgcacatccatatgggttattctgctattataattaatatctgttttgatgttaatggttgtttcttattcttttctttgttgaataaggaatcagatatctagaaacataacaaatgggaaggacggtaatctaagcaatggattactgttgcgtactttcacttctcatgctggaatttcaacttcgggacaaaacattaacgttaaaggttttgtatttttactatagttttgctgcttttacattttcatttcctctattgcggtaatgataaacgacaaggttatcatccatcttgcttgtttctaaacccataggaggtattgcaggcttttcagcaccgtacattgtttataagggaaaagctgcgttctctgttactcctgttctcccaacattcactaagctagatgtgtgtgattctgatcctttattctttgatctttaatttatctcaatagtcaggaatttaacttgtgtacattttcaatcttttatttttgcttagtctggacttcatgtggttgaccgcgggggttgcatgatgttgaagttcactcctgccattggtgagcgcaaatatgattgggagaagagacaagtcagtgatttatattccacttgttattctttaatagtttgctgtctgattgcgaagagtgattatgcataaagagctcacttggcaaattttctctgctgggcttgttgtctcctgtcttgcatcttgattaactaattgatatttgttttctagttgtttgctttgagcccgacagaggttggatctttgataagcttgggtcccaatgatacctgtgaattgttccatgatccttcgatgttatcaaggttgatttctttcgtgttttcttgtgaaactactatgaaatctgggatgggaaatttcactttataaaaggaatcaatgctttcttagtctgacttaagccacctcaattatcattatctacttattttctaactggaaaacatgtcgactccttaaatttatataaattttgtgatgcagtaatgcttttgaaaatagttagcagtagatttatctagaaaattgtgaaaataattagatgttggatttatgaaaagaatatgtattgtagtaatgctggacaagtgaggaagagtttgacggtcaagcctcattctactggcggtggctatatgatttccttgagtatgcaacccctctaccaagcttttgttttgtttaacaacagtcttagaaaatacctgtgaaatctttaaacaatgtctgaacttaatgttgataccatcttttttgtgattgcagctgttgtcaacaacattctaaaatccaaggattatatcagtgttccattcacaactgctgaatttgcagttgtaaaggcagcttgcagtgtatgacataccagaaacaattcaatatatatattttgtattgggatgagtaaggagagaaaattgatgtattttgttgtttggttttgtatgtgcagtatgcgctgcctcatataatgggttgggagtcgggtggacagaaaaggtggaaaagggtcaacggcggaaggcgaacaccggatattaagtttgatcggggacaacgtcatggattcagagtgggacaaatgaaagctggatatgtcttccctcttttgtaacagatctgtgtgtgttgttttgtgatgtgtaaacccctgttttattctccaattttccagggataatgggatgttgaagtaggacatctcaagttattgaactgcatctgtcgtactacaaaaactaagggaaactaagagaaaatgctaatgtgctac

SEQ ID NO: 185598 - DNA, 4367 bp, Cannabis indica
ctttactctggtgttctcttacatggtatcagacgccttctcggtcccttcgttctcatggccgattcttcttctcaagcttcttccatagccagagctccaggattctcgttgccaaaaccgaatgcgatgtcgttcaatcactcgttatcagtaaaattagatgaaaacaactaccttccatggcgtcatcaagctcttgctgccattaaaggtaatcgtctcctaaaataccttgatcctacttccactccctctaaattcactactgctgcagatgaaaattcaggcactgtaaaccctgaatttcttgaatatgatattcaagatagcctcctcgtttcatggcttctttcttcaatgtctgagaaaatactcacaagaatggttggctgcaacactgcttctgaaatctggatcagtcttgaacaatactactcagctcagaatcgtgctaaaataagccagtttcgcactcaactccgtcgaactcgtcttactggcaatctcaatgattacttacttaagatcaaacaccttgtggactctcttgcttcgatcggccatgaaatgtctcctcaagatcacatagaagcaatctttaatggtcttccgcgcgattactctgtctttgtcacttctctctcaactcgcaaagacgaatacactgttgctgaagttgaatctctactcatggcccaagaagttcgaaacgaacaacaagactctgaaatggatatttctaaaccagaagccaatcttgcagcccacctaaaacctccaaacaccaaacctcccccttcatcaccttccccattcaataatggagttcgtactccttttccaacaccttacagaggccatccctatcccttttcttatcccaactatggcatgccatatcctccaccttattttcccaatccttatccccctcgtggtggtggatatcgtggatcaactcgtggtggtcgaggctacaccacacctaaaatccaatgccaactatgccataaacaaggccacactgttacccaatgtttttatcgatttgacaaatcgtttacagggccagaatcatttcaatccttccctgcaactgctaatcttgctgatatgcaagctatgactgccactccatctacggttgcagactccagctggtatccggattccggtgccacaaaccatcttacaaatgatgccaacaacctcacatcttctcaagaattccagtctacagatcagatctatatgggcaacggttcaggtttgcacattcaacacattggtcattctactctcacctctcctttcacctctcaatctcttcatttaaataatttactccatgtccctgctataaccaaaaatttaattagtgtctctcaatttgctagggataacaatgtcttctttgtattttatcctgaccattgtcttgtgaaagatcaggtcaatatgaagactttattggttgggaaagttgagaagggtctatacaaatttgatcaatgcctatccactccaagtttctcatctgcagagcccagagtttctgcatctgtgtcttctgcatcccctctcgatcctaaatgttttcacactagctctaatgtacctttatccaatttcaatttgtggcataataggttgggccaccctgccaaaaacactgtacaaactgtcatgaacaattgtaatattccaaacagtaataagagtgagtttgatttctgcaatgcttgttgtttgggtaagcatcataagctcccttatcctaactctgaaactgtttatactgccccattacaattgttgcataccgatttatggggccctgcccctatagaatcttccaatggatataggtactatataagctttgttgatgcttactctaggcacacatggctttatcttcttagaactaaggatgaagctttacccaccttcacaaagtttaaaacacaaatagagctacaacttaatgtgaaaataaaagccattcaatccgattggggtggggaatatagagcctttacaaatctattagaaaccagtgggattgttcatcgtgtttcatgtcctcattctcatgaacagaatggggttgtggagagaaagcatcgacatatagttgaaagtggattaacattacttgctcactcttcactacccctaaagttctgggatgaagcctatagggctgctgtttttctcatcaaccgactgcccactaaggtgctaagtcatatcagtcctcttgaaaaattatttcacaccaaacctgactactcggctctcaaaacttttggttgcttgtgtttccctaacctaagaccctacaacaaaaataaaatgaactataggtctgttccctgtacatttcttggctatagtttaacccaaaaaggctacaaatgtctctctaacgatggtcgcatctacatgtccagagatgtcttgtttaatgaaaccgtgtttccttacaaaacatcttctacctcaccaccatctgactcaactgaagccttacatcagtttacttcagcctttccacctgttatatccaccccactccccacatctccaccatcatctatctctccctccaactcaccctccagtatcattcccatctctccttcccctgtatccacattaccaccaaatcctacaaccttaccttcttcttccacacctattttccaatctccatcactttctgctgcacctgaacctactgcttcctcatctggcagtccctctgtccctgttgtgactaatcatcaccctatgcaaacaagaggaaaatctggcattagaaaacctaaagcattcatggcatccatttttccctccactgttaaacaagcccttcttgatccaaagtggcttgcagccatgcaaaaagaaatgacagctttaaagaaaaacaaaacttggcgttatgttaagcttcctcctggacgggaacctattggttgcaaatgggtttttcgaatcaaatacaatccggatggcagtgttaaagagctcaaagctcggttagtggcaaaaggctatcatcaacaaggaggctatgacttcaatgagacttttagtcctgtcataaaatcagaaacaattcgggttgttctcactctagctatcacaaaaggttggaaactaaggcaattagatgtaaataatgcctttttaaatggtgaattacaggaggaagtctatatggttcaaccaccgggtttcattgatgcatcctatcctgatatggtctgtaaactggacaaagccctttacgggctcaagcaagcacctcgggcctggttctccaagctctctactgctctaaacaacatggggtttcattcagcaaaaactgattcctctctgtttatcagcatcacacctactgatatcacctacatacttgtttatgtagatgacattattgtcacaggatcaaatgaagcacgtgttggtacagttatttctaatctgaatttgcaatttgctcttaaagatcttggagatcttaactattttcttggaattcagattcaccacactacttcaggagttcatctctctcaaaaaaaatatctacaggatctccttgttcgcactaaaatgcaggaagccaaaagcctcaattctcccatgcaacacggtttaaaactctccaagtttggcagtgatcctgttcaagatccaacacagtatagatctgttgtaggagcattgcaatatgctactataaccagaccagaaattgctttttctgtcaacaaagtctctcaatttatgcaatctcctttggaagctcactggattgctgtcaaaaggattctgcgataccttgctggtacccttgatcatggtattcatctaacaaaatgcagtgatttccatatagaggctttttgtgatgctgattgggcgtccgaccctgatgatagacgctcaacgagtggatattgtgtatttctcgggtcaaatttagttgcttggaagtccaaaaagcaacaaacaatctcacgatcttcaacagaggccgaatttcgcagcttagctgctactgttactgaaatctcttggcttcagtctctacttcatgagttaggacctcttgcaactccaaaatccactccaaaaatctggtgtgacaatcttagcacagtaatgcttgctgccaatcctattctccacgctcgcacgaagcacatcgaaatcgacttatactatgttcgggataaagttctcaagtctgaattacaagttcaacatgtccctgctctagaccaacttgctgattctcttaccaaagctgtgtccagttccagatttgcaattctcagagacaa

SEQ ID NO: 185599 - DNA, 3252 bp, Cannabis indica
ttcctatctctctctctcttttttaccatttcttaaattataaattttataaatttaagattaaggatattatgatttcatccattagccaagataagctacaaataattatgttttttagtatttgaaagacaaaaatcctacgaaatgtatgtagatatataaaccaatcaaacccactaagttgtcaagttatttaaataaaattaataattatatagtgagtatgattaaattcaaactaaaaaaaaaaataaatcaagcaatgaaagcttttgttaaaatttggtttgaactacataatcattaactagctaagatatcactcatagcgaaatcaatgaatctaagatctgtttatactatttaagcaatatcttctaaagtataggagaatatttttattgaagtgaactaagtaaaaatattcagtttccggaccaagaaaaacaaaagaaataataatataaaataatgtgcttggagtgtacggaaaatgttgattccacgttctttcattgactacaatcttatttattttaattttgacattagcaaaaaaaaagaaaaatgggcatttcagattttgcagcaccaaaaccaaacaaaatcccccacaaaacaaaacaaattaaacacaactattatttttctttgttaaattttggcaacaaaaaagaaaaagaaatcatacacgtgtaagtgatttgacacttaatcacgtttttccgtttcatacatttttttttaaggaaatgtctgtttcattgtttgactagtactacagtattattttccaccggccaaaaaacacatttgttatgtaaattatgaagtttatgcaatacttaaatgcaaaatgtatgttcaattaaaaaagattattgaaatcaacagaaaccaatatgtagggtaggggcaatttcgcacctataataaatatgtatcatattatattatattattctacaaaatattattctcaataaaaaataaaaaggagagaaacaacgtactataagttcccaagtacagatatttgttcccaaaaacacgtccaattcgagcctcccaccttccattatggtgatgcctaggaaaaagaaaaggaaaataatactattaatattaattaatattaatgaaacacttaatcacaagctgagttcaaccagcttaattaatttcatttcaaaattcaagatacgcataatttttcagtgaaatcaaaccttgaccaatatttatgtaatattattataccatttcagaaaacaaaaatatatataagcatgtttttaatgttaaaattaataagtataaggtcctcatagtattttatcatttacctagcgacccctcgatatttagaaactcctctagaaaatccgctactcctgcgccgcaaagaggccaagtactcttccttactgactttttccatttcttccatttcttttgtatatgaatctgtctgcatcaatgggtcaattcaaagatttgtaataagacaatgggtgaagtagcaatgttaataattcacacttatcactaattattaaattaattattattgattaataaataaatatagtgttaataatatatttaaaaaaaaaaatcaccgcatcataccggaaaattcaaggttgttgtagcaccccaatacttaagtgccgctaaatcgtacgtgcgagcagctgcctcctcactatcataggcccctacatcacaaataaaaatatataagaaacaaataaaaatatagaaagtgatattatctactctaaacttaattcacactggtttctacttaattaatacgagataaattattacacaattgactactctgtacattaattgatttttcaatttaaacaaatatcggtaatatttttcgaaatatatatatatgtgtgtgtgtttggcttggtaatatattcaaatttcaagtccactaatatagtgagagatggttatgtatgttatatatatataagaataataatataaaaatatatataattataaaataaagaggtgcataaaaagatacttacccaaataaactacattgagcggcgacgaagggagtagcatatgaacgttgcaaatgacagagatttatcaggaataaaaacagtcagaactcagaaatgcataacttaatttaaaatttataaaaagaaaacataataaacaaacaatattaagctaatagatctacttgattccctataatcaaggtttttttaataaattaatttcaattttctttttcatttttttataatttttaccttgccttcctttcttgttctgaacattgttccaagaactcttatcccacaaatgagcttcaaatctaccagtccatctatgtctggattcaaattgaacgataaacccagaatttcacacatgcaaacgaaatccgcaacaaaaaagaaataaaaataaaaatcgatcgaggataatgagagaaaaaactaattaattacctggtgactcctctgtatatagagcttctcctttccagaggcagatgtttgagctttgacattttctcgaccgatattctctttcctggcacgtttaaccttctttggtttctcaaattggacctgaacaatttcaggctccacgcatgaggatgaagaggatgaagaacaagaagaagaaggagacctcttcatgcctttctctctctttctcacttttcctttctctcacttacccagaaaatttatcaaacaaaaataaaaaaaactagttgaggaaattagacatgttgggtaagtggatctttcaatactgcctaacttttttttcgttgttagattgtacaatgagagagtcacagtagttgttagaagaaaatcagtgaaggaattacccaaaccagagagagtaatcagatcatagagaatatatttatatatatatataaatgtcacctatctattttgctaaaacccaagtattctgaatattgtgtttgtgtgtgtgtgcgcgaacagagaacaaaatggaggggttataaggttttgcttgtaagtcttaaccttgggttaaaacttaaggtttaggtcgggttaaatctttaaccacgggttaattatgtgccctacacttggctttgaggcgcagccatgctaccaatgggattttctctattcgctggcctttttatgtgctgagagtgaggaatctctctttatttttcaattttagaaaaaaaaaaaaaaa

SEQ ID NO: 185600 - DNA, 7313 bp, Cannabis indica
ccaaatctatcccctagagccatgatcttagaccaaaattgttatttagcatggttgtaaggcggtccatacacacacgagaggagccaagggtgggtagggggtccgaatagacaagacccgaaatatggttacgagagcaagagatacactcaaaacaaaagccagtcttccaagctaaaataatatcctcagcagtaccaataggcggcacaaaaatattaaagtaaaagtggtgagctttcagaaaacataccaggggattagcatccaccttgagctcagtcaaaaaaacaaaatcaggagagcgcgatctgagcagggacttcagttcgcgaactgtagaggtctgccccaaccctctacagttccaagcaacacctctcatggctcctgtggaagagagttgacattctcctccacagggataagtgagtgaacagataagctggagccagattcttcaattacgaaagagccaatcagatgactcctcctaacaccattattgcagctcggtgaactagagatttcaccagaaggctcttcagaaggttcttctgaaagatcattaaactctgccctcgattcaaggtccctctccctagtgtcccaagggaagtctctaacaacattcgggtgttttctaactattttgtgaggtctagtgcacagtgaagtgaagccctcaaattttctcttcttaaaaggcgtagtacgctcgttagtttccgaagtgggcatcactccatcaaggattatgtttgatccttaaaggttggctcgatgcagtaaatcatctatgagataggaattctcataaggtataataccaataactaacataagaaaaaatataaaacccttataactaacatatagttcttttaggaatgccgatgggatatgcaccaattaatcattttttctgaaaaaaaaattaaagaaaatgttgtttggatttgttcttattcgattatcggctataaaattgcaccacaaaaggactctgttaaccaagttgccaaacgagcccaatctctctctagctcactgctttgaccgaaagatgtaaagaagcgcattgcgcactcctcttcccatctactctggctaaaaggatcactctctgctcgtctctgcttcttcttcttcctcctctctctctctctctctctctcaacatcgtttgattaatgcttgtgtctctttcttgaaaatgacccagctctcgtctctttttattactccttaaatacctccactaactcagtgttagccagttcttacactccccactaccttaaacacccaaaaaagagaacccatttttagttattctgctggccattgttggaagcttcgtgttcggattcgaattctacaaccccggttgttatcgttttgatgaattttggggtctttgaaaatggatcctacattcataaacgaatcttcattctctgctgccaacccatcttcctatagtttggccgagatttggccatttggcggagaacctggtggcgtttccgggctgggccttcgaatgagccatatgagccaaaacccaagtgggcttggagagagctccgggaatcgagatgggtcgatgaaggaatccactgtaactgggcagagtggcggtggtggtggaaggaagaggagggatgtgagctctgaggatgagtcttcaaaggtggtctccactagtagtgccaatgaattggttcgtcttttagaaagttattgtattgtttttttagtcgtatatggaaaatctctactacttcattgcacccttaaaaagaaggaaatgctattcaaatttggatatttgttcttgttaaaattattctcgtgaattgaattggtaatatgtagctcctttagatacttgatcacatatttatgtttcatttctgttttcctttcagctataataaatttgagacttgtgtgatactgtgaatcatttttaggcttatgagagtaaacatgaattgggttttgtgatttagtttattcatatatgttaaatcttactttggaactttctcatgagatgtttttctgtgaatttcatgttttcttttcttgtaacagaataactcaaatggtaagaggacgaaattatcaggatccaaacatgaaaatggtgcttcaaaagttgaagttgaatctagttcagtggttggtgataagccaggtgaacaagcaagtataccttctgagccgcccaaacaagattatattcacgttagagcaagaaggggccaagctactgatagtcatagtcttgcagaaagagtaatacatctttagtcattttgaatttactttaaacacttttaagcctttaatctagctctaaatctatgttgaacaatagtttcagttcttgtgtgattcacttgctcagtcaaatatatactgtgcctggaaacatgttctcatattctttatttggcaggcaagaagagaaaaaattagtgaaaggatgaagatcttacaagatttggttcctggatgtaacaaggtagttgatatttgatctaatttgttctattagattactttagtatgtgttggtagatgccacatagttgagcctgggaaaccaataatggaattggtgtctttgtacataacctggatctgcttatttttattgatttttcatattcatattattcatatataatatattggatctctcaattgcagcttcactttgtatcttacacgttgctctggtgttgtatacttttttgtttaataggttattggtaaagcacttgttcttgatgagataattaattacatccaatctctgcagcgccaagttgaggtattgcctaaaattaatgtttgaattgttactttaaaacatgatattctttactcaaatctttctaaattaattgaaccttttcttttgttatagtttctgtcaatgaagctagaaacagtaaattcgaggatgactttgagtcctaccattgaaggcttttcgtcaaaagatgtaagggtatatgcttatatatataaatatatgtatatatatattgaattacattttcttttccttcacattgagtgcaagaaagatgagatagttttttaaatctagtttattttatcggttttgtcagaagtgtatgttcaaatctgttaatttcatcccaataagattgcaaataggtataattctgtcttcatctgtagaaagtaacaatttaagaacataaaaagaaaaggcaaacaatttgcgtaaaattgtttgacccgttcctttattattagtcttgaatctgaacctttggaaatacaatttctttcttttctcaggcccccgtgtttgtagttttggtatagacataacaaagcttttcatgaacattgacattttctttttcttcgtaaaaaaactctgatttttattctgtggctccccctacgactcccgatgatacgcagtcttggactcaaaacacgtgttaattgcatatacattagactgggacttgtgtcctagactagaggtaatagaagttaattttaacatgtcaacttacttaaacagcaataattccattgccatttcctcatttagatgttcttccgttcctcaaaatctcttctgatttatttgtgtgccttattttgtatggaaagaaacttgtttgcagtcttttaatggcagctcaaggtaagtaataactagttgataataaatgggtaactaatgaaaagtcaactaggactacaaaggtaggggcttgggccgccctatgtcatgcaatcttatccctgtcattcatttatttgatgtgtaataaatgcatggttcatttatggatcacaatttatttcaacagaatgctttgaagtggcttgatttcttacctgataaagttgtatctcagattggtctgcaggcatttgatgctgcaggatcgttatttggttcacaagcaccaagggattatgctcaaggctcaccgcccgaatggctgcatatgcaggttggtggtagtttcgatcgacaaacataagacgaccattcttgagttcttctttcttaatctgtttggaacttgtttgattatttctgtatttgatgcgaaaatgtgtttcttaatgttatgaccattcttatcattgtaatacgatagatagtagaattcatctaatctccctatgtaccatctgactggatactctgtactcttgctgtatcagtacctatagaaaatttgttaaatttagctgagtaaagactgttctttcaagttttatctagatcttttgttccaaattctataacttttttctgtacaatcttctaggctattaaagttataatccagaaattaaggtagggaatctgaatcttcaataagtaaaaattatgtcaatagagatttaattgttgtgttaaaaagtcaagctgcaaatattctgaagccttacagcttaatgaatgatatactagacaagtcatgtatccaatatgtaaagccaatgttttatttgaatttattctttaagtttaaggatgtaaaagtaaaagactgaagccaaaagtgacatagctcgtacattgttcagtaaggactatttccactgtacatgcataaaagaagtaatgaagcaaagatacacttggagagaaacaaatcaagagaacatgtaacaaacaaataaatctttgggcagtaaatcaagcaccaactaccaagcttgctttttcttttttttttttaggattcgaacttgaaaacttctctttgtgagaaccactaaatcaaccaccgaacttggattttatgctgttgacgacatcgtctcctacttggaaggccttagtcaaaacttgattaggaattggtggtgttgtggcaaagagatttgtgggaatgacaacagccccaggcaattgactgttgaaggcagtgatgctcatggcctttccttctccaacatttcgctggaagtgaacaagtcccctgggaatgacaaacatctctccaacagtcaaaaccttggagtagaaaacattgtcagttgtaataaacccaactaggagcttccctttgatgaccacgccagtctcggtagcacgaggatgtgagtgaggaggattcaaaccacccggggcatagtctactcgattcatggagagcccaagagtgtttagccctggaaacgtcttaacattcccagcggtaacaatgaatccaaaagggttactatttgtgtcaccttctttgcttagtccactaaagaagaaatcttcagaagtagtttctgagacggatttgcaaggatatccattaatagagaaagtggcattaagatttgctacacagaagtcctgcaaaggatccgggtcggctgaatgagaagggagatgggtaagcagtaagcctagtaggcaaaatagaaggtaataacctgagcttgataggctaaccatggcttctttgggattttctcttcaataaactaaaaaggctgataaaagattgtactgtgataatttgctgcttgaatatcgtagtatatatatatataatgtatcttctgcatactaaacttgacaatgtcacaattaatagaaatacctcattttttttattatagcatttgagtcataaccagcaacaataaatagaattttattgtatgaacaaaaataatgtcaacatgataagtgttaaattatttggaacggtacaaaaagtcctaagtggaaaataatagtggtttcttctttctctttttttttttttctgaaaggagaaaaataatagtggtttagacggccattgataatatgtaataaaatgacacttattaaataaacatgacaagaagttcaattgacatggtcagaacataattatgtattgcatactcgtgagaaaataaattaactagtatttcctattatcattgacatgttcaatgacatgggtgattgctttcttctgaattggtccttcaacaaccatagcaaatttctcacaacttgacctttgatgacactatttatgccaaatatatatttttgagaacaagctctgcatccaatgaaactttgacaaggtattcggtagttagaaatgtcttgagacaattacacatgtgattaccataagaacacttaatcatcaatcaatgaccaaaagttttaaccactcagaaactaacaaccaaattctagggagtaaaatacttctagtacatgcgtataatcaaatgcagacgtatacaatatgagaataagctaggactattgattttttatttttatgaatatctatggtgaaacttcattttcttattatttagcctttgaatattgtaaaacccttgagccgttacacaagcattttcacaattattttaattaatttaagggaatttcaattgttttgaatgattgccaaggagccaaaagcaatagttgaatacaagaaggccaaagtttaagaaatcccatttgggaattctaaagggacagatggatcacagaataaatgaattaaaaaagagaagcgatggagaagtgttatatcaaagtagagctgcatttactataatagagtttgagttgtatttcaataatgtaaacttggaaagcctcaacacaaaatattctaaagttgagtaaaatatgattcaagagtacaaccatccataaccatattgcattataagcttgtgttacttaatctgtatatattttatccagtagaacgactgcttgcatctcaagcttattgtgttcaaatcatatccttctacccgtacaatggacagagaagagtaccgatttagtgaagatcaaattaagggaactaattatgaagtccaaatcaaacgtcgattctgcaattgtttgatgaatttgacccaaaataagaaaagaaaaatcataactacaatacacaatataaagcaagagtagttacctgtctaaagcagctgaacttatgggaataacaccagatggggatacaagagcatcaactggaatatcattctcggtcattggtataactccttcgttcataatctgtgaggaataggacaatgcaactgcaataacaaaacgcatgttatcttcagtaaaatactaaagcatgtttctaacttggccaagggagcataatggcacataccaaggagggttgcttccaattctttgtctttgcaagctcttggtagttcctgatgaaagtatcatagtaactgcgcaaaggttttttccaaacctgttagagttagtgatgcacatagtc

SEQ ID NO: 185601 - DNA, 3695 bp, Cannabis indica
aaagcttcatgtagcaggattttgttgagaaaatgtagattcaaggaatgtataatgaaggaaaacctttcaaagaatctgatgacagcatgtacagtggttgaaattcagagcaataaaatgtcaactcacaagtcacaagtcacaaacctttctcattggattaatttcagtgaggatggaggacatgaccaaataaaaacttaaaagaacaatcaataattcctcagacataacaaaatcccactttagataggattaactaaggaagagcattacaaagccagtgtttctgcgaagctagagttctaaacgtcaaaacaaaaaaattataaaggaaaaatttctcagataattggagtctagtagtctaccatagtagctagcttgtatcaagtttcgaaattggttcatgaagtacatagaggttaaagccaactttaaacatatcaatcttttaggcaacaaaattcacccaggcaaagctaaacaaacagtattcttttaaacagtttcagcaacagattataagagctaaaattttatatataggaactaaaaaacttacatcttcaatattggtgctatggtctgtagaaagctgcaatgcagtcaatcctatttcctgtgtaggaggagttgtctcgttctcaagcttcatttccctttcacctacagccaaagattcctcagttatgccctccgtacttccattgtctccctgcccttttgccacggcactcgaaccggtatcgttctgttcgtactgtgcaactatagcccgactatccccaacattcattacatacacatcctcgtctctcatcaacacagccaataaacatgaacccatcaaagctagctccggattcgtatcaagaaccttatccgtcatgtccaaataagcaagttcagtcaattcaaggcccctagacaatgctcctaaaaccaattcgtgatcaaccggaccctccttccgccttcgacctgtccgattagagctctcctctactctattctcaacctctacctcaaccttttctttatcctctaatccaaaattccatgggaaaagcttcttaccgtgaccatccctatgtttagataatccctgtttcaactttgacaacagaagccacctcctactcacggcggagccaccattgctgacactaagagcatcatccacagaaaacgcaaacctctgcgaacccgatagatcaagcccctcttcagccatctcctctgctagaaaatcacaaagccggcgccttctagtctcagttctttccgtctcgtccggatgaaaagtcactctcttcgcaacaacaggaggagtcgaatcatctctaggctcggatgggttgggttggtctaccaccactacattctccaccgcagccacattttgtgggttgctattgctagattcgtctacttcgtcaacctcccaaaacaagccctgtagttcattgtaaacagcccgatagagattgcccatcaggaattccggcgcatcaggaccgttaaacccatcataaatcccaacaaataaccagccctgttcttccgatacgaccacatgtacacgatcctccccagctttcccaagtgcccactggacattactctcgttcttaacttcggactcgtcttcttctcctcccatggcggaactctcctttcgacccacgaaattaagcaccggaaccacccatggccgttttttctccgaaaagttcctgtaaaaggccttcggaaaccccgaaatgcccttcctccgcttcttcttcacataaacggtaccgagcggagcagagaaatgaactcggccagagttgtccgaaccagctccaccaccactgacgttagggtccagtgggccggagagagctccacgctcaattggaccagaaaggaagaacccgccgcgctccattggacccgagggctcttcccctctaggaaccggttgaagaggcaaagcactgaacgaagaagtactctcaaacccattaacgatactccccctcacaccaccaccacccagagtggtctcagtggcatcgtcgtaaatattgtcgagctggaggacagttctgggagttgaagtgttggcgctgacggaagcccctgagattgtcctgaacccggtctctggaagtccggatcgggttctcggagctggtccgagcccggtaccggtttcgtgaggaggcgagaatcgaagcgactgagaaggggaaacaaagcgatccgactgagtaggtgaaaggaaacgagctgagctccgaacgtagacgaaggagtggcctagggtttcgtccaaaggctctgaggcagtgaagatcaagtcgtgttgagactgatgatggtctggttggttcgtcctgctccggttcaccggtgtgaagcacgggaacgcggtcgagattccacctcccatcacatttgattcaccctcctctctttctctctctcactgcgtttggcgtttggccaccaagaaaattttcaactcgattttccggcaaaagttcaaagagagttacctccaaattaaaaaaatataaaatacatatatatagggtccttgttaagtgagagcatcgttttcgtaagccgttagatcttaatgacttgaaatacaatggttgggattcgtttgcttacaatacaattgtccgcatatgattttttctcctaaacaacacattactccctaagtaagaagaagaaacgaccaaaatgctaaagtactcctccacccattttaagcccgtggaccttataaaatcaaccaatcagaagttaagaaaaatgctctcttagaagagagaaaaaaagttttttaaaaataatatttatatgaaaaaaaagcaaacgagggagacttttcttttttccttgaaaaaaaaaaaaaataaaaattaaatttaagttgaaaaatcactgactcctctcttgcttttattattttatatattatttgttctgttgggtgcagttgttggctcttggttgacggttacacctggcatgttatcaaagccaagtggggtccataaaataaacaatacgccacgtcatatgccacgtgggatagtttagcccgattaggaaacgtaaaatttttggaatgaccattttggggctggtaattaggtgaaatgacggttttgaccttgaaagagtttctttgggaagctgtggtcaatgtggaaaaccgatgtcggatagagaattgtcttataggggtgcttctgtccttttcattgtttgcattagggaactttctagtcggagccccggttcgaggtccaaatattttataaaattactatattgcccttttaaggatttttaataaattttaatcacactagcatttatggaagtacttaaactttatcttgggattaagatttttgttacacaattttttttatatattttaatttatttttttaacaataaatgtgaaaataattgttttaaaaaaattaatgtagaaatagttaagctacttaataagatgttttaattagactattatttttttttttttttttttttttgttaaggtattaattagtactattattattattgttgtagtatgaattaatgctacttagaatggtaatcctatcattgtagtatcattaaaattagctctactaggtagttatggc

SEQ ID NO: 185602 - DNA, 1555 bp, Cannabis indica
aatttgaagtagagtccttcctacttggaacgcattatttatgtattcctcctggcttaagaatccattagaattagaataagaattgggattagaaatctggtacaataatagttgccaaatgccactgatgtttacaatggaatccaggagaattcagtcaaaaataatccctcattacttactaaaagaataggttttcctttacaatgaaagaccactaactactttgactatacgatgctctaacaaaaccaattaaaaaaaaaggatatggtgttgtaatgtcaacttgctatctcatactttggtcactcctaaagctggttgctaacttttcccaagctgggattttagtgaaggaattaaaggtgcctcttcatccactcgagaatctggaccggaactattccatccacttctcccgacattgctcttcttcttcttctcatcttcgtcatccggtgtgtacagatcatatgacttctccatcttcagatcctgcaccatacattattttattattattattctaacacatccaaccctaaacatatttcccccaaagcttaatcccaacatagtagatgtagatgggataggactcataagcctaacacatcatagaatatgaatacaaacaaatctttaaggaggatttttggatgaatggagagatggaaggacaaagttcaaacttctaaagtgaatataaatccattgtttggcaagagagaggagagatggagggagaccttcaccctccaaatctatacaattaaatccctccattattggaaaatggaaatatgaagaaaagacataaatataataaatgtgaaaattttccctgcaaaaattaatcattgtatatgttacaaatggtaatattgtcattttaataattaatacttttatggtttttatggtgaacattacttttataagtactcattattaactttgttgtcattgtaagaagtttcacactcgatcaagtagaagcaatagaattgatggtagcactagattgggctcttatgggagaacatctttcggtgatacaagtagaacttgtggctttatttgtagctttgtattgggctctcacaattggttttactttactttttattgagtcggaggatttttttcaggtattgatactatttcttaacaaccttccttttacaatgatctatgggtcattgttagcggatttagcaagtttgatgttgaatttttcagtagtgtccctgattcatgttcattggtcagccattatagttgtacatgaattagttcggcatgctcctcaactggataaaaaacttgtgtgtggttagctagataagatcccttctcttttcagggattctcattctatcaggctgtatgacaatattatttctatttaaggatatttgtaacataataccttatattttcaattttatacacttataagttatataccacatgtttcttttgactaaattaaatacctaaagttacattttccaatactatcagttcgttaatttctattcaaaca

SEQ ID NO: 185603 - DNA, 1531 bp, Cannabis indica
atatattgcatgtgatatatatttgtggtggagaatatattattttgttgctatgtatctaaatattagcttctgtcaacgttagctcaacgaatatattcttaaacactttgacaaacttataagttttgattaatttgagtctataaatataaataaattaatatacacaaaatgtgtaaatttaatatatatggagtttcagaataaagagagatatacaatgctttgaccatttaaagacaaaatccagattcactaagatctttagagaataaacaaagtttcattataatctcaaaaaaacataattattcacacataattattaatttacaaaagaaaaaaaaaacccctcgaatatataatatatatgttccatattttctctcctgatttcataatcatcatgattttcatcttatgcatgggattaaaaccctattatagttactacaataatagtacttattagaagtaaattaattaaataaaattaattaattaacctcataattttgccatcacaggccataactagtcatttgatcataatgatgatgatcatgatgaaacatctcattactattattagattgatgatgatgatgatgatcaagaaccacagaagtagattcccatgagtttgatgatgatgattttgatgcttcaaactcattagaccaccataacaagctttccttattattagagaccaccacattattcatatccttgatcaagctatcaaacccgggatcagaacccgccatttgattatgattatgattatgattaaactcgattgagtttatatcaccatgatctccgttaagaatgccctcgagctcagcttggaaagccgaaacatgttgattaccagactggtcgcctgatcctttagcgctatcaatttgatcttcacttacaacgatattattagcaataatcgacgaaccataaaactcaatctccttttgggcttgattattagggctaatcacatgatcatgcgcttgcatgatcatagaattctgagctatcagctcagaattagggttagggttagggtttacattcaaagcttggaaactttgttgaatcattttttgttgaaagggatgaagcttaggccacaaagcaggattgttatagaaagataaagggttctgaaggctttgaagttgcatatggagttgaagcctttcaatggctgaactacttaaagtttcagccgaattctcttccaagatcggattttttccatctgtggtggccgaggatgataatcgagatccattggattgttttcgccttcccaataattttttcttcaatcttgtgttccaatagttttttatgtcattatctgttcttcctggtaattgagctgctattatagaccacctatatatacataattacatagacaagaaattagctccaaaccctaggagatatacaaagcatgagtttttctaggcaaatttaagaaagaatctggacaagagatatgaagaaaacatgttaa

SEQ ID NO: 185604 - DNA, 4001 bp, Cannabis indica
aaaataatccaatctattcttaaattaaatataggattattttgaccataatccaatcttattcaatcctatccattccagtctaatctaattcaatcatgcgtaccaaacagcccatagtgaaaaagagtgccaagtaaagttgtctaaaagtgacacccttgttatcttctatttcttaatttatatttttaaaaaaattaataaaatatcaaaatgtaatatattatattatataattaaataatgatatgtgatatttttttggcaacttgcttactattcgaacattttaaaaccatttttttgaaagaaaaaaaattatgtggttaaaagagataataaaatattaagaaatgttcccgtgtgtacttttacggaatatattccgtggtaccttagatgggtctcacagtacgttactattttttaaccctaattacccttagatcaatctcagccctcatatcaaataattccctcatctaacggctgccgtacatcacggaatacatttcgtgaaagtacaatcacgagacaaaatcatgtccctaaaatattatgttttgggattatgtagacattttaaggagagtttaaggtgtcaaacatcataatatatggtatattgttattaaagtaattaaattaagaaaattacattatataccttttttaaattgatgcctttaatttttatctcttctttcaaagtttattatgtttatcttttttttcaattattctactaattttacctctatcattttccaatagtctctatttttctataactaaaattttgccccaatttttttcacaaacttacacatcagtctctaaagaacacaatttattatgtttgaaattgtttcttaattatatatgagggtgtgaggataatttgagtacaatacttattaaatgaggtacatttgaattaaattttatttagatgtaaatttagttaatgtatgaagaaaaataatattcttcaacttctctcattaattattaagtcatattatttttttaataatatgacaaattactaattacttataaagtactacaatcggatagtgaggtgtctaatagcaatggttgttcataatctatgactatatttttttttttggtgtaacgtaatgatattttacaatcaattaatagtttaataacttaatagtcttgggttcgaactcaagacctcttcctttttttctttcctcccttaccactaagttagccttagtggcttaatctatggctatatacatccatagtgtgtatcgttgccacctaaacaccttacatctaaaaccgttgggtcttaatcttatagtgtgtagcgtaatgatattttacgtttaattaatagtttaatagtttaatagtcttgggttcaaattcacgacctcttcctttttcccatccctccctcaccactaagttaattttagtggcttaatctatggctatatacatctatagtgtgtatatcttttgccccctaagctaaacctacttctagaaccattccaatctacaagagccattttggtaaatttgaaaacaatcttttggtctttatttatataattaagctaagaagtaaaaaaacccttcatcacttaccaaagtgccctgcaaaaagtcgtagtactcttaagccaagtgaaagtaaagcccacatcagcattccaatattattatttcttttccatcaattcctaaatggtatagataaaatataaaagggaaaaactaaaaaaagaccatcataagttccacaatcactgatctagagataaggaaatatgggaagcacgatgtgaaagttaaagaagggaaaaaaaaactacaacataaataaataaataaatgataatgtcacttatggccctaccaagcataaccttaacagatcatatctggagctcaataatcacaataataatagctaatagttggtacttaaatgggattttaagcttgaccaaataaaagattgtttgaaaattagacactataatattattaataatcatagacaggaaaaagaaaaacaaacgacaaacattttaatcatcaatggctgtcattaacgcaaacaagaatctatttcatgacttgactagaggagataagagataagaagaaggtgaaatatgaaagtgactgccaattgttaaatatagtactgaaatgaagaaagaaaaagttgacacattttttcttttcattttcatatcatatattgtttctttactttaatttgttttttcattaaagtaaagacaatttataaccatatgatatttatacatataattggccacacccacggatttacagtagccacagaattagtttttgcaaaaagagaaaaaaaaaaaaaaaaaaaaaagagaaaaagaaaaagaaagtttttataaagtcaaacaaaacacatacaaacaaacaaaggaggcccaccaagttaagttccagcctcttaggaaataacaaggaaacactttgttttttgttacaacaaagacattagtagtctctattctaaaccttaaaataccacttacatgtttcgatataaaaccttcctttaccccaacaaaagcatacatatatatataaatataaacattaaataaaaaaaaaacccctcttcattagtcataacaactcaaaagagacccctctctcaagctaaggtagtgagatatatagtgttaggaaagtaaaggtattgagatatttatatatactcatattaaaatggagcagttaacgtccgttgaagactacgctttttgggaagtttatcagcagcagcagcagcctcttcattaatcttaaaaacaaataaaataaaacaaaattaccccaaaatagaagaaagcaaaataaataatagtaatgttattagtgtaaaatagttaatacaaactttacctggttttgccttcttctaagtctttcattttcttcactcaattgtgcaacaacaagctccagctcatttgtatatgcctgtaaataagtgacaaaaaaaaaaaagcccagatagataccctctaagaatattaatacaaagaaataataaatagttaaataccatgtacgtttgcaaattaaactactaattaaaaatgctaactttgataagaaaaagttattaatataataataagttaataacccatttgaggaaagcacataaataacaagcttgcctgttttctagctcttgatcgagcagctgactctcgatttttgatcatcctcttgtttcgtctgtcccccgaagctgacccattttcagtttggaaccttttcttcccaaaagtgtttaacaaacaagaagaggaatctaaagtctcaaatgggcttgtgaaagatgaaacattggagatggggttgtttggatgcaaggatggatcggtgaggcttccatcgagaaatggaaactcagggccagaattcaagctcaatgctgtaagaggctgaggcagaggagacccaaacagagtactgtccggagacggagctggaggagggaccatggtggtcggaggtcgatcagtgcaaaagggtcttgctaaaaagtcttggtagatcatgtttcggtagttggtgtggttgttattgatgttgttgagttgtggtggtggtggtggtggtggaacaacagtaactgtattagtagtctcagaaagagaagtcaagttcaaatctttccaaacttcttccatggcttttgttgtagaaggagcagttgaacttgttcttgaagatgttgaagaagaagaaaaagacttctttgaagaagaggaagaggatgaacctgtgttgtgtaagcttaagctattatttcttcttcttcttcttctggtttctgatgtactacttgtgttgcttatttcgatctcttcagcacctgatgacgacgacattagtattagactgatgggtttttatttactataatttatatatat

SEQ ID NO: 185605 - DNA, 2709 bp, Cannabis indica
caatcataaaagccctggaataatgatagatctttacacactcaaaaaaaagaatgaagaatgggaagtatgaaatcacatgcagaggcatgattaacaatcagaacccaagcaaatattctaaattcaaacatttaaaaaggaaatagcatcccatgtgcccatgctggagaaatattattaaaaaaatcaaaataaagtatagcagaaaagagtatcaatcatcaaccctgacaaatgtctaactgttgtaaggaataaaaaaatgtggccatttgttgcccctaatcagaacttttataattcctttcttggtcaagaaaagtacatgtggaagtacaaaaaggtagagactataaccaaatgacatgtgaatcacataaaagctacaacttcactgatactatcctattcaattacttacagtcatgggattgggatccaagattcgagctatcaatttcatcgcactgaaagatagccaaggtgggcaagtaaattcagcagacgagatctgcaaatgaagaaggaaaaaaaaatgtaacaattgaagatgaagagctatagaggcggcatgctagaaatcataaaaatgctcacttttttatacaggatcataagattagagtcatcaaaaggcaagtaacctgcaagtaatacaaatagtatcactccacaagaccacaagtctgccgttgcaccgtcatagccttgatcgttaaggacctacaaacatgataaaaatattcacgtaacacgctagttgtgttaaaaaattaaaaggctatcaagaactgtccacacctcaggagcaacataatttggagttccacaagttgtgtgaagaagaccatcatcctgccaaataaaataaaattaataataactaaataaatgtagccaaatagaagtccgagattgagacagccagtgtccaaacgtaaaattatttctagtatttgaaaatgttagaaatatacaattgagaaaaggaaaatatttgatacgtgatcttgtataacagctaaaattcaacataaccaccagtggcagcaatggcctcaaacagaggaccgagattgaatgaagaacaataggaatcaggctatcatccttaccctgacttgttgagatagtgcactcagtccaaaatctgaaactttaagatttccatacgcatccaacaacaaattttctggctgcaaatgaacattgaaaaaaatatatgtgtaattcacgaatttcttcttgagctggtatccaatatcaccatgtgctaacaggttatgtaccttcaagtctctatgataaacaccccgactatgacaataatcgactgtattgattagctgttggaaatatctacgtgcttcatcctctctcatcctcccatggtttaccttaacaaatcagaaataactatcatgagaagatgagcactagccttaccttaccaaatgaattaattcaaagtacaaatataattgtgaatcaaagcattgctaaatggttataagtaaagaccagtccaaaaatatattgttccccacaaaataaaaaaagagcttaaacaactaaaaattactaggaagcaactgttcataataggattgcatataggtcagtccactcacaattttgtcaaaaagctctcctccagtaacaaattccaaaacaataaatatcttagttttgcttcccatcacctgaaaaagaaaaaagataactctcacatcaaaataagcaggcagcatttcatactaagcttcatcaataccattttccttcctatgtatctccaatgcaggttacaaagatacagtaaagaagtgaaaagacaaacctcatataaccgaacaacgtttggatgctttactaacttcattgttgccacttctcgtttgatctgagaacattatacatgttagataaaagaaaaaaagacacaattgtaataacagatctaaaacaaaaacaaagtgtgaatagaataacactttgagcattccataacaattgtaagcaatcagttgaaaaagacaagaatggattgttatgaagggaggtctaaaagaagagacctgttcagccattttgtgcttgagaactttctccttatcaataatcttaatagccacaggctctcctgtctcagaatttcttgcaaacttgacttttgcaaacgttccctctccaattgttctccccaattcatatttacccactttacgcttaacttttgtgtgttgattcattcttggaagacctttgcttgaaatttgaatcttctgataacttttgcagttttggtggagtttctcagagacaacctgagggaaaaaaaatacataaacaagtcatataagtgttgaaaaaccacattttcaacctaagaaaatcaagaaaagaagacaaaaaaataaaggaaccaactttttgagttgaggaaatttaagaaagtaggattttgctattggtttgaactaagcaagtgggtagtagtagcagtagctcattgagctaaatcaattatagaaatatttaaagcttttgcataaagaaattttcctcattgagacttggcttacgtagtaagtgatcaaaatggcagatcaagtggctcctacttgcattagtttataggggttatgctaatatacaaacaccacgtgatgcatatcagaggtacaatggactcggtcagacatt

SEQ ID NO: 185606 - DNA, 7197 bp, Cannabis indica
ttaaattaaaatatatatattttgatagtatacatatttaaactcaaccaaaaatattttatgtaacaaacactatttttaaagcatatatcgtgatataagatgataaatttttgacacaaaatatagtaccaaaaaccttcccaggcccaggcccaggcccaggcccaggcccaggcccaggcccaggcccaggcccaagagtaattgaggagagagaatattgttgtctttaaaagggaaaataaaaagttaaaatgaataatgaattggtgtccgataaaatcatttaaaacggaaccttccttttcatttcatttcatttcttcttcacttgttgactcactcactcgctcactcactcggtcttcgtcttcctcaactctttcttcttcttcttcttctcaggtaataatgtatcttatctaatcactgcattttcttttcgctttctttctatatgattatcgatgctgattcttcattgttacttttggctttagctagtttcaatatttatatatatatatgctatgaatgatgatcagctgcgtctttacagttcagatgattataaccgcaagaaaggaacagtttcttcctgttaatactcattcttgtcctaaattactcactctcagtctcttaggtcttttaataactgttttttcagtgagcagaaagaaatttgatataatgttaaagaaaatgtaattaatctcaaactttggtttatgttagaaaagaaaaggttgttttttttttaaaaaaaaaaaacgttgatataatttatcctaatctttatggctgcatgttactgaaagaggttgttttggtatgaatatttgtgtaatgttttgttttagaaaagaaagggttttctttctttcttttattgttaggtttttttttatgaacatcattgtttatgattgcatgttagtgatagaggttgttctagtgtgaatacaaccatggtgtttgttgtctcagttcttttgtgttagggttttaaattttaataagcatcatgaccaaaatgtactgtacatctttttcatgttatttgtgtttatagagttaatttacattatctgactctgcatgtttcagaaagggattatcaagatgagttcaagaagggcatcttcatattcttcatcaagcaaaggtaaagctgtagcaaataattttgagcagctgagccaatctgtggaaggtctttctctggagtcatcccaagacagcggcaagtgggaggaagtgactactaaaaaatcgaagaacagagctggaaatggatacaatgctgctaaaccatggcctactcaaaattccagccccaatgcatgggctaagaagcctgttgttggaggaaacccgaggccgttatcatccgcttcccctccgcagccttaccaaaaggcccctcagcctcaatccatcatccccccgccattacagaatggatggaactggcaatcaagaccagcgtcacaacaacatctggataaaccccaagtatctaatccttctttcgatgaggaggatgatgatgatgaagtccaggaacatgatgacgagtctgatgaattggaggattacagtgatgatgatgaagattttgactccgattcgagcgagaagagccatgatgatcttaaaaaaacgaaatggtttgttaaatttttcaagatcattgatgatctgaaagttagtgagataaatgatcttgaaaggcaatggcactgcccagcgtgccaaggtggtcctggctccattgattggttcaaaggcttgcagcccctaatggctcatgccaaaactaaagggggtgacaggctgaaactccataggcagttcgctaaaattttggaggtggagttgcggaataaaggaacttcagttgtacctcctggtgaaacttttggcaaatggaagggattacaagaggaggaaaaggatcatgagatagtctggcctcccatggttattgtcatgaacaccaagctagaacaagatgaaaatgagaaggtaaatcataatttcaaacattaattggataatgtatgtgtgtgtttttcttttggagaataggttattaattgctatataaatgcttaatattattttggatattttattttagtggattgggatgggtaaccaagagttgctagaacattttgacacctaccatcctgctaaggctcgacatgcatatggtccacaaggccatcgggggatgagtgttctgatttttgaggcatcagctaggggctacttggaggctgaacgcctccataagcattatgtagcaaaaggatcagacagggatgcttggaatcggcgtaatcgaatcttgtttttacctggtgggaatcgtcgtctttatgcttttctggctgttaaagaagacttggatctttttaaccagcattcacaaggtctctctcttactttgtgtattgattgtatggttcttattttaaatgcgtttaatataatttcttgttcatttgaagatcttatacaatacacttttccttttttcaatttgttagggaagtcaaggctgaagcatgagatgcgatcatatcatgaaacggtcgtgactgagattagacagatgagtgaggacaatcaacagcttggctactacaaggacaaatactccagagaacatttgcataataaaagtctcaaagcatctatggttaaggtttctaataggctgcgccaaactttggaacaaaatcgaattgtgagggagaggagcaagatgcagcatgacgagaacacagaagaggtaatttaacaacttctgatgaatgttccttaagattagtgtgtttttattatagtggagtgttatatatgtttaggcgcacccacatcacatctatataaagaaaatctcacttgacccaagttcatatatggtttatgctttcctttcaagtcccattttcagcttttgagcttataggacatgtagtgatttgcctggcatagttgatatctgctgttttgcctgaaacgtactcctttgtgtagctccgttattgcaatgtcttattgattctaattccattttggctgattttgttgtctctctaaaaaataattacagatgaaggagcaagaggagttctttaaggaacaactgaagatcatccaagaatcaagagaggaaaaggaggaaaattttgagcggatacaacaggaagaacgtgaaaaggtttccaaatcgaaggctaagacttcaaagaatgcagggtaatgcggctgacttttggatttcttattgaactttaattaacacttgatgaatgtaaaatgtccttttcttttttcatgttcagagctgaagaaatctccaaatttgtggagctacaagataaggagatggaactttatgtggaggagagggagaaactcgaaaaagctcacgaagagaagattaaagaaatgaaaaagagacattttgaggaggaagtacaacttgagaaggagctgaatgagaagttggcacttctcatggaaaagtactctcctctccatcccaaagagtaatgttcaaattaaatttaaatatattggtatcaaaatcttgcttcttcattgtggactccaaacaatttaccaatctgctaaaaatgtttacaacataattaggttattaatgtctttttaagtttttggtttgttttagcatgtaatcaatctctctttggagaaaattttcacaattatatccaaatattctggcatcttgaacatgtaaataatatacattttacaaagctttgtaatttttttccttttcacttttttggatgatagttgctacttttttagtttcttgtttttgtaactttcaaacctttgaaatggttttggaattggaattttgactttttacttgcagtatagtttgatattataataaattcacatttacattccaatcccaaatatactcattgcagtatatactatattagttatttactactacacatttatagaatattattattctgaaatttttgaaaaaagtggagtttgggtaatttattttaaagaagttatgtgaaagtatgctataaaatgaagaaagatatagtagagaaactgtcatagttttaagataaaattcttataagcacaagaatgtctagttagattactgagttaaattgtccttcaaaatatctcctcatttcaataatgtctctttgcgcatatcatatatggtagaaactgtatttattttagaaataactaactgcaagttttacatacaatggcttaagggatacatgaaatcaaattgagtctcaaacaaggattaatttaattttagtggagcaaaaaaaaaaagctttggtaaatatcaaatcaaattgaaaaaaatgaaaagactttactataaaactgctgctgctgcatcatatgttatcaaattaagttggaaaattaatagtaacaaacaaaatttagagaaaccctaaaaaaaaacaacaaaaataattcaaacctaactaagggttttaagtatagtgttaatagttgagattatccaaaatgtaaaatcagctaactaattggtcttcttctcatcctcgttggcgactgtggttgtcgcgtctgctgcagccccgtcggtaagctgttgatcatcctcaccgccaaaaccaaactcatttacacgtttcttgtccactggataaatccatctttggtacacatatatcaaaaatataatatctgcaattccaaacaatttgaatcagattaaaacacaagtaaatagtgtataagttgaagtggtggacaagaaaaatgtataaattggattctcaccgtcacggaagacagaaaggcgatgtagtgttggcatttttatgacaaaggcgaataaatcgtcgatgattgtgttgaggaacttgtatgtcatctgcctccacggtagatgtgccacagacttgagtttatagtttatgaaaagctgaggacacatcattatgaaacctgcacgaaccacatcacaacacaataagaaaaccaataacaccgaaatcagtcttttcgattatagttagaataagttaagaaacttaccgaacatatagacacagcttgtgagtgaagagagaatccaagaataccagctcctgtgacgctcatacttgagcgagtagatagacgaacacactgcaaggaagaaaagaacgtaggacaaatacttcatagccgtgtcatcatattcttttgtcttgttacttgaatatgactcgcgatctctgaaccttaacatagggatcctcccggttctatcaatctaacaaacgagaagaatgattaactttaacatactccccatgaaatcttatacattcaaaaaaagatggatgtactaaatgtgatacctcaatgtgcatggctttcccgattttccaaaattcaatgcagcagccaactccagaacttgcaagtatcatccaggatgtatcgttgtcgagaagatagagaaacactatgagctgacttatgaaattcaccacaacagactttgcagagagtccttccatagacttatttttgttccaaaattggatatctgtatggaaaaaagaaaattcggattagtgtaatggtggaatctcgagattttatagaattaaaaagtttgatcttgaaagtaaataactcaccgttcttgaatgccaagaagtcgaacactgaatgtaataaagagaccaccatggtgattcctagtaggtaagggttcccttccacgaatactctctgaaataagaaataaagagtgcagaacttttaagtcaacaggcactacgaaaaggtagatatctctttcggcgctaacatagaactcgacaaaatttagtttacagatttccaaccacaactgaatttactaaactgtgtagcaactattactagcagcatggtggagaatcattatacataattatgttgccaaaacaattttaagtcatccaaatcaaattgggaagactaactacaaatccaagatcaaaagcagattagaattttcatgtaatagaataaacacacctttagttcatcagcctcgccttcaatcatgcttccataactacggtgaatctggaaagactgatcaatctgcaaaaacagctgccacttggtcatgcttatgggacccacctcgagattaagtggcagttctgtcacagtttcatttaaaggtattaatttatctcggagcaaccaaaactcgttgaaatagacggttgggtagtagttccctgaagtaggctcgacattcaagtctgcaattctaaaattaaggacctcaaacatcacagattgctaattagtagtttcacatgtacaattatatgccttaaaacacaagcatatctcacacaaacaaatgagaggaacatgctcttagctccggatatgtaagtgatgaggacatgctaccggacactccaagtacaaaactattaaatttcaaggatacatggagcaatattgggtggtacaccattgtgagcatatctgccaaaagggaaaaaaagggggggaaattcagctattaggagtaaaagaaagctcatcaactaatgaagagaagcaaaatgtaataatgagtgagcatgagtgtccttatggaactatcttctaatgactcaaatatcctcatacaaacactagagattcaatactagtattcatgaaggaaatataaagagcaaactaatgactactaaaagaggagaaaaataagttactacacataccgagtgaaatcatcaaccaaattaattgtaatatttggtttccaatatggtaaccactctgcaggagtatcatctttaacatcaccttcagtatcttcatcaatctacagcaacaaccacaaaatctatatgttagcattgaacataataatttatcacatgtaaagagtaaaaaacaagaaaaggacagggcatacctgtgttatagtttgagtttgagggtcatcagaagaagctcccaataaactcctcttcttatcatttttcgacttgggaaagtatgctacgattgctgaaagaggaaagaaagagtgagacacaagaaaatagagtgtgaaagaaatatggtgaacatatttactcggtaccttgtgttttt

SEQ ID NO: 185607 - DNA, 2863 bp, Cannabis indica
ttttttatttttgtaaagtttggataaaatcttatcttatatgttatattttataccttagatttgatatgaagaagttattattaaattgtaccaaaaaaataaagttattattagattgagatttgatattgtgaaggtgatttttgttctactttgcagtcaaaaaataaataaattatattgttgttttgtctctttcattgatgttttcacttttttccccttttccttttataactggaattacgtgtttcactcattaaattctttacaccaatgtaaaaaaaaataaaataaaaaaacaaattaacaagacaaaaaattgaaatagaaaagcttcaaagttgaaacaattggtaattaatatattattcctcactcctcgacattctttttcataatcattctcaagaaatataaaattcaagaaagtaactattgttggaaatgtctatagtactatggttagggtatttgtagttgttatgattgtatacattttttttattatgattttataaattgttttgggtcacttacacattttttaaaaaattagaataatttatcaactaaaataattacaacatacaccattaaaataaataataataaaaaaaattaaaagtaatttgtagcataaatacttaagtttaactctcagttacaaataaatacttaactttaatttttaacgttgtaaatactttgttaagtgtcaactaaattgtcacgtggcagtcctttgccaattaaatttttactttttatttaaaaatcaattcaaataaaaataaaattaaattttagatatatatttataatcgagagttaaacttagttatttacgctgcaaattactcaaaaattaaacttaaaaattctgaaaacatactaaaagagatagaaagtatatcaaaattctcaatattattatttgatgttttttctttaagtttggtgaactttgttgttgactaattctactatccaacaacaataagagggacccttactccatcaatctgcaattgtggtggggacttgttaataagttattttagcctagagaaaattatacatggtccccatacatatatctccattattgtttatgtagcctcatatttatatatttcatttatttatccaaatcaccaactttacaggagagaatatgtttcaagattctaacacattgttctatcactctcaatgtaaacttccaagttcttgctcaaaagttataacaacatatagttatatctccccacacacacaatagtccactaaatcaattttcatttttaattcagtttcacccaattcagccaaaaaaaaatatccattttcctcttttggtcccataaccatgcaatgagtaattaactatttatgagactaaacaaatgagtgtaaaatgtaaacctcaaaaccatgaacataatcctttcaatcattaagaaaaaaagaaatcaagttctcactatacatacacaccagagtcgattttaaggatagccagagttgcacgcgcctagggcccctacccaaccgaggccccgaaaaatagttcattcatttgaagttctcttggctgctgctcaccttggtttgatttccgaacactttttttttttaatttattctctataaaatttaaaaaataagataaacaagaatcgaacctctaaactgaaggtaaaacagtaggccctttgccactaagtaaatttaatttaattatatatcatatgatcacacatttagttaactcttttcttttgaactactaccggtttaaattatttcgtgttattttaaagtaatacataattacatatatagatcaaacataataacttttccggtacagccacttaattttcacattttggtaggtaaagtaaaaatcacaacccaccagatatcacttctgccataaattcatcaataaataactgtagtggtatatagaaaccagaaattaaaaaggtttaataatttattgcttgcctttatctatatgtataactgtgaatgagtaacttaccataatcaagtatgggaaaaaaaaaaggacaagctgaagtgtctcataaatttgtagcagaaaacagaaccccatgaagttttagttttctttttttatatatagagtcacatctaatgaagcagtagcttcagatatatggatagaatctcattgtctgtttcccattaacgaataatgcccacatgaatcttcaacaaagtctacagtaatttcagtcctactctgccattgtgggcctaacagtgagtgagcaccactttctcaatgatatatgttattataagggtggttgtgaattgtgatcatgtgatatcttccagtgaagagaatcctaggtaccttaaaatttttacaggttctattctataagaacaaggtaaattatagaagaagaagaagaagaagaagaattattttataactatatcaatcctcatgttttgcctttgttaatccaaaaaaaataagttccacttgaaaagacaaaaagattagtaactgatttgcatgaagggtgtacaaggaaaacattatattctctctcaagcaagattagaagaagaatcttagtagaaatttatgaattcgatactactaaaagacctccctgcgtgcaccgatcaagggatcattaatggttggactgggtttactcattgagaagagatgtaggaagatagaatgttcttcttgagagtgaactcatctgccttggctgggctgattgactgttacaacagaaacaaggggaaaagaacagttaaatgtgttgcaagacatttatgttttggtactactgcacag

SEQ ID NO: 185608 - DNA, 4393 bp, Cannabis indica
aaaaaagtggatataattggtttggtatataaatgtaaacaaataaccaatctcattcatagaaggaagatatgaattcgtaagcaaggagcatacaatacacaagctaattgctaaaacgcaaatgaccaatacagatacaaatagaaaaggaagcaaatgattgtttaattctgttaggagaattagaccaaaaaaaataaaattgtgttgggaatataaacagcgacactgaatttgaatttcaaggcagtgatcgagcaggcaacaatgatggtctcctgttgacttttatgcttctcaacttcagtggactccaaaccactggtttccgaggcaatgcaatgacagccccgctgccgccatgctgttgccttgaaatggaacttgccattgctggtggaggacttcccatgaacttactactcctggcagccattggtgttgtcatctcaggcattggggagaagagccttgagtaacgagccttccgcggatctttcaccattgacaatctgccacttttaaaagctgtagtgcggagtggagttgataggtgagaggaggacaagttcgattcagggcgaaaagttgctatagagactcgtcttctaggcttgagattgtgtgaaactgcagttgcattactatttggaggcggcctggtagtagcaatggagatccgtcttggttggaaaaggcttctggtgtttgttgttgcggtggttgatccagctgttgttttggcaatgttttctttaccgtatgctgaagagataaagctactctcccgtcttcgttttggtagaggggattgaggaggaacgggcatgagattggttagtttccgcaaaggtaacctcaacttagaattgggaaccaatggtggtttcttctctagtacagtcttctgtgcggctggctttagaccaaaaagagacactgatgaggtcggagcagaagcagctgcaaatgctctactctcctgtttgagtctagtctttctttcctctcccaattggttctcaaggtctcgaacctgttacggaaaaatacatctgaaataaggaacaaactacagaaaaacatctttgaatacctctgaaataaggaacaaaataatagaactaactctacccgccaaaatacacatcttgagaataattattacaaactaccttttcttgaagatttcggcaaatttgctcccgagcagctagccttaattgcaaggattgcacgctatcctgtagttttttggtttctttctcatcatgcttaaacttttctgcctgtggatttttttatgttgaaaaatcaataactgtgtttaaaccataagttaaaatatgatatgataaagactttgacacagattgtttagcataccatttgcttgtacttgagcagctcggtaacatctgcatgtttgcgagcaggtccgctctcgattcctctgactcggctagcaaaattcaatgagcaaactgtttctccaagatctgatgaacttggactgatttggacaaacatcaaggttttgcaatctcctcctgataattcaaatttcgatcagaattaaaggtacatttttcattcaccataataataaccaccattgtacaagtcacatataggctcacctagagaactttgcagtatatgggtgagcttcgagttcctgttatcaaaaaacgagagatataatgatcacatgtttataacagaaaataactaaacaaaagtacataaatgggggtgagagagatacctgtaaggtatatgagatgttttagatgcaagggcagagataacatcaccaagggctgagagagatttatttataaactgagattccttcaatctttcaccttcaacttcaatccttccaacacgctcactaccagccaaatctaccagccacagatgactcttagttctttgtccatttattagattttctcctttaacactcactcgcaacaagctacagcaaaaatacatgtttcagttcataaacaaaatgtaatggcagagaactggaaaaaaataaaaaataaaaatcaatgtatcacgtgaagtaccagtgagatctactgctcatttcattggcactggtggatccaactgatctaactcggcttccagactttagcagtgcccatacatcctcagtgccaaaaacacgagattctactagtccggggacttcttgtgttccctctgcagattgctttatctccagcctttgtaaacacaaatttaagggaagattagtcgtcaactccaaagatattagtcaactactttgatattcacaagaacttactttttagctggttggttgttgttatctaccaagagatctcttattttctcattataaacctccaacatgctaacaaacaattcaaatctcatgacaccagctctttcttctgaaacacgaaacaactcctccactgtcctgtaattgactcctctgttttctggcgttccctccattgtaaatgtcttgccggttccagtttggccgtacgcaaatatgcacacgttgaaaccatccaataccgaagtcacaataggttttgtttgggtgaaaactgtctctgcaaaattaaatcagttaagattcatttgctattcaaataagtgaattagcaactaagccaaactgaagttggtgaaagcataccttgattgtcttcaggtctaaacacatggtcgaacttatattgttttttggaagaatctgaggaaatgacctgaagctcattatctgtagaggaatcgtattcaacaactgacgtacaaccattttggatttcactttggtttaagggtctacatctgcaaaagaccctgatatttccttttagttcgattacttcattgtagagttgctttctctcagtggattccctgatgtacttcttctttaaaagttcatgttcagtacctaaaagtaaagaaacttttaaaattgaacaaatcgagttaagattaagaatgtatgagtgtttattagttaaaacatactgagaaactgaagagtgttcagaacagcagggtctggaaaggaactagtggtgagcttaacttgatttgaaaggacggcatgctcctttttcaaatcctaaaaggtaacaaataatcaaattgttaaatgccctttccctcaaaattttagaaagggaaataaagaaagaactaagaagacaaaaatgcacaataactttgtgattgtttctcttggacataataaacccttcaatcttacctgaattttggtgctcaaatcaataactttctgtagtatcggaagggtctgcccttgatctccagaggcatcttgggttccatttgacatgctcgtctcatccgtcaattcaaaatcgccctcaaatttatcagaggtaatgtctgattatcacatttgagaagaagaaattggccattatgagcagagaaaaacacaacactttagttcttataaaactgattcacgctgaaagtctcaattcaaaaaaataactaaaggactaattgaattcagtaatatcctgcgatctttgttataaatttcaatttcaaggttctacacaacctgaccccccaagtcaaccatataactcattgggattgaaatcaaaagacaaaacataatcaagaaacctaaaaattgaaaaccctaaaaaagtaaaaaaaaaaaagtagcattaattctatttttccacagacgaaaacagaatgtgtcagatttacacaagagaagaaatctaacttcgttcaaagacgaccgaaggctggaaatcttgatccaaagcactttcgcagttgtctgaaactatttctaacgtttgatctgcataggataatcaaaagttcaaaaaaaagaaacgttgcaaaatttgaacacagcgcaaatcgaagaagaaagaagtagaagctaataccagaaggaccgtccatggtttcaaaatgagagcaagattgcgaatttcagaaagagaacgagggagaacgagagagatagaggacgaacacgaagacttgaagatctctaagagctcagagcgtcaagtgtgtgtgtgtgagagagagagagttagaggagagagagtgattgtaaacgttataagcgttgtaatggaagggtagggttttgattgattcaagtttgaattgagcgattttggaccgtcggattaaactgattgaaaactctcattataacggctatatttagtgtcattcggagctccatcgggtcatgagtcctgattccctgtgaacggagactcggactaattgtcgtttctatgaaaacatttcacgacgatttcttatgtcgtatgtatatttataaagtagagtaatttgcttaaaattt

SEQ ID NO: 185609 - DNA, 1200 bp, Cannabis indica
tatatatatatatatattgtgctgttatgatcttcagttaaatgatcatatcatacggctgcaattgagcatgcatgctagcttcttcgttcgatcattaatttcgacttctctagctctatacataattatgctacatatgacagaagtgtagatatctatatatataatataaggttgctggtatgatgcactataatgtgaaacatcacttatatttgcgagtgtgtgggttttacttttgttcaagtttgggattgcataatatatggttgacatgaaatgatcgagctacctatatatataaatatagtttagatgagggtctggataataatttccgaatatatattatatacacgaggagaaagtggagaggtggggttggggagtccaagtaattaaagcaaaaattttggtctgccattgttagataccagtcacatagaataagacagtactgatgcttctcaatcgggtaccccatctcatcacctcacttctctcaccgtacttcatgccactttggagaaattaggcctgccacagtacttatatatccaggtttatttggtatatgtcatgtattctattttattttaatttttttccactaaaacaaataacatgtttaagaatgaaaaactcgctagaggaagtttttttccaattccaatactaaaatttacataaataaaattactttcatttatatattacaacattttttaggtgggactcgaactcaagacctccaacactcacacacccactaaggacctccaacatgttactttattattattttagtaaaatataatatttttttaaaatcaaataatatatatacaaaaaatttataaaatactcattgtaattaaaaataaaactaaatatatatatttatatatgtcattggctacatagcaaatatgtcgtctcctatagcatatgcactaaaatagtgttactttttgtgctatattggagttgtaacggacaccacatcatatactttgtgttacattggagaagctcttagaagtgatactttgtctgtaatacttcgatcctaataattattattataagcaataataacaatgcccccagttcttgtttaggaaagacatatatgaagtagagtaggagcattctgtcgataatttttttcacaaaaaattcttatgtcctccaagt

SEQ ID NO: 185610 - DNA, 3975 bp, Cannabis indica
aaattgtaaacgtagagacaaggcaaggaattatcctagttcagattctaattagttcaatgtaaacttggtctacactaacttggaacacaatcttaaatttttttatcgagcaacattgagtacatcaccaatgagtataaattctcaatctttgggttctcacaagtattttactcacactctctcactcgagcatacacattcgtacattcatgtagatcattataaaattaaaaccctttccctttagaattcttaaactctttcatagtactctctctatctaatcttcttgcacactctctcaagattcgtgtttctaaagagtattcactggataataaagaagatttgccttatataggctacttgcagggtcggccctgaaaatatatgagcccaaaacgaattaaattttagggccctaaaaaatatgtaaaaaaaatatcaaaagaagagtgttatgggatttgaacctatgactttggacattatgtcatccacctcaaccaactaaactatgtatatttgttgcttataatacacttaaattttacttaaataaaaacttaataattatttttttacttttttattttgggcccccgaaaagtgtgggccctaggcacaggcctaactcgcctatgcctaaggccgaccctggctacttagtaagtagttgattcataaaaggttagctagattgattttggataatcacaaatgcaactaaatcatttatatgcatgtttataatagagcattgttatggagcattaaggaatctagtactattataaggtggtattctataacttttagagtttatttataatttttattaaaataaaatatgtaaaattcaatgttaaattacattattagtaatattatattgagaagtataaatactctttactattttatcatattatcaatggtgatttatgaggaataaatcctataaagtataaagagtggactacacatatttcctttattttattttttattataaaggggatctctttttctttttttcgagggaaattataaaggtatatctccttatacataatataaatcataaagtgaaaattttattacattttcaggtcattgatggtgaatatttaaattactagcgtgtttaattaattaaaaacagcacacatgcaatttttgtctttctaaaaattacaattataatttgccttgacgtgtagtgtagtcattaaatggggcaagaaatgaaatcgttggtaaaattattatttataggaccaaatataaaacgtacgtgataattccgccgactcgcgcagagggcgaagggttaaagcttaaaggtcgagcatgttgggtggtcggaggcaaaagggtacgtgcattccacgagactgaaataaaaagcaaattatatggggcccacaagagaagtaggggatttaagtgagtgccacgtgatggtctgtccttcataagattaaacccacaaacaatgcaggcctattttagtagcctataatggatgcgtttctcagtatccaatcccagaccagccgaccacttctctaacctctctcggctactcagtcaaccttccctcccttctatataattaatttaacacacatgatttgcctaaaatgctttcgtcaccttcttatgttccgtgctataaactactttttattaatattaattgctattacaattacatgtttcaattactccaatattaatagtaatatatatgtccgtaatgacgaaattgcttcaatttggtatgtaatattaccttattaccattcatggataagcatcagaaaaaggtaattgacgaatggtttctcttggcttgtcaatttggtaaacatgttcaccgacccactccacctattcaaaattcttcaaattttgttgattttagaaaagaaaaggagaaaaaaaaaacaatattcaagataatgtaccccatcttggaaaagattagaaaatatgctcctggctgaaatagaaaatttgaatggtcaattattttccacgaccccatgcatatttaggaataaataataattaatttaatctttaattttccttcaaagtgtttgaagtttggtacttgcaaagaaaatatggttactatgcccacacacacacacgtttggtaaacaggtttaatagtgaataatattgaatggtaaataatctacatacataatttggtctgggtactgatggccagtactatatatagattagacttacagttcaaagttaattaaaatattaatctttgctgaaattgcacgtggggatgtggggcctgtctccttaaattttcaatgtatatggttaataataataataaactaattactatttcaccaactaaaaggagaatttccaatcaaaagaaaaagaaaaaggaagtaaaagttttgatggggattcatttttgtttagtaccattaatctcccattgtgttttggacttaatataaatagtaaaagtactttattaaagcaatgttagcacgaaccagtctgaactatttatatataatagctacgaaggataatttggtcactgtattgtatacgtagagaagctttattacgacaaagtggtatagtgtgaaaaaaaaaatatatatgaaaaagtagtaatatgtctgtgttgatacatacacaacataattaaaactagaataaaacacacgactctctcacttcaaggaaaaagaagggtataatggtcaattcaaggggttttcagcgtagaactagaaggttggtgctagcatgtaaatatttataattaagtaaaaataaattatttttaatatttttgtagaagagaaaaaaaaaacagaggtgatggatggtatatatttattggaattggaatattttttcgattattgaacgttattataattattattgcgagtaatttcaaaactgtaatctatggtacggaaacagagttaaaaacccaccaaaaaaacaaagaacagaaaagcaacaaaagcagctatcctttaagctgattgggtcagattgttttcttgagcgttgtgtcagattaaacgtttttcagatctcatcccaagacttttttcattttttttattttcatccaacggttcagatttctgcagacaggatcatggtatctgcatgtttttatttcacaaaaccgatcatgcaattgcaaatccttttctctctattattatttttttaaaatgaaaaaacatggaaaataatgatagcaaattaacaaaaccaaaaaacatgtacaggacagtggctcatcccatcaatttcttgacacttgaaattaaatgaaataaaaaataaagagtgtaaattatagcactataaccaaggtattaattagtattaagtgaagtgtttcttatctactttgacattttaattaagacgtacctaagccaatgactttgacacttaaatagctaataaaatgaaaataattgggggcgtgtaatgtgctaatcaagtcgagtccctattcgttgtaccctgtttgaagtgtgactaaatctactttaataacacacataacataacataatctccttttcacattactaattataataataataataatgtgggaacgagagttttgtaagcttgtgtagtctctctctccttggacaagaccctaataaagagaggaagggatgtttggttttggggtagtgtgctctttaaaaaaaaaaggcttatgtgtaatttggtgagtgtgagagagagtgagtatctttagggaggtcagcaaagcgtgctttgcttcctgagctgagcaaacctaaaaacgtttttctaaaaggctcacagatagaagagaagaggcaatggttgcgtgtttttgtgatttaagtgcgttcttgttttgggcttcttagggtagaagggaatctctctagttttgtc

SEQ ID NO: 185611 - DNA, 1730 bp, Cannabis indica
gagagagagagagaagtaataagtcttcagtaaagtgagcataacagtctcacaaccaactacaatagtaactttaaatttaatttaaaaaaaacaagaaaagggaaaagctcacctgatcaacaagtactgccataccacacctatctataagagaataaaaattgtcaactttttctggtgtaggaggtataacttgattcgagtcataacttggcacaactaaactacagtcctgacagtcggatccacaatctgtgaaaaaagcagcaatatctcgcccagatataaaaaaccgagagtaaacacttttcctctgttcatcagactgactctcctgcagcattaaattactcaattctggatgatgcaaaatcaacttgaaacagactaagctattacacattacaaacacataccgtggtgtacactgtgaaatgaccaaagtccaacagaaaatgataatcgcattttgaagagcccaatattctgatagggactctaacttttggggcatcaaaatcaatatcaagagcaaatctgaaatatttgggagaagggtgggggaagcaaaagaaattactgctaagtaaagaaagatcaatgctacaaactcaaaccaagtatacatacgcagaaatcttagcgcttttcttatcattttctacatcaaatgaaactttattgacgaggaagaaagcctcatcatgtcccaactccttgttttgaacccaaacaagacagacccttcctcgttacacactcaccacagttcaacaaaagagaattactgacactaactgtttccaccataatggtaattagatctatggtaaaattagacttctgtcttgataataatttatgcatcaacacattttttctttttttttcccttattattatgcatgaaaatatgctttgcatagtaataacccaagactggaaagaccagacgttcaaattacatgagaatgattaaagaattatacacataaaacacacaaacacagttgaaaataacatggttacctgctttgttcctctaataccatttgaaattgttcttgtgccctgcgtgttacactctcaattttcatctgtgtaaagataaacaaacagggtgagcatcattaccacttactccaattttatgcaaaataatggcattacctgcaaagcagtcgcagtttccaatgcaacagtaggactgactgccttacttctcttaatgaactctaaaaatctatcataactttccatcaaaatctgaaaacacacaaaaatttagtatgctccacatttcaagtgatgcaaaaaaaaagacaacaatttagaaaataagaagataatatattggctgaagagaagagccaaactataaaataaagctctaaatagaaactaactagtgaacgtcaatctctctctcctccccctcctctcctcccctccctctctcccaccctcttatgtaagacaaaggaattaccgtaacatggcaaggagaaattgttgctgagagcttccaatcgacattctctccaactggtgattgtataaaactagcagccaatgcattcaacttctgctcgctacaaacactctgcaaatgaaatatcagtcataagccagcgaaaataaatataaattaaaatctttgaaaccatttttgcctggttattcaaatatctatgtatttatatgtatagttgtgtgtgtgtgtgtgt

SEQ ID NO: 185612 - DNA, 4809 bp, Cannabis indica
taaggaaaatgatatatgattttcaatatatattattagagaatttaataaaacatattttgttttatggtgcaacacgttttacaatctttttgttagtatatgatactcatttaataattaatagtggcaaaactcttaaatagattaactccttatgtaaaatattttgtagtaaatctttttttaagtattaactgcaaataaatactaatttataacacaccttctaataatgtacagtgttgaaaataaaatttataataatgccgcaaaatatttgttacttatttttatactttaaattatttattttggaaatttaaaaaattataaaaatttgattacaattttgtaattttgtggccaagtcacatctcctccactaagtccacagtccacacctttttacaccaaaattattacacatacttgtatggcactgcttttttaaatcagtagaacccatcaatattaaatatatttataatatataaagagtacataaaaaattatagcaatatttccccttttatgggtgcattgggttatcattacaaaataagtgttcacctcttctttaattaacaaattccaccaacaataataatagaataatgataaatacataatagagtaatgacaagacatttttaacaactcgtataaatgcactatctacgatttaatattatataatctccacttaaaattcccataattgatattgtgatttagtattactctgaaataataaaacaaaataacacaattaaatacaagcaatcataaaatccattcctgaatggtcagttaacgtgttacaccaacctacaaaacactcttaagtaaatttctaaacactctttctagctgaaaaagaaaaactctaatttcaactcaacaatttttattgaatgagtagagattaggctacaatttccaagtttggcacctaattactaacaaataacatacatcagtagcacatgatggaaagaagaggggcgcgtaggggcggtggcggcctttctacaataacttaccgctcatcatacattaccccgtgtcacgaaagctttactttactataataaaagatacataggggaggttaagattaacatgagattagaatttacatacagcaaaagtaaaagtaaaaaaaggttgggaagctgtcgaattagaaatcaggttgctcggttttcaacggtggtgcgcctgatgaggatgctgaactcccgttttgaaggtacaagctgttggctaccattgaatcgctgaccaggccagcatcaacatcgtcgaaattgagaatgcccctgatctttcgattactggataccataggaaaatattaactactgaactcgaacaaatgagaacaccctcacaacatatagaagagctcagacattacccatttaatcgattgttgatggcagtcaaatctttggaagggctttgatatgcatgagtgctttctccaacacaagcgtagtaactttttgagctatgtgagattagagcatccatctgttttaatgatcataagtgtacccaaagttatgaattcattatttaaagagcatatatttatctatatttttcgaagctattctttttatacatgtctacaaatggtgatcaatagaaccccaaagaagaaacatgcataagtatcaatcatagcattaaaatatgttatgcaactaggtatacatactagcaaatatcatgattgaacatacccaaagtactattaaaaagtacttataaacaatgaaatacatatgagcttcataccactaacaagggataagaggatgtgaaaatttaatcaaatttcaactagttcttttccatttttatgactcttgagtttagtaaagcatggaatattaagtaattcaaaaactaggaaacaggcatatctgaataatatttaaacatataccttagaagaccgcaatggtgaaacatatacattatgtgatgcagacactttctttggggacatatcagggagactcgggaatggagacaccttaggagattcaggacattgagctgatttaccacaacaatgatcttatcagggatgggtattcaaagaacgacgatgcatcttagacaaaagtacactgacaagacatacagaccaaaatcacaaacacataccttcgttgttattattaacctcaggagctctgttggcttttgtgtttgccgcggcaggaccaagctcaaccagtaaaggttttacagcaggaatgaaagttccattgtaaaacgtaattatatcgacatgatcttgggcagatctctgcattccagccatgcatttgaaaggttaggtaaagcttaacactggagagctaagagaatttagattgggaaacataccccattgcagcgtgttgctggacaatcaacaaaaacactccgaagaacttggggtttacattgtggttgtttcctatagttgtaaattatttctttaaaggtgagcttcagctgagaaatctgcaagccagaacatttgacgggtaaatataaaataacaatatgactatatattcacaaagtttttggtttactaaaataattcacctttgcaactccatagaaacaacagaggattatctggtcaatatggcggttgaaaaagagagatgtccgctgactgagtatttgttggaagagacagtagacattctccctaatctgctgagatagttgaagcctttcaaccataccactgattctgacagcagccaacttatttatctatatgatacaagatataaggctgttaatgtaagtccgaactaaaaagaggaactacagcgcaaagttgattcctaagtttgcttaaaggtaattcatgtatgacaccacaacaataaatcccaaagaaaaaagcataaaaaacaaagtagcgcttacattagaaagttgacttttgcctttaataattaagatctaaagttgtaaatgtcaaccacgtcattatcatgaaaaacctccaacaaccttttcaccatttaatttttgtttttgagtacccactcgtttgagatatcattgcaagaaaaatcacaccaccaccaacaacaacaacaaaaaacacagcaacagcaataataataataatctgctgattcttgagtcggtggaatggtagtctttggactgggataataccttgctgaagaaaacatttattccggtctctgcacatgtttcacctccaccacctggatttggccgtgttggactgttcaacaaaaaccacaaaataatatcaactcaggaaacatttggaagaagaaagtatgtaaaaggaaactgaaaataaattatattttttcttcctagggttgaacttggtaccttgcaaacgcagattgcaaaggaggaggaagctttgatttgaggttatttaaagctagaaaacgatcttttactggtgatgtaaatgtattcctttcgactagtacacttcgataatccgtggacaatctctttggagatctcatatcaccattcttacctgaaaaatactagttactttcgatacatctaatgattttttgtaagtgaatacggtcatgcaccaccatttagtgcaccaaggaatctagtttggatgtctacctggcgaagtctcatgcttctgtaaaggtatgggaggaactgctccagacgagaagtttatatgcacagcaattgcatccaaagatggcattggttctgctaataaacaaaggcgatttatttctgcagagagggcaggtcttgcaactgtcaaagaattgtacattgaggagcccttttcccataccaaactctccaaaagtcgttcttccaaggaatttaaatgtcttctcaattctcttgggagagattcttcgtgccgaatgaaactctctatcaccttgctaagatcaaaagctgtaataccagtcctctccagcactgcaggaaacagcattgtaacagtcttatgtgtagcaagaactaattctgccgagcaggcaagcatgcatctatgaaacctctcattggttaataaagaggttaaattagttgcatgcagtatttgagcctctgctctacacattgcttccaaaaccctgtaatatagtttaagtgcttctaatctccgttgttctgcccaaattttgtcaataagattgggagtttgtagatttcccgtcacacatcgatctcctagtgcactgctaggaaatatggcttcaagtattatgtgtgccctacgtaccacatcactagtaacatctttatcacatgataccaggaagcgttccagctctggtgagggttttgctggtagtggagaaatgacagtccgaagccacttggccgttgtcattgcagtactcactggcgtagccgctatctttgaactactacctccaagagtgcggttagagtgagatgcaggagaacgatgcggagagagtggacttgtaattgtctttgttggagatgacattaaatcaaatttcctctacatagaacaagagaagagccacaccaaatcaatttacctcgagaatagagagtaaaaaaaagcaccactaatatttatgcataacttgaaagatgctacttgatgtgggaacaaaccttaacaccagacatagtcatagaacctgcagataggcaccctgaaccaagaacgctgtcatcctcattaacgaataccctctcatccagtccacacttattccagatagcatcattataatccttttctaaaatatccaaatttgatga

SEQ ID NO: 185613 - DNA, 3244 bp, Cannabis indica
ataaagaaactttaacctcaaaaacccagtgatccttgaagatggaccctcataaggtaaaggcttcaaaaacagatacgcaaccaatagctcaattgcctcctccaccaagcatgttgagaatagatgtgacgcaacccatctttttgcaagccttcacattaagataaaacgattattttgagttgtatttccctaggaaaataaaactggtatgctatgataatattctaacctagcaactgatccatatactgggtaacgactttgtagaccattaatcatgttcgaatgctgactacgaaagaaaagctccttgtctgtagaatagaccctttttacttgatcactttcagctacatgtcgaggcaagttcaaaaggtcaacatcatataagagtcagacaaatgtaagactactgagacagacttcttactttccctcttcaataagctcaggcctctttcatgccaaattttaagacggaatgcataaccagacatgagaacatctacagaatcctctgtcgcagtacacatcatcccccagttagattttagactgccacgagaggattgttagataaagctttcagaaaaatgtagaaaacgttgtcaaattgaaagcaagcacctacctttctccaattttaataagaaaggcacatttagttttctcaattgccacttcatccataggccaatttccagaaccttccaactaaaatggagcaacaaacttttcagaaattagtaggaaaactttccttttctttattttccggtggagataaaatgattagtcaagaaaattggtcaacaagaatcatgcctgaatcataacttccagcggctgaatgcaggaagaagtgaacctagatagtctaacagcaccacccttttcattagccagtggatgaggctcaggtgggaacacagatgtaaacctgaaagctgtgaacaacataagacattaaacctttgattacttaaagagccatttaaaatatctacagcatatataaacattcaacaacaaatctagaataaatattacagagacaagaatagtcaagacaacgcacagaatctccaatgtgaaaggatttacaacattactgacatattttatataattatgactataaatttttttatctttattattacttttataagattacatatgatcacaatcaatttgaagcaaaaacttagtaaaattgggtttatttaaaaatagaaagaaaagaagttaagaaaaatacaagagggacatcagtcatttgcaattaaaccatgcaatgaagatcgacaagaataaaacttaagagcacaagagaaacacaccagaaacttaaaaacattttatatatatatatatcccgtaattaagtaaaaagagatttttaattaagtagctacattaaagcatataaactcaaatttctcttttattattggtcatggtcattgtataaaaaactaatagtttaatatttctaaaattgatatttataattaagtttttcaataaccaaatactcattgaaaaatattccttatatataaactagtcgaatgggcatgtagaaagtatgtgctgctattaaagaaaaaaattatttacttatagccaaaattaaacattattagtcaaaatgtgtacattataatttatatatcaaacttcataattacttattaatttaatatatatatatatatgtgaatactcataagtgttttagctttaattattactttctttcctgattttgtataaagcaaaatcgaaggtgtttattccactaacaaaattagtttttatccattaatagttatctggcagtaaatactagacaagtatatatccaagagtaaaggggaaaaaaatccaagagtaaagaaaatgtaacctaccttgtgtttttttaaaaaataaagttttaggggtgcaatacaagaccttcccagaaaatcatccatcctaatctactctcacctaagcatacttaactgagttcttataaaacctagtactttagtgctggtatgattgcactcaaaatatacacagcttttcacaattgtattgttaatttggagataaattttggtatactaaaatttaatataataaaattagtgttttatttctatttcacctctattcataattgaatataaataatcaaccaatataatattaagtattcataaaactaggaaaaaaataactaagtttttatcactatccaaaatgttcaagtgatataatcataattaacaaacaagcaaaagaaatacaagatttagaaggacttccagtgaatagtcaaattacattttaagaaattaatatatatacatacacatatatataattaagttaatgataaaaaaaaaatattttgattagttcagcagatatatcaacaatttataaaggctttgctgatattcataataaaaagaaatcattattgtttgataagttctgtaactacaaatcaaaaaagagaaaaaggataaactaagaagtgatatacccctcttaatatatagcaggatataaataaatcgtatctcctttggttaaaaagacaaataactgtgcaaataaaagaagaaaaaggcaaatacctgagtctaaaggttgcacagctgagaccttcaagggaatgtcttgaatgagacgcaatcgcttagatagaacttcaaaagcctcaagcaaactagcggaatgtgatataggatctaacaaaatattattgattgtgtaaaaatgccaagagaaacaaaaaaactttgaagaaactatgaaagcaaaagttggtggctatcacctgcagcaccgtgaaccaaagagaaatcaagttggtccacaatatttgtgatattttctttaggtagagaaacgtgacgtgtaagcacgtattcggtaatttttttcagaaccagatgtctttcccattgcttactttcccaaactaggaaacacaaacagttaaccctgcttatctaatactgagaaaacaatattcaaataactaagctcaattaaaagtcactaaaaagaaaaatcccttacatgtgctttctgcaattgtaccatctttaaatctcctaagctctgctttctctccccagaacttccgaaatttgagagcctaatgcaaagagaatggtaaaaatcaaatatttgcacaagcagcttgataaatattattttatttctattt

SEQ ID NO: 185614 - DNA, 4226 bp, Cannabis indica
tttttttttttttttttttcactgtcgtctgttttggctctttctatataagttatttggtttgtttggcagttggttgaagttcttttgacttgaaagtacttagatttaactgggcaagtgttgtgttcctttgtttatcactaaaatgtacgaaactgtatgaaagagctgagattttatcactaagatcttatgattttactttgttttgggttacaaaagatgactggcaatctcgctgggttgaatctgactggaaaaggacagagggaaaagctggttcttttatacacacacagggaaagtggcatggagacccagatgataaaggtgttgttttctcttactttctatatgaaatacaaaatgtggtttagtattaaactatgcatatcaattcaagctcagtaatctttgaccttaaaaatagaatgaaggcagaacataggaagtggttatcatagaagcttaggatgaggtctttattgtcttagaacaccatagagtcataagaatgatgagcttgatataacttagtggacaaataggattcttccttaatcatcattcttgcataattgtgcttcccaattatttcactttgtaaaaatgcggaagtacaactcttttggagggcaattttgcaatgacaatacttgagggagcaaaaatcttaactgttatttctccagcacacctggtcaactcttccgagttttttcaacagtagattatttctagcagtttatttagtttaaggggaatttctgttatgctaaataatccaggggtaaatttttatttgatttaacttgcgaaagcctcaaatatgtaaatgcagttaaattcattgttactcaagaaaaatatggatttctggcaggtattcaaacatccagtgatgccaaacattttgccatctctgccaagataccagagttctccaataaaaacaaaacattggtcctacagtattctgtaaggtttgagcaggagattgaatgtggtgggggctatataaagcttctctccggatttgtcaatcaaaagaaatttggaggggacaccccttataggtttgtgtgatcttatatggtcatttgggtttgttgaaaagaatgtttcttactctagtctaatctgttgttacatgtgtcaatgatcattcatgttgactgtcaaattttatttgtgtagcttaatgttcggaccggatctatgtggcacagacacaaagaagcttcatgttatactatcctaccagggccaaaattatcccatcaagaaagatttgcagtgtgaaactgataagttgactcatttctacacattcattcttaggcctgatgcaacctacagtgtccttgtggacaacagagaaagagactcaggaagcatgtacacagattgggatattcttcctccaagaaagattaaagatttgaaagcaaagaaggtgaaacgaagagcttaaatactcaaaatttgttcaaattaaactagtttatgattatatttggctcatgtgttgtgcaatggtaataccgctgctcatggttgagctagatatacacttcagatagaaaatgaggttacttccatgtattatgacctttgtactctatgattatcatcaatcagcaatcggtcaattgtaaaaagaaataaaccagtttatggttagttatcctaagactgtagttgaaacttggaaatgacttttttctgtttcttgcagcctgcagactgggaggataaagagtacattgatgatcctaacgacttcaaacccgaggtttgtaatttcaaagtttcttaattatttctttcttattccaactcattttacgtgtttataaactatgtttcataaataatacatatattgatttgcagggttatgattctattccaagagaaattcctgacccaaaagctaaagaggttagtttccttttatggaacacttagtttcaatgtgctaatcgaacccgaacaaggctgatttgattactaatactttggttctttgttctttgttccttttcactttcttaattaatttactacagtcatcatgatttgatgtgttacttttttttcctttatttgattagcctgaacactgggatgaagatgaggatggtgtatggaaaccaccaaaggtaccaaatccagcttacaaaggaccgtggaagcgcaaggtacatcaatactgcatttacatcttacctatcatgcttaaagctttgatcttttccctcttttttttccccctgcatttactcatttatttaacttgttttgatatgacagaaaatcaagaatcccaactacaaaggaaaatggaaggttccatatattgataatccaggtatatagcagtaaaactaatgtgacagacaagaaaagaacttgtgcagaaatattcaaggttttatttttaatatgcagagtttgaagatgaccctgatctgtatgtgcttaagccaatcaaatatgtgggcattgaagtttggcaggtatgtcatactaaacctcagggtattgtttattgttagctttctgatcactatatatttatcgggttttggcctttggatgcaggttaaggctggttcagtttttgacaacattttaatctgtgatgatcctgagtatgcaaaacaagttgttgaggatgtatttgcccatagagaggtaagtatttgagaagtaatacatattccatacttaaaaattaaggcatatgccgttcatcactttggcctttttctgaatcttttaggctgaaaaggattccttcgaggaagcagaaaaagtgagaaaagcacaagaagaagaggttcatttctttactgctgactaaattttcctgtagtccttcattttggatgaactcgaatcaatggtggtttggacctttctctgtgcaggaagctcggcgagctagagaagaaggcgaaagaaggagacgagagaggggtcatgaccaccgagggcggcgagacaaatacagggacaaatatagaaaggtttgtcacaccattggattgaatttgttttccttgatacccattagatcagttttgattggttttccaaattatgatcctcatgttctcttgtgcagcgttatgatcgccactgggatgattatcatgtaagtgttcatagaaattccaaatttaattttgtgatagtttcattgagcattgacttaatatgatttactattctgatttgcaggacgagctttgattggttttgccgcgtctgttttccaaatcgtttcattgccaaaaaaatgtctttcatccattgtagttcacgttttagatccagtcaagtttatccatcttggccagagcaatgatgcttaatgtgtttttcttatgcattgcttgctagattaccttatggtagcagtatatttttacataaaccaatgctgcgattgacagctattcttctgtagtaactgtatggggcaaaggcttttagcctgcggctttcaataataatgtatttcagcaaaaatcgactattagagtcttagagatccaaaaaagcttcaatttgcagctcatttaaatgttatgaaaattttcccaaaataggtgcatttactgttggcataaaactgccctattggtaatttaacaacttataaaaatttacataatctcataatggtttcccacagaaataatgatacaagcagaagtcaagttaaaaacctatgaaacctacaacttccctcagatggagttgagctgatactctatcttctccgcacagcagaaggtgggccaccacgctggattgcagtgggctgctgagcttggccagcagcctgttcctcgggcagattcattgcttgagttatggcattcatgacaatgagtccgagaggaatgaggtacatccactgatagaatatatagagctcattaagaattttaaattaaacgaactcaatagattaaaatgaggaatgcttgaaaactcacatatttagcccagaaagacctttcttggggcagtgcagcttcaccctctccaccctcaccaccaagaatgtcctcggtaaaaattggggccctggaacaatacataacaccattgctaatgttatcaacgagaaactagtaacaaacatttttgattgcttaatgggtcctattggcatcaaacaacaaatacaacctcaaattaccaaa

SEQ ID NO: 185615 - DNA, 8092 bp, Cannabis indica
aaaaaaaaaaaaaaaacctagccacacaaccccaaaatgcaaaaaacctgtactagagaagccaaaaaaggtctgctattaaacacttatttgttcatttctttaagttttgtatttgtattatatttgacattgattatatgtgtgtgcgggttcaaaagaataaaggaggtaggccaccaagtagaaatccaactgtacaaacacataagaggaggaagagaagggagaagcagctggctaaagaggtgagacagaggagaaaatgtttgagttcacaatctcgacattaattgtcatcaacaagtggaacattattgatttagcattagtcttttggaatagaaattagttttattttacttttggatatatactctataggtgtcttttggtgatcttagaacaatgcaccaacaaacatatagggtcttaacttatattttgctaatgctttaatattgtataagtggcttttggtgatcttagaacaatgcaccaacaaacatatagggtcttaacttatattttgctaatgcttcaatattgtataagtggcttttggtgatcttagaacaatgcaccaacaaatatatagggtcttaacttatattttgctaatgcttcaatattgtataggtgtattttggtgatcttagaacaatgcaccaactaacctatagggtccattttgctaatgctttaatgatatataggtgccttttggtgatctttgatcaatgcaccaataaccatattaatgaatagatattatattttgtcaatgcttcaatgttgagatattgatcattttatttaaatttgttaaatttttcattacattgtcatattatagggacccaaaccaaaaaaaaaaaatatgaatcattgtcatgacatgtcatgaacttctctttgaaacacgtgaaacaatatatttttattacattgtcatattatggaactaaaaagaaaaatcctatactgacgacacatagcgaatcttcttcttggattcgtatttgtccaggaagttttgatcattgaaaggcattgataagagcagttgggatatggaatcctcctcattttcttcttcaagtgtgcaacaatgacaaacaggacggatgggggaaagatgacttgagaagttgggtgaacttttatttttgggattttgattttgttttgatttaattttaagttttcttttaattaaattttgagttttatctatttttatttgagtaaattgaaagttttaatttttttaggttttaaatccactatggcatacttacgttgacttggatggtgccacgtaggccaatttggtacttaaacggattgaaaattacatagattttacggtcaaaaaataaattttaccaacgaaacaaatttagaattgggaacgtgagaactataatggaatggtaatattccataaaatttgtgtatcttatcgatcttaaacttttggaatttatggacttgtttttgttgtttacgttgttccaaatcatcaagaacaattttacacttcatatcttcgtacgtaatacagctcttcatacatatcttacttcgtagttcgtacgtatgtacaagtttatcaaaatatcagtttgattacatatatatcatgaataatattattaactaaaatacgagaattctttaaatcaaagtcgaatgaaatttaaaattgaatttccttgatacaacaaagaaaaaccgttttgatatccacgagtccttaaccccttattatttcacaagagttaattctgacatttcttttttttttttttttccatttggaatgttgaaaaaacaaaggaaatactgtacaagaggggttcaaaccgggttcaggaaaatgatgtaattacagaaaatacgaccgaaactatttcctaccaaacctagccaaatgctgctcgtgttttgcagcagctgccttatcagcagcttcacgcttcaatgctctcttagctcgccggccagttttatcttttgcagcctctttttgtttaggctgacgagatgtaccagcgccagggtcctcaaaatttgacctatgaactggcctggcttcttggcgaccacccctaacaaatccattgtctccccatctacggttaccaatgcgaatgctcgatgaactgctaaagtaaacttcatctagatcatcatcacaatcttcttcctcgtatggataataataatcttcaggatcatcataggtaacttcacgattcaccacagtcaaaggtttaaaccaagttgccctcagcaggaggcagacactttcctcaaacatgtaatcatggatgctgtgtctcccaccgaaaggggaaaaagaattagataaaatatatatatacaaccccaaattaaaaggaacatataattttaagcctaaactgaatcaaattttgaaatggctaattctaagagggtattaacagctcggtggcaacattcagttaagcccaagaactagatatattaatgaaaaggctaatcaaccatcattctaactaaacaaatcacaaaccaaaagtgaaacaagaaaacaatatggaaattagtacctgccatcaagtgatcgatgaacattgaggaactcaaatggattcttacactgaggacagcttggatttttaccatatgaggcccatcgaaggatgcaagtcacactacagaaagaaaatgcatagtagaacaaagagtgagtatcatactaattggtagctttccatttcacacacaaaaagacaaagatgaaggtgggtggggtgaaataaatcctaattaacttataatttcacaatgttttgaacctgattaaaaattccattaatagatatttaataagcacctctacactaaagtaaatatgaaatacaataaaacatacagaacattataatgatctgaaacaaaattactattcttggcataaagtacgcctttaaaatgttcactgcagataacaaaagaaaatacattgatggataaaaatattgtattctgtgtaaagaatacatttacattctacatgaatggatataggtgactaggggtatatcagatatgttgtaacaagaagacaccgatactattattttttataactaggagaagaaaattgagattgcatgaaataaaataaaacactaaatatataaaaaagatagtaggatatagcagacttcaaagaagcaaatcagaaacattcaaagaattcaagtgtgagcattttatttgttgaagatttggtttattttcaattccaagagaaaactccattaattaaaaaggttacaagacaacaaaagataagatttcctccataccagactgttataaacataacataaaataaaacaataaaccttttaaactaaaactaaattcttagcctaagaaaccataatgaatctaacaatttgactcatctcctccatctaaacagcagattcaattggcttttggagaagatgggacagatccattcaaactcagtctccttcaacatactgaatgaaataaaacctggccaaaggcccatggcagaattgcaaaagtatattgtaaaatgaatacctttgtgagatagagtgaatggtttatttaaattcacttagaaagcacaaaacacaaaaaatgaaagatcgagcaatccagtgtctattaactttccatgatacaccagccaaccaaacattttaatctgaaatgtttgtgagattttcaactaaacaaggacggtacaaaagttggtactcgagagaccttcaaactctacaaaagtatgaattcaagattcgcaagtgaatataagaagttcaaatggtgaccccaatctcttgtcatatatgaatgtattgaacgaacaaatttctggaatggccaacaaagaagtgtcattcaaattttgctgaaattcagaaatcgagcaagcaactaagaagaagtgctaatactcttggaaagatgacaaaaaaccgaaaagaagaagggaaaaaaaggcaatatccatcctaagaaacaatatggtatgacaaataaaagatgattctcatagaaactccttcatgagttgtgtaacaaagctgcaatgcaatcttggcattataaacagattacgactaattatatccaattaattactggttccaaaagataacattaacttgcaataatactaagcaaacacatactaatccctaataatcaatacaactatatattatagagagaatattaaccgtataattaaacaagactgtaaaatgtgtagcaatacaagttcaagctatgagggttaaaaacaaacaaagacaagaaaaatcaacacaaggcaaaaatgttcaatatcacatgcatttccaagaaagacaaatagggttacacatatttaagagaactatcagacaaaccagtatgcgtgctcgcaaccttttaccagagcaatttcctgaagcactatcttatccaagcatatcgcacaaaccccaccatgaatcccaaacccattttcttgaatctctgccttattcgacatttccccctgaaacccagaaaacccaaatgaaaaaaaagatcgaatttctcaccgacaaaagaggagttgaccttgtcaaataaaacttttcactttcgcagcttcgctgcgttgcgtggttgacaagaacaaccagagaaaaattcagaatttttcgccaaaaatgtaaatcaaaatttcaataataataattaaaaaaaaatggaaatcacccccaagaaaaaagaaatcgaaaaaaattggatacataccaaaatttgtaagcacggagaagaaggaagaagaaaaatagatctggaaaaaagaaaagggtacctgatcttggagagataaatggtgaagagaacttgggagctgatcatcaccgtccatcttgatgaccgaagtcatgatatatgtacaatttccaagaaggggatgaagaatatggatgtagtaaataatctccactcaaatcatacgctataccaataaaccaaaccaccttagatatataacaataaggaagcagagagagaaacaagaacaacaatagatgcttagagaattattctgattcttatatacgattcaggacacagaatttggaatggagagagagagagagagagagagagcaaaagaagtaataaataaggaaagagaatttgtttttttcttcttttctttcttggcagagaaagaccctcttctgggggaaaaaatgtaaattgagaaatatcaatttttcttttaaataattttttcagatacttccttctccacactatttttcaaaatatatcaacaaatctcaataaaatatatataaaaaaatataataatcttatacacataaataaaaaaaaaagttaaaaaataacaataaaatatttttaacttaataaataataatctttaaatttaattaagcattattcattgagaaaaaatatgtataataactatactttgactcacttcataaaagctcaaaattgtaactttataatttaaaaaatttagctattttagctcatgaggtttgacatttttttttgtttgtacattgtatttttttagtattttatttttaaaattatgtttttaaaaataagaacataaaataatttttgtagtcttcaaaatgcattacaagtttgactaatattttctaaaaaaaaattaagaacttcaatagttcacactacactcttagattttatgccctaaaaataagtatttaataaataatataatagagtatatatataaaagataagtataagataaagtaataagttaattatagaaatataattagtaaataaaaaaatgaatcatattcatatagagaatgtatgattttgtaagaaaatacaaaataattaagatcatattgtatgaataaaataagtcggtagtgtattaacgtatggaatcttgaatatggaattaccaaataggtttactaaacactatactttagtgcatgtgattttgattcagatcacatatgtagatcaacattagtaaaggtattgtatataatttgattatgcatgattagatcgatatgaactaacatcttttaatataataaataacctctagaataataatagataataatgataatgtatataaataacaagaagttttaacgtagttttgaagttaactcgtcatactctacgagtccatcttatttctgagatttcacaaaatatttacagaatacaggatataatttttgaattattctctctatttctgaatttggttgtcctttttcccctaggttctgtccttatttataggagttttagggtgacagttattccctgggaatcttatcctaataatcgttcatgaaacgtgtataatcatcgcctttcatatttataacacatgggataaaaataaataatcgctataactactcttgtctttatctataagtggtttatgctgactacgcctcttcacctcgcagtacaaatgaccatcttctaaagctttactttgaagttggtttttatgcctaagtataaaattaggaagtgcttctcacgttcttctgtgatgttgagggagaaaatatatctatgcgaggtactgtcatcatatgcaagatgagttacattgtgcgtatatcccttaatctttcaacatactcacgaatatgtgggtcaataagttgtaagctcttaaaaaactcattatctaccctttccaactaattgtagttttgtagtatactctgtgtatctcgagattgactttaattgttcatattgctagtcttacgaaatggtaaatgttattcacggctcatccttatctttgaaaggatgagttcaaatatttctaccaattttatttttcgaggctagtttattgaacgtatttatttctttataattcaagctggtttattttccagcctcttcatacatgtaataaccatatttcttgctcgaaatatgggtataataattatccccttgaaagtgatttttaaaattgaaaagtacttttaattaatggagggtacaatcgtatttttccttttgatagaaaatgcatgcttcattttggcggttcagtatttcaagaaaaaacatcatttcagcatttattaatcttaccattattttatcaatatttctcatccattcgatcggtcatcattaagatcgaatagttaccattatttggatgtaagatcagctgcttcctttgtattttgccattcctgttttactaagcttcaaagaatttcaaattccgatccctattttctctgaaagtgcatgccctatttatctctcatattcttccttcgagtttttgacacctttttctctcaacccagacattgttacgaaccagacccctggtataagaagttctaagtgaggaattcttcaaggcttcttttcattcaacaacccaataagtgtacttccaccattgttctttgattatttttttccatatatatttttttatcatcaattttcttgtatggaatttttatatggatttttaacaacttaaggttagaaattagggttaaatgatttagaggctctgagtttttatgttctatatttttagaattttgaagtattttttcttttaatcaagacaatgcctcgttctgaataagattgtaaacacccagaccttgtcgaacttggttttccctaattctaagccattgtttttaaaccccacactcatagaccccaatccatacttgagttgaatgacaaaaaaaaaatagaaaacattcacttagggttagttaagaagaaacacaatctcgctataggcaatatatagatgaaattattgagagtagacgttgtaatctataagaagcaggctcgcctaaattgctcaatttagtaaaaatccccttagtgaaaccattatttttatcccgtgtcactgttgattttccaccaggtgatcttagttttgatattatggctacaaatgttagaatttattgggtcacaattgtat

SEQ ID NO: 185616 - DNA, 1820 bp, Cannabis indica
cacacaatcatgcttaagggatgggacccttaagagttgacaatgtcaaatgtgtcccataagaaagaaaagaaaagaaaggtttccattaaattttgatccaatcaaaggcaaaagaatactaaggtcccctaattccaaccactagagagatgaagaaatgtgcattttatgacctcacatagggacatctttttacctttttttttcctttacacactatagaatcctatactaacaaacaagtaaataaatatagtcaataaagcaaaaaagtgatgtgtaaagaacgttccaaattgagtacacgagattgacagtaattaaacttgagtgcaagtgagaattctcaatttttgtatcaaactggtagagaacttctaatcaatgcggtaaacccgggaaaattaagaagattcagattatgcctttatgttaaagcaacttgtaagttacaataaggtaaaactgaaggagggcagaagatatagatgtctaaaattactttagagttgtaaaggttctctattaaagttggtcataacaagcttatgataaaacataacaaccaaacacgattatagtaacatttcacaacgttcaaaaagcctaccaccaccaccaccaccctatcccttgtagaagagttcacattttgagctgctatcactctgtcatcacaggcttgttctcgttggctttaaatctaggttccttgggcttatcttccattttcctgtaagggaaaagataaggaaacaagcaaaggtcaaaaacttctcacggaaccaatacaatgaattaaataccgaaatcatagcacagaaataagcacatgaaaacaacacaagacttaagttataaatattacaaagtgtaagagggggaaatttggtagtgtattagtgttattattactctaagatgattgtcaattcatgttgagcattatgtccgagttcggcaccaaagccagagtttagtcccactatttttcaatccatacctttcccatgttgagcatcatgtgctagttgggcaccaaagcccaagtttagtcccacaatttttgaatcccatacccttcccatgttgagcattatgaccgacggcacctaagcccaagtttagtcccactatctttcaatccataaggaccatacctttcccatgttgagcatcatgtgcgagttgggcaccaaagcccaagtttagtccctctacctttaaatcccattacccttctcacattgagcatcatgtgcaagagttgggtaccaaaggccaagtttagtcccactttcttacaatcccatacaagattagactgctttactaatgcattataagtaactacgcacatcaagatatccttgactttaattaaagacatacaactctaggacaagcatactattctaatctacaaaataatttaccataaacttaaattttgtgttctcaatagaaatttatagcttaaaacaatcttcagctcccaagtgtgctaactaaataagcttgtgggtggaaaaggaaaaacaagccaatttaattatcacataattgaaacaaatattcatcactaataattcatagttagaaataatcttcataccgccgactattctaactaagcttccaggtgcaaaagggagcttttatgaaatacaagtaagatcgtttgttacaataaagccatgtacaagaggttctgtttcatacacctcttcttacaaaaaacaaatcaaaattaccacaaaacgacgaaacaaaagaaattcctctaaatcacaaatgcaacaaagaatgcactaatg

SEQ ID NO: 185617 - DNA, 3845 bp, Cannabis indica
cttatgttagctgaattagagaatcaaaccagttctgaagtcccctttgaggcttcacatctctgactctgactctaatcccatgggagagtgggtcattggagctgttatcaatctttttggcagcattgccattaactttggtactaaccttctcaaattaggtcataatgaggtaaatcattcatcttcttctcaaccccaatttcccctttgccatttaaatcaacatatgtaaatgtaaatgcaaatggactattatttctctaaatttttcttctttgcagagagagagacatgcaatgttagaaagtgatggtacaattgcaaagaattctgtcaagcccattatatacttccacacttggagagttggtaattccagactctacttccaccaccaccaccattactcttttctttactcacctgagtcacctctttgattgattcccttcaactatctgatctcactctttaaattgcaggcattgtgtttttctttcttggaaattgccttaactttatttcctttggatatgctgctcaggtcagtacaaatcctagtttgaatgatatttatctcaaccaaccactttcataataatttgaattatcatttatctctatcctttgcagtcccttcttgcagctttgggatctattcaattcgtgtccaacattgcatttgcttactttgtgttgaataaaagggtgactgtaaagtatgtcattttttttttcattattttctgcctctaatagtagctaaatttaatcccgttgtaataatgaattgcttcctttgcagggtcatggttgccacagcatttattgttcttggaaatgtgtttcttgttgcttttggtaaccatcagtcacctggtatgtatctggatcttaagttctcaaatcttactttgtgctgtattttatacgattacgtgagaactttcttagtcacgaaattccaaacttagtgtcctattctagactgtgttttggctgaaaaacttggcaattactattagctgtcctatatttctgtgtgtaaatcatgtgttccaatgtccacgtgttgggttaaaagaaacaaaagttgcttgaatcccttatttaaaccatgattaagtggagtccctcttgttttgataaaaggattcactatcggatttagatgaattggtggtgtggcttttactttgtgccaatgtccctgaattggtttattggtgtgagatatagccttatgtagaaagaaacaagaaccctcattttatgtaaggaaaatgccccatgtgaggaagcatgactaatatcgataatttcatttgcctgattttggcagctaactcttatgctacttttctccatttcagtctacacaccggaacagctggcagagaaatacagcaacattacattcctcttctactgcatgattttggttgtagttgttgctgtacatcactccatttacaagtgagatcttggtgattttacctatttatacttatttcatgttgttttttgtgtatcttacatgttgtcatgatgcaggagaggagaacttttgcatgcagtttgtccacatgaactgagaccgtactggcatacactacttccattttcttatgccatagtttcaggcgctgtaggatcatgctctgtattatttgcaaaatctctgtaagttagtccactaagtttattgtttccttctttcgatgcattgctaaattgggtgctgtcacattgtgatactaactccctaaactagtgcggtttcatcgcgatactaactccagttttttcttttgtagctctaatttgctaaggctggcgatgtctagtgcatatcagttgcacagctggttcacatattccatgctccttctatttcttagtacagccggattctgggtaatgtttaagagcagtcgaggagtgtgatttttagtctgaactgttcctatcagttgttttttctgtatattcaccgttatgttcttcgtctatttatgcagatggccaggttgaatgaaggattgtcactatttgatgcaattcttatcgtacctatgtttcagattgcttgggcatttttctccatttgtacaggatttatatattttcaggaataccaggtccgtactccctcctttaacagtagttaggatgctaattttgcaaattaattacctcttttatgtgctaaacttggtacagttaccaatatcgagaaagttgaataaatgattgcagttatttcagttgacttgactatttactgtatgattctcacaaaaagtacctgtaaagctcttgatccttgtaaagatttggatgtctttgtgtaaaaaatcttatatactagcacattggtgtttttggatgtcggcactgttgttgtttctagtctagcagcatcattcagctggttttttcgctcatttagaaatacacatgtagattactggcatgtgggctaatttgttgttttcataacaggtctttgatgcactaagaacaacaatgttcatactaggaatgatgtctgtgttcgtaggcatcactttgctggcacccgatgagccaaaaggtatttcagttttagatcataataagtcgaaagtagaatagagaatcaatacagatggcaacttactttctcttcatgttttttcaggtgctgaagttaaagataattcttctgtagtttctgtgatgtcttcaaacatgtcaaaagatatggacaggttaagaatcacatgtgttgtttctttttgaaaagaaagtaaaagtgattccgtgtgactaatttcgggtcacatgtttataggctggttcttccatccgaagatgtagttagcagggacccgggtacactaatgcaagtagtgttgatgaagatgtcagatatcgcggtaaaagcaaaggtaaagaaagactttttaagagcgagccacgtcgacttgataatcatgaatgtgttttaaactaatttcaaaattgggtattcttgcagaatgcatgtgcattatcattaggtttcggggaagattcaatcaacgcgtctgcagtgtttgtgatgccaatggtgtcatcgaagatcacaggatttagaggaagtggcttcgaacggggtaagatgttctcgatgagaaattctggttggagtaagattcctatggatgaggaagctgtaaagatgctagaccaaatacctcaaagcccttgaattgatctcacttttgattcatatccccccaaaaaaagttcccacttttgtgttcattttgtatgtttagtttagatttcacacgcacccctttattggttggttggttagttccatattaattcagtaattatggaacattcttgtattttatatatattaaaaaaaaaacaaaaaagtgccatatacacttgtttatgtatattctttgcttacacttgttacataaaagagcagaaaaaataaggaaggaaatttgaacaagaaagaaataaagtggaaataaaaggagaatgtttgttttattattattcttaaaatactctattactaatatatactaaatctaataataataattaatattatttaaacaaaggattaatcaagttcaaccactaataatagcaataagaaagtaattttatataaagcaatttaatagtttcttattataaaaataattttcatgacataaaatctttttttttttggttattttagtcaaatataaatcaaaataataataattaaaaaaaaaagaagaggagagagagttgtgttatatgagtggttatggaaaatgagaggagagagagagaga

SEQ ID NO: 185618 - DNA, 1402 bp, Cannabis indica
ctaataacaatattaacacatatacaagcggtagaaaccactcttttgcatttctctctatcataccataccactaaccactcataaaataaaatttctcattaattattgaccaaacaatttcttttgtatctttccaagaaattaattttattttttaaaaagaacgcgtctcatttccaaaatttaataagagcgaccaaaatcttgatgattcactttcaatttcaaaccttctttacttcttcatcttcatcgaaactctagccacctctttcaactctaacaaaactaaaaagctaaaaacgacaccaaacatagcctaaacgacactcaaaaacaagaatgatgaaccaagaacgacaccaaggcggcggaggagcaccgcacggtatactactggcggttgtggtggtgctggtcatcgttgtgccattcctactgggcgaccaaggcgaagcactgaccgaggccttctccgagctcctaagccctatcggcctcctcctcctccctataattctccttctcaccattcagttcctctcctccgaccgcggatccttcgtaaactccattttctcaaccggagaacccgattcgatccaccgtgttagcggttcaccagtcggcgtcgccttgtttctcgtcattattcttttccttctttacaatcgcatctccatattcggcggcgacgatgattccggcgattaaaacggtgcgttttactggatctgacctttactgtggtcattctttttctttttttatataatataaaatggtgattttcactccggttagtgaagtgaaggggttaatattgtaattaaagagtgaaacccaaggttagaaatggaatttactattgtacttaacttaatcgactttgtttaagcccaaggttagaaatagttttaaagtttaaattccataaatagccttggaagagggggagcattgtaggcggcggcgcatgttagccggagtagcccatggtggcgcgccgtgtcgttggaatggtggctctttctacctactttaatttttgtcgttttatttatttatttaatttatttaaattttcacattttctgctttttaatcacgcttgcacgtgctattccatgcatttgaccttttctaattttacttttaattttattttaatgcattaccattacgtattataatgttactactgtgttagattaattgaatgtttaagtaaaatataataataattgtaagagctcaaataccaataatatgatgagttttaattagtatttaaaagggtttgtaaatctggagattaggaattgatacttgtgtttcatggtcgtacaatgtacatgcagacactcccactgagtctgacataacatgtgtgtagtgg

SEQ ID NO: 185619 - DNA, 2914 bp, Cannabis indica
aacacggcacactagatctagaaagctttggaaaaacacttcactctttaagtctcttccaagattcttgaattttacactaaacttcaaaatgataggaaaggatcaatgtctcttaatgattatttgctcaaggtcaagcaacatgttgatcttcgtacttcggttggttaggttcttgctcctcgagatcacattattgtgattttcaaaagtttgtcgagtgaatacgatactttcataatctcatctaatacaacagttgaagagtactatgttgttgagattaaagtcattcttcttgctttggaatcaagatcattgaaaagaatgacaaggagccatatattagtgtaaatcttgtagttgttgctgaatttgatcaaaatatggatgctagctgggttcatgaggctaatttagctcaaatattcaatcgtaacttcaagcatcctggaatttttcgatgtcagtttcataacaatcatcattcttatttttcttctaaagctttcatgataatcgaggatctcaccataagcaatatgacaatatgtcacaaggtgaattttcttttaatattggtcgtggaacatttaattatcctcgagctagcaaacttcatccaacaccaaatcgagtttaatgtcaactttttcataaacttggacacacagttcttgattgcttctacaaatttgacaaacgtttcacatgtatttttccagcatttaatcctgccaatattcaagtcaatttggtttagaccaacactactagaatggtaactggtatcctgactctggagcctttaatcactgcacttcgggccttcaaaaccttatgaccaactcagtttatggtggatcaaatagtctctatattggtaatggttcaggtttgtccatttaacacaatggatgcactctctcttcactgagcttcgtatccatctgcctcgaacccctgtgatttggtgtgacattcttagcaccatcttactcactgcaaatcccatatttcatgctcacactaaacatattgtgttgaacctatatttcgtaagagaaaagatagccctaaaaatggttcatgttaattatgtccttgttgccgatcaaattgctaatggtctcaccaaagctatctccagcactcgtttttcatttttcaagaccaaactttgcattggtgagtgtaccaattttaagtttgtgaggaagtgtaaagagagttagttgagtctgttatgggattaattaaagggggttagttttctattatgtttgttgtaaagttcttattcataacagttagccttatttggttttcctttaatttctttgtagctcgtttcagttagattcaatacagatagatatttcttttctcattctcattctaactctttttctctacttttattctcttttcttcttttgtatttgttcttaatcatgtcaaagagatagaatgtatctaatacagctgtataaaatttattgagcatttgggaaaaacttaactatacaaagacaactacattaattaaaacacgataatgattgaggtcatcattctttattataagtttgatcgagttgttaaataatatattcctcgtccggattggtatatgatttttgattccacaacgtacgtagaccaccattaataatgaactagaagacatttatcactaaaatatatagttattttgtctcgttggatgtaaaataaatttgtcttgtatatacattttagtgctacagaagaagaagaattatctctatttttcctcttctctttttgaaagggtaccttgaagactgctaacacacaattgtttatacaattaatgtttataatttatgggtttttaaagtttcataagtttatactttatgaagaaaaaaatatattctcttcaatcatatgtaactgattcagatctgattggattaaaaaagacataattgagccgaaagctttgttctttcgagaatccaattattaaggaacacaaattatataaagagaatttttatttttggcgtcatataaatggaatatatataagttgtcaataaaaaataaaatagaatatatatataagtatttaattatatagtaaaatttaaaggacccccacgtcgtgctgtcgttttttgtcttttatttattgtttaaatttttgatcattctgcaaaaatttcactgctcattgcttctttcccacgcctttacagagagagaaactgatgggtgtgatggattctgaattacttactgccactcaaatttattgccttaacaagaaatgaaaaataaaatgcaaaaaaaagaaagaaaaataataatactatattgtacttaataatatatatataaaaaaaggttaatatagagaaaaatgattagccccacatataaatctctcagtgagagagagagtcttcttgttctgatgaacacaagcaaaacagtgcatgcatgacaagataatataatatctcagttacatatatatatataaaaacaatattaataaataaataaagtctacattctcatcattattaaaggagtaagaaaaaaaaagaagaaattaaataatgtgggatagtggtgggggagtatgagatcagaagagttagatttggttcaccaaatattattttcaagcaacaagaaatgaataaataaagttagtgcttttggtgatctcgagaaattttggggggtgggggggttttagctgacagttaacagaggagaaaagagtcgtagatcgatctatcgatcgatggatgataatgatgatgatgaattaaatgacaaataatagatgtgactcaaatccagatatggttcagactgatcatctatctatgctcgtgtgtgtttttgcgtt

SEQ ID NO: 185620 - DNA, 2455 bp, Cannabis indica
cattttttgtttaggcaattcctgatgctgcagcataattgtaaacctttgaaatggtcgtatggacaattttattaggattgattgcagcataaaaggattaaattcttaagaagacttttctttgataggctgaacatataggttgtctatctcaagagtactacatcgctaacatgcctcataatttagcaagtttacctcacttttcttgtgttgttaacattttctttttgcatatattattgcagatgcattgcacaccgcttctgtagttcgagctcattgttggtcattgtttttttttcttatgaagacttttttttccttacagattaccaaatgctcctgatatggaaatcttttctctttatggagttggaataccaactgaaagagcctatgtttataagttatctcctgcagctgagtgctacattccatttcaaatagacactaaggctaatgatgaagagaactgtttgaaagatggggtgtattctgtagatggggatgaaacagtgcctgttttaagtgcaggtttcatgtgcgccaaaggttggcggggaaagaccagattcaacccttcagcgatcagaacatacataagagagtatgatcactcccctccgtccaatctacttgagggtagaggtactcagagtggtgctcatgttgacataatgggaaatttcgctttgatcgaggatgtcttaagagtggcaactggtgcttctggaaaggatttgggtggcgatcaagtccactccgacatttttaagtggtctgagaagatcaacttacgtctataatttaagtggtatgtattccttctattgttctaaccataaattttgatgaccattagcttagctcaaccaatttatgtgtggccatactacactaaaaaactgtctgttgcttgatattaccgattaatttatttgaaataagcttgttgtaaaattccttaggacccaaacttagaagaagataatccaagacaaccaataacagaaaaaataaaaaagctaaggttatactggatcacactaaaacagtgtccaccttccagaatgagccccctagaacctctcctcttgcaaagagaattagaataagttacatacacagctatgctaatatattaatttgtccatggtaactgttattccaaacatctacacacaaacagcacctgttgacacacaacacctctagagacacccaattggaaaacttagatgaacaaggattcctttttcaacattctctcttgatctcaacgtagatgactctctttttcatacacaaaagactctttatacacaaaagactctcttgatctcttgttctctcttttgttcagaataaaattactcactattatagtcaactaacctaactaaaggaattaaacattgtaactaacattcaactaactacagttaatttacaatctccaacaaatatactttgaacttatcaccttattgtctatgcactttttctaacagagtgcagactttgcccccaaaagataaccacgttgtgttttgctaagaatatgagcttgtacacgaccatcaaagcaaattgctgaatggcattctcatatcatagaacttgaataataatttagttatggaaagagagagagagagagacgattttcacttaggtctggttctatgggaggctctgaaagacaaaggccagctcttgaagggtatttcttatgattatttatttccttagtttactctgctattttttttatttcaggcaaaaggaatgtattaatattaagctaataacataaagccatttataagttgctctatgttttagtgtataagtaaatttgtggcggcgtgcaaatataatgcaagcacggtgccaactatatatgtaaagatttgccacgacttatatataaacataatttactatatcaacaaactttgaaatttgaagtcgttgactatgactactagattaatgtacctttctcatgttgaatattcactagtatataatatattaacaacacataacttgtctttagattatgtaatgtacatacatcatgtagcaagtgattatattccttatgttattcttctacttggtttatttgtttaactttcatcttccatggatttttgattagaccaaaaccttggttatatcatacatggattttgaaagaaaaaaaaaaataaacgcataattgacattgacgggtcacgggttgaatatggaagccaaatgtgaacggaacgacttagaggttatttgtttgttttaatttttcgaacggataaagcaactgataattattattattattattattattattattattaggggtctttttatttttatatttcaaaatagtgtttttacattttatgaaaatttacatagtaacttatataacaactaacag

SEQ ID NO: 185621 - DNA, 2984 bp, Cannabis indica
ctctttccattcactaattaattaattattaatttaccatttcccttaaacaaggataccagctacatcatcacaaaaaagtcacaacccctaaattattttattatatatgatgatatttctttttacacaaataaataataatgaagatttcattgataataatcaatgcgaaaatattatctattaaatgctgaaaatatgaatatttaaagtaactattatttgtatcatctaaatgtatttatgtaatatttttttcaaaataaaaaattatatatatatttatgtaacatcgttagtatgtatatatcagggtgaaaaatctaaattaggtaggttaagagtcactatagagaggagcgcgcacaccatttatctctacaaaaacccccccttcattactctacacctctctcctcatcactactcttctctctctctctttctctacacacacattgcaatactattctctctcattagtatatacactgaagtaccagtctctctatctttatgattgtcatcaataatgtcgtttaatccaaaatttccagaatcttctgagaccagtacaagcatttcttcctcttctacttcttcttcatcatcgtcttcatctctctcttcttctggttcattattaatgcttaatactgagtccaaaaagataaagaagaagaattcgagtagtagtagcagcagtagtagtagtgcgagggttcgtgagtccggggactgtaccaaacacccagtctaccgcggtgttcgaatgcggagttggggaaaatgggtttcggaaatccgagagccccgcaagaaatctcgaatctggctcggcaccttctccactcccgaaatggccgcacgagctcacgacgtcgctactctcgccattaaaggaaactctgcttttcttaatttccctgaacttcacgattcactgcctcgcccggcttccttagcgccgagagatattcaagccgccgccgctgaagccgccgctatggtgacacttgaactgaatcccgtctccaccacgatgtccgcgtcggcgtcgacatcgacttcgtcttcctcgactgaatcggaatctgatgagttgggcgaaatcgttgagttgcctaatatagaaggaattacaagtactagtagtactacgacgtttgattcttcggaatcggggagccaattcatgatgtttggtgactcggtcgatgatggttgggtatttgaatatccttccttgggattagagctgccattgcagggaaatgaattctatggggaattttctgatcagattttagctaccgaaagtttgattccgaatgacgccattgaaggtctagtactgtggagtaattaattattaccttaattgctctttttttttctatatttattatataaaatagactttttaatttattttatatttacggcttagtttttttgggattgcttttgctaacaatataattaattattgtcacagtcattataatttatataaattgtaacataattaattgattcagtacacaatgagtaatatattaatttgtttctctttcataatcaccttcttcgtaagtcatgatgattttcattattaaaaactacaataagtaaagtcgtgatgaaatactaattataattagctacctagttaatacctagatttaagcactactttaaagctaagcattaatattaatatattagagtagctatagaattaagcgcacatgtgatcaagcctcgttttatgtatgaatataaatagttcacaacttggtaagtcaattatgtaatatatggttatatacttgtactactattattgagagttgagatgtgtgtatcattaaaagcttttattattattattattattattattatctcttttcgtttgtcagaattgattatttagtttccagtttgtgcatttatataataaagattaaaaaggttttgggtgataatcactacttataatctcaatttgtagatactaatcaattgctgaattggttctgctagcataatcatcattattatctactaattgattggctaatgtactatctaatgatgataattataatttgagataattggcatagagattaagaaaggggaaattattacatatgaattgtaccgttgggatttatgatatttctgtaaaatataaataggtatagtagtacacactagcttccaatggaatttacctcatatatgcaatataggtgaggacaacgaaaagtgggaacaagtcgtagtcgtatcactttgaatgccatttggcaagaactttccaagagaaaagataaagcttttcctgcccatgtttcttaccaaagacttttatgtctcttgcttaatcagtttcttttggatagtttctaaagtgttatatttacacttcaattcaaaactccaactaataaaaacgttaatattttttacccttttggacttggtcatctaatttaattgtagctttatactcataaataaattataaaaataaaggaatatccaatggaatgttgacaaattaggaaaagaaaaaggttcaagtgtcggaaaagtaaacaaatccaagacaaaatccaatagcatgatagcatcgattgcttcctccatttaaaaatataaaggaaatactactattgctattgcttgcttctttattgttattattttttttactcattgtgattttcttaggccaattgataaagtagttgttttagctttttctctatattattgttaacactattatgagattgatgcattataagatgattaggaatttgtttaatagttattaaattaaagggaaattttcattttatgattttctttcaaaatttacaaaaatttgggtttgtttgtttgttttttttttttttgaaaaattattttgtgtgaaaaattaaaataaaaagttaaaaaatatg

SEQ ID NO: 185622 - DNA, 983 bp, Cannabis indica
aaaaaagaaaagaaaaaaattgtttcagacaagtgaactcattggatgagaacataatctgaattacttggaaagaaatcaccggccgttgggggcaagttattccgagaaactttgttacgaacctgtgcatgagtttctgcctcatgctgaaacatcttaaccaactcttgtagttccatcttcctaactcgaacttgtgcttcggtgatcggttgttttagtccaagataaatcaacccgattatgattaggatgattcccacaccgaaaaggatggctgcaaatagcccgaatgcatatggtgtgttttgtgcaccggggattccgtcaacattgattccgaatagcccggtgattatggaaagaactaagccacatccaccgaagacggctaggttgtgcgttactctaaggcttctgtcctgtgatatgaagacgaagaacttattttttctgtttggataactattatatgaaaatcaaaagttattttcaaactgtttggatatcattaaaaaccgttctcgaaaatcgttttgaaaaaactaaaaagcctagctttttcgaagagactttctaattcttaaaagtgagtcaaacaagaaatcataagagtttttttcattttatgttcccgaacctgcaaccatgcgcgaacggtgctctgcatgacatcttgaatggtaaaaagccgaccgcgtacggcttcttgctcctcgatcatttctcttgtactctttcttattccttctagtaagattcttgttgtgtttcctttcaaatgttggagaagctcaaacactatctcttctctagcatgaagtgaccactttactctgataacctgcaatgggagagaaccacaaaattgccatttgagcaactcctcttaagtatttatggatgattattgtgtctagtttaatcgtaaaagtgtgattcgttctattattaaatccttatatagttaaggggttttt

SEQ ID NO: 185623 - DNA, 8508 bp, Cannabis indica
gggggtgattgtgacagtcagttatctgtgatctgtaagggaaaatatcaagtaagttgtgtaatcccacatcacctggggaaggtcaactgtgatgattctaagactgtgtaggtatgggactacacaattgaagatggcttaaatgaattgattggtactacctatttcgatgataaagccctttggcattatagtaagaacgacgaatattcaattcgaagtggatataaaatggaaactgacttatgcaaaacagttcaacaatcaaatgatagtcaggtggttgcttggtggaaatacttatggaaattaaaagttctcccaaaagtgaaacattttacttgaaatataactcatttttggatccctactcaaggagcgtggccaaggaatggacattaatccatgttgtcaacaatgttctatgaatgtgaaagagagtgttgcatgctctatggcattgtccatctattcgttcagtgtagaaactaagtgggatgaaaaacaatattcaaatggtggggaaagaagatgttctttcttttctaatgcaactctctcaggtttggcagaaggaaatgtttgaatattttattgtgctatcttggcaaatatggtatattcgaaacaataccaaacatggtggtaatgttccacgcgcgaaggatgtgcttgagtggagtgcccggttcttacatgaaaatagagacacttgtggggtgcaaagtcaatgagctaaaatagaggcaatgcgatgaattcctcctataacagggctgctggaagtaaatgtagatgttggtgttcgaaaggaaagagaaggatctggtttggaatgtgtggttcgtgatagcggaggtcatgtgatttttgcttctgcatctttcttacaacagaatttccaaccactacaagctgagttactcaccattcaagctgggttgtaagctggaattcagcaacgtttacctcgattttgtatcgaatctgattgtcttgaagccgtccaataattgaaagaaaggaggatggtcaccgagatgttgatagtattttagaacacattcgatacttattattatttgataatgtgactgtaatttcttttgcttatgaatcaaccaattatgctttggctgacaaaattagtgctacgtgaatttgggttaatcctccttgtatgaatctccctttaaagtggaatttacctaatcctttgtaataatttgtttgtagaaatattttatgtaataaaaacgatatttttaattaaaaacgttaaatggctaaaaataagtagttattttgtttagtacaaatttaaaactgattcacttaccgtatatatatatgaacaccgtcttaagcagcagcagcagcttaaatattaagcaaaaagttttgtatattatttaccccacttttgagcattggctttttatttcagcgtatatcgttttccctctctttcaactcccaaacccaaaccttctgtatctctcttctctcctcttccttttcacttttctctgattattcactccatacatttgaacattttcgggagccaccaacaatgtcgaccttcggggccgcttcggctgggaataccaatcccaatcctaataattccttcgaggtacttattttcactatcattttcttcttgtgtatttgtaatcccagctgaaagcttccaataaatccctttgctttatttccctcctcctaatttttatttttctgaattcgaactctgtgtgcttcgtctatgtgtatatttattgtttttactctcttggtcaattaagtgttagtatttatttatttatttttgggtttaggttgctcaacctcctagtgattctatttcaagcctttgtttcagtcccaaggctaatcacttggtcgctacttcatgggacaatcaggtttgttctattaatttttgtctatttttgcgttcttgaacataattcatgcataccctttgatttggaaggagaaaaatagtataaatgaaagaacaagatgaaaatagaaactttggctatgtttgaaacttccattatgcccttaaaattgtaggtgagatgttgggagataatgcggagcggtaatgctcttgccagtacacccaaggcttcaatatctcatgaccagccggtaacaaccactgaatttcttaaatttacatttattctttctatattttttctttttgttttgccaatcctgaatgcgttgttgtttgttttgctgtaaggttttgtgcgcggcttggaaggatgacgggacaactgtcttctctggtggctgtgacaagcaagtgaagatgtggcctttattggctggtggtcaagctgttactgtggctatgcatgatgcacccgttaaagaggttgcttggattccagagatgaaccttttggtatcaggaagctgggataagaccctgaagtaagaactaattttctttcagtcttataatttaattaacctcaactttgtatacatgtagttgatattcttttgttttagataaaacttaaaagtctgaacggttaatctgttaatgttgtctcttgatttcaaccatgatgcactttaaggttgttgaatctaaattttgcgcagaagagtggcacctttacattgaacggctaattagtaacatgtgaaggaatttgtttctaaaatatatgatcatatggtggtaatgaaaatagaaaatgagtctagcccaaatgtctgtgtcgtaatcttcatgcagggtgctgatctttataggaaactataatgagagctttgtaatagtggaggaaggaatatttttctgtttccttgtacatttatgctgctaatttgttacttctatcctaaaatggcttgttcatttctgcatctgtacagttttgtgcctgctctgatcaagtttctgtataacattgtaatcttataattacaacttttagatcatttagttgtggttggttgtataattatgttgcgttcataggtattgggatactagacaaccaaatccagtccatacacagcaactcccagatcgctgttatgcactaacagtaaggcatccgctgatggttgttggcactgcagacaggaatctaatagtcttcaacttgcaaaacccacaggtaatacgctcttctcatgtgatgggtaaaattaaacctgcttttcaaaatgatctaaaagtgtcttttgcagcagtcaaatactagagtatgaaatattataatgtttcagagttcacgggtattagtattttttgaaattaatttatgaagcattgattcaaatgttggactcggctccttattttgtttaacgaagaaggtaaaatatctaaaataatagaaaaaagttcaaaagcaaagagaagatttcctgtttgattgattccataagctggtaggactattatcattaaatgcgtgcctgcacttgaatattattttttgtgattttttgttgctttaaacttcttgaggacctaaatgtgtgattaataaattttgaattagcattctcattaagagatctaatatcactacttcacttttaaacttaatatgttttccttttccttgttcttttaaatagaaactgcacaatttctttatattgttacaagcatcaaggttgttttgcataataactggatgagactcaattaaataaggaattcaaggacttctaacattgcagcagagtttacatcttattaccacattatctttgaatccactttttctaatccttggttatatacttacaggctgagttcaagagaatcacttcaccactgaaatatcagacaagatgtgttgctgcctttcctgatcagcagggtttcttggtactcattttactagattttttttttcctttcttttttaatgttaaatgaactacataactttgttatttatcacatagcatttttttacatgggatatgaaatgttgataagtcttcaggcttaggtggtgggattttgtacaagtaacatatttttgcagggaaatttggttagagttagaaaaatgaccctttgatgctgtcataactcataattaagctgtgaggcaataacatctttttttttcaaacctcttcatttggagtatggcaacagagcctcaaaccatctgaattttatgacacaaatttaacaacagtgaatttaaaataaattttttctgtagatctcgtatctaagtacttgtttgttgttatcgtttttttttcttttgacaaaaaaaatatatatatttatttacatgcagaagctttttaagatttaattctatttctcctcaacagctgtgtgataaaaatgtatattgccagttagagcatgattgcttttagttataaatttcataggtcattttgaattttcaaaatatatgtgtgtatgattttcttagatttatctccttgtgtaacttggattagcttcgctgtaatattattttgatggtacttcctgtccaggttggctcaatagagggaagggtcggtgtgcatcacctagatgattcacagcaaagcaaaaacttcactttcaaatgccacagagatggcagtgatatatattcagtcaattctttgaacttccatccagtaagattttctacaattctattatatgtacttttttgtttgagattgtagaacgggtactcagagtaggagcaaagaaacattgttgttcttgcttcagaacttgttgaaaatactgtaaaacagagtctattattcaaatgcgatatatctagaacatagcaatctaaaataaccagaaatgtagaaaaatattcaaaataaaggaatatcttatcttcaatggataggctaaaattatttctaaaataaattatagtattagaaactaggctgtttcatcagtcatcatccttgagttagctcccagactatagtataaagtagattaccattgagattctaggaatcttttctaacactcttccttaagctgagttatgtatatgaaacaatctcagcttgatacgtagattttttgaaaggaatcattaaaaggaagccatcttaagctgagttagattctttagaaccttgcttgcttaaacttgcaagggttggtatctctttgactatagttttcttcttaactgaaattcaatttgataccatccatagatttcgatactgaaagaattgaattcacctcgtttcaaaacgtaaatcaaaatactaaacaacagagtggtattgagaggcaaaatgtttaaaacagaaagatttagatttaaaagaaatattttaaataaaaataaggtcttatcttaagagatagtataaaatcctatctaaacccagtgataagattagggaactagggatactgaagtacctttaagatcctaaaatcttggttcataatatagataatctagaaatcctttctaacaaggattttaattttactttaaatcaacttttactttgagtcttatgttgattttgattttccttcataatactaaacccttctaaaccttgaagcattatatcactagtccttgttccattagtggttggtagtagaacaacttaattggacggctttcttatttttggatatttttagcagtgttcattattttcagttatattttgtattgacattctgctcgagataaataaaatcaactcggctgtaggatatgtgatcagattgtcaggctaaattcttgtgttgtcttcagtttattgatgtttcttatgatcacattccttgcctttgtttttcaggtgcatcacacatttgcaacagcaggctctgatggtgcctttaatttctgggataaagatagtaaacagagacttaaggtatttttgagtatcttctatttccttgcatttacatttttatttattttttagtttttctgctgtcttaatatattcaggaagtaaagttaaggtgtggtcggcataaatattcctttctactacctttattttgacgtagacattctttctgggaaaggaggacatcttattccctatgattttcattgcaatcaaagttatatctctttaaatatttaaatgacgatagaatgttgtcatgaattgaaaatgtcatggactcaattatgatcttcagatccttttatatacataacgtctttatgtactttagttttttttttgttaggctttatgtatcattaattattttataagtaatgaggaatttacaaatgagcactaaaattgaaaaactgttcttgaagtttagatattccagatttgtttcaactgttatctgtttgtaaaagtttgctatctgtataattagtatttatgtatatgttttgtgtgtacactgtgtatatacatgcatttatgtatgcacttctgtgaatacatgtaactgtatatgcatataagtgagttcattatgtcttccttcacatttggactatccaactctaatgcatgctttttttttcaaggcaatggcaagatgccaacaaccaataccttgcagtgcttttaacaatgatggttcactatatgcgtacgcggtatgtttcgcattcattttcttttagtttgatttgatcatcttcttcccatacttcgtcactactaaatcgttattcacttctgaaacttttgagtgcaaaggtgcaataaatgctggttggggtaaataattagtttctaacataatgattaatgtgtgtaatttttgtggtaataacagagtttctgtagatactttatactagatttcaggtagatctagtgtttttactaagttagaacttttaattcaagcttcagtttggtgcagctttagaatggaaacagcttaatacttttcttgttttaattttgttgaaaccctgatagggtgagatggttacatgctctttcaacttttaaattcagtgcatcttttgtgaaaatttaaaaatttggtcaaatcggttggattggtgcactaaatgctatgtatcatgataatgtactggctaaactctagccagtatgaaaagctgtaattgttgccaggtttccatgagttattatagttgaatatggctatgggattacactagcctagtatttccaactcataaaccttacaataacatcttgttggtatcttgaaaaatcatttagtaaagaatcttcaacttctctgtaggtctgctatgactggagcaaaggggcagaaaatcacaatccagcaacagcaaagacatccatatacgtgcacatgcctcaggtatgttattgaacatgttttaaagtcaaatagaatgtaatgggaaagactagaatacaaatcacaaagtgcaacctcttttatttttggatgcaggatcccgaggttaagggcaagcctcgagttggagcaagtggaagaaagtgaaattggttatgcgcttgcgttttttgttgtggtcgtatgtcttaaagtacatcttttcttttgggtagtttgtatatgaattggattcttaggtgagtgtggacttgttttcctgtagttggatagaaactttagttaagtgaggaaatttttgtatccattcaagtcgacagatgttttggttttggatttcattttaaaaccttgaggtttatttggttaatgttgagttttgagatgaattcatttggtgcatttaaacagtaataggattacaattacttagcaaaacataaaacaaagaaacattgtttaacatagatagaagttttcgacagtccatcaccactttcccaagaggtgaaaccatggtgatgttacttcgaatagtttggacaattgagagacaattagattcgagtttaatattatgtcattcatgattcttgatccaacttaatgtttttttaatggctaaagcttcaaccatatttggtgccattgtatccctgcgatagactgttttggcctccaccaaatacccgttgtgatcccttgccaccaacctgaaaccatatgatgaattgcagttaccttggcaataaaatgaacagattttgatgtaaatgatttttatttcatattgttaaaaattaaaggagttttttattatagggaaatttgaaaaaatatgcataaaataccttaaaattttatgcctaaactaatgcattttaagattaaaaaaatatgaccactttataataaacccaaaaataaccctctcattctcaaacctcaactctctctcttcctctatctctctcggttctctctcaacatctcaccctcaccaaaccgaacctacccctcaccgcctacacagacgaccaccgtgagacccgactacctccgagatgtcgaaggtaagcattcgaccctattttttatttatttttgtctattattttttgggtgatttatgatagacaatgtgtcaaaagataattgtatgattaatgtttgttatctgtgag

SEQ ID NO: 185624 - DNA, 3386 bp, Cannabis indica
atttttttttttaataatagagtttatttattattttatagagtctaaataaaactcatcaaatttaaatggcaacttactattgaattatcccaagttataaattaaaaaataatatatgagataatttatatttattttaatataaataataataataaagttatttatttatttactcttgttgttttattaaaaaatacaggtaaaaaactaaaaaaaaataataataagagaaaaaaacgaatcataaattaaaatagttatttggaaattttattatttaaatggttagttttaaaaaaaattctcaaactagagatagaattttattgttatgattaaaaaaacaaaaaagaatattattagatcgaacctgttgaaaaccatggtgagagtttcgaaattattgggttcttctaagaaaaacttcaaatcagcggctcttctggcggtgttgaatctcaccacgggagctctggttatgccgtctttcaacaacacactgaaagatccaccggaaagatgaatggctttacagccccgattggtgctggctaccaaacaaccctcagtggtcgccatcggaacacaatactctcttccgtcaagcaacagaggtccggctatccccaccggaatctgaacatacccaactggcatctcacagcactgacccaaaatcgaatcgtaatcgaacccattcaatggcagaccggagagagattttccagtcaatctctgtaacgcttcacgacgaatcgaagccgctctatgacaatcacccaacttagtttcaagagaatacgacggcgttttcccatccaagacggatttaatgatctcttcgtcttcttcggtcgtcgccggaactgtgtcgattacctttggtaaagccgatttggaggaaacaacgactggtggtgcaatttggggaagtgggcattcgagtgcagctccacaagggacttttcgagtgtcgtctttgattaagattgattcttgttcttcttcttcatcgtcggcggcccatacgtcggtggttggtcggagaatcaaggactgaacgaaatcgattccgaaaaagcccaaaagataaatgaaggaagcgattaaagcaaagacggcggagatttcggaaaaagtgaggacatggagaggagttgaggtacggatcttctcgcgccaccgtgtaaggaggaaataaacgaccgagaaaaacagagtgaagaaaacgacgttggttacgtacagaggaagaggaagagcatctgaagcttttgggctttcttcattatgatgggccttttttaaggccttaatgggctcggccggcccagacttggttgatcgcctgcttctgacatccattttgatggtggtggtggttttagatcaaacggcggagaaaagaaaaacgatgatgattgattctgatgatgatgatgatgatggaccagaaacaaaaacagtgatccgaattcagaaacacgttttgagtttctgtttttcggttctggttttgtgggtggtggagctagtaataaggattgttctatatttatagtgttggtttgaggcaattaatcatattattattattattattatggtcttctcacgtgttgacacgtgctatgattgtcaatgtaatacacctcaatttcgatgtataattaccttacgttaaccctctcaacatagttttttgtcttactcactcatttcttgtttccttcctggcttattttttttttatttttcttttttaatatttttggatacgtttttaaagagatgcacttattatttattttggttaattttttttttttcataatcttacattttgtaaaaattttaaaatatttgaaaattttaaaacgcaagactcgtttcgacttgttgaattcttttgaattttttaaaattgtgtaaagtattttaaattactacaacgtaaattaccataaaaaaatttgattaaaaaatatcttaaatatcgaaataaataagtgtacattagtaaattctttttgaaatagtacattaaagaaacaaagcattcattaataataaacaaaattaaatcttatagttattacaaataaagtcttaactagaatatggtcagtaaaactacaaaatttcgaaataaaaagaaaattacaacccaaaaaataatatgagaatctattacaattcgcaatatagttatcaataagccacactctctttagtttttagtcattttctatcactctttagtctctttttttagtctatattcattgagttgcatccatattttaaaaaaaaaataataaatatatatcatgtacttaccaataccataaatttttgtacgagaatagggtataaaaataaattatctactatatacgtatattaattaaatcaaattttttctttgagactgagaaagaaaaaaaaaatctactatcaatgtatttaatacttttaaatagaaaaaaatcatgtatttaattaataaattattttcgaatgaattatgataccatgctatttaatattgttcttattatcatccttgtttttaatttcacatttttctttgtgttgatttttttttttggaagtaatttcttaatgttgattgataagtttattttacatattctatttaaaactaattaatatttgagaattgagatcctatactaaatatattacactgaatttcatataagataagatagcattaaacactacactgtttaggtatcttactaatattctttcaatatatatacgtacgagatcctatttatataaaaaacattaaaaatttaaaaacattaaaatttagaaagagaagaaaaaaaaaaacaacaactaatgaatatactttaagaagactcaaaagatagacataatatttataggaaatgtctattatagggaattggagattattatttagtgtaatatatttattggtaataaataaataggtgccatttcaaaaaaataaaaaataaataaataagtgtatgataatagttaaataataagattatattaaattatttattatgtattaatatattaattaatgtgtatattcagtagtcctatatagatattagaaaatgtctctattttatgcaaatacctaccattgtttaaaaaaaataaaaatacctaccataaaattattcaataattataaataagaagcaattttttaattaattaaatatatctattatatatagaaaatattctaaatggagtgctcaattgttacacactacgaaatctccaaatgatgataggtaagaggtcctcttcaagaggacaaattcttaaatatacttttcgagacatgtcaatcttccagt

SEQ ID NO: 185625 - DNA, 2968 bp, Cannabis indica
ggctgagctaagacggcttgtgccaattaattggaacagtcttattaatatacatttatttttttgaataagataaccacttaagggtgttcctccaatatttttaggcctatccgatctaattatatattgaatattagattttaccatccgatccaattaatttcagtcattcaatcgatccaatatctattggatattggattggatcggttctatccgttagatgcatttcacatatatttattgatttaatttaagttcattcaatattttaaacatagtattttttggatcagatcggatctatataatattttattttaaattagtatatattggattgaatttgattcatctaatctaagaaaaagagaaattttaatattaatttttatatatacatatattttacgtataacaatataaaatctaattactcatccaaactaaataaaaatattaattagttcgattagatgttgaatgtattagatttatagtccgttgtaattaaattagtcggttgtcattgaatttgatgatttatgcacacccctaaataccatttattagtttgtagaaatgtccaagaaattaacacaaacccaaaatggcttctacaaaatgttcactgctttctttaagttattgaactcgaggttcttttaaaaaaagaaaaattctataacataaccaaataaaacaatggtgttggattgaggattttatttgctttaatacgttcaaataatgtattaatatttctttttcattcttttctaaagaaataaagtatcaataatcattattgggaatcatctagtttggttttgacgaatattatgaagaaaaaggtgatatattcaaatacagtaactaactagtaagaagcacagtagtagattgaagatgaaaataaaatccaattgaaattgcttcttttgaatacaagaaataatagtaacaataatggagaagttacattaattatgagtgtaaagtgacttaagaagactaaaatttgcttctaggcataggtagtactagtcagtcagtcttgtcctgctgtgatccaatctcttgcaagtaatgctccgcttccaatgctgccatgcaccctgcatttcgaatcccaatcccaaacaaaattctcatcaatcatcaacaatcatgtatatgtatatgcactttccctctcaaactccataaacaaattcaataaacaacttgtttgctttgtttctgtttctgttgttcttctcttaacataaaacaagagaataaatatgcattctttcttggctatgcctcctagattcagagagtacaataatgcatagacaatagttcgggactaagatcctaaatagccttctttgttttgtttgctaaaacacaatgtactatctcatccataacaagttcaattcaattcaatacacaacttcattaacaactttctaactattaacataaaacaaaaatgaagaagaagaagaagaaagaagttaccagtcccggcagctgtaacagcctgcctatacttcttgtcctgaacatcaccagctgcaaaaactccacgcacactggtcacagtgctacctggcttggtggcaacgtacccatctgagtccagctcaagctgaccatccaaaaacttggtggcaggctcatgcccaattgcaaagaacagtccagacaccttcaaatcactcacttcaccactcactgagttcttgatcttcaacccacccagattattcttcttatctccctctccgtacgcctccaccaccgccgaattccacaccactttgatcttagggttactcagagctcgattctgcataatcttcgaagccctgaagctgtccctcctgtggattatgtacacctccgatccatacttggtcaagaagttagcttcctccatcgccgagtctcctccaccaatcaccgcaagtggcttgttacggaagattggggcagcaccgtcgcaaacggcgcaggccgaaatcccacggttccagaatccgtcttttccctcacccgatccggcgaactcgagtcttttggcaacagcgccggttgcgacgatgacggagtcggcaataacggtcttggaatcggagaatatcttaaagggagttgcggagaagtcaacgcgagagacggtttcggtgaagatttgagtgccgaatcggagagattggctacggaatcggtctgtgagttcgattccaaggatgccatctggaaagccgggaaaattctcgacgtcggaggtggtggtgagctggccaccgggggcgatgtcgttagccatccaaccctcgaagagaatagggttgagctcggcacgagcagcgtagattgcggcagtgtgggctgcggggccacttccgatgatgcaaagcttggtggtgagagtgttgggagcatccatggcgatggcggaggaggaggaggaagaagaagaagtagcagcaatggcggcggtggtggaggttgaagcaacaaaggaacgagcttttttgagaagagaaaagagagttttttggtttgggcggaaactcatttctattggtatacacctctcttcatattcccctattacacaaattaataattatttcttttttatttaacaaaagatattcaagaaaaacagatttaaaattgattttttttgtttgaaaattctataacgcacatggagtctttactactatatttttttatttattttggcattccaaaaattcaaaataactttttagtttaaatttttctataattatttacgttatagttattttaaatattctataaaattttaaaaaatttaacacgttaaaaataagattcaagcagtttatatgttttttaagatttttcaaattttttaaaattttgctaaatatattaaataactattaggtaaatgattatgaaaaaattagtt

SEQ ID NO: 185626 - DNA, 4538 bp, Cannabis indica
ctattatctctctctctctcttgcttttttattgctgagatgatgagtgctcattgggctttttagaggtatgttgatattgataatctcttcttggcttatgttttttcattttaaatttagaactttgttaaaatagttaatttgaaggacaaagttatgaaatttctgtttggattagtgtcttatatgaataaagttatgaatttgagttatggggttggtttcttttagttgtttttttttatgtcttttgcttgttttgattagttcttttactatttctcttaacatttatcaattctgtttatcatcttggcaagtaaatttgtttggttaattagacaacattgtaatatgagtacttgtgtactttcaggtgttaattgttgatctatatgttggttttgatcatccaaaagctgcaaaaatgttcggaaatttcaaaaggaggagagttttggaggtgggatttgcagggtctttgcttatcttctctctactagttttcacttcagagggtttgaattctgaggggttgtcccttttggagttgaagaaaagtctagttgacaataattattatttgggaaactggaattctgctgatgaaacaccatgtggatggtctggtgtcaattgtaatacttctgattttgatcaagttgtttggtctcttgatttgagatccatgaatctttcaggtacaattagctccagcattggtgggttagttcacttgactcatcttgatcttgcttacaatgcattctctgggaacatacctaaagagattgggaattgttcaagtttgcaaaagctttatttgaacaacaatagattagtggggagaattccaccccaattgggaaatttatctaatttaactcgtttgaatgtatgcaacaacaaattatctggttccttaccagaagagcttgggaggttgtctttgatgattgagtttgtagcttacaccaacaatcttaccggtccattgcctcgttctattggggaaatgaagagtttgagaacatttagagctggccagaatgctatttcgggtagcataccaggcgaaataagtggatgtcaaagcttggagcttcttggacttgctcagaatcatttaggaggggtgttgccaaaagaaatcggtatgcttggacgcttgacagacttgattctatgggacaacgagctctcggggcctattccagaggagcttggcaactgtacaagccttgaaactattgctttgtatgaaaatagtataactggaccactaccaaagtccattgggaatcttaagtccttgaaaaggttgtatatatacaggaattctttaaatggaactatcccaaaggaaattggaaatctaactaaggctggggaaatcgatttctcagagaactatttgagtggtgagatccccagagagtttggtaaattaacaagtttaaggttactatacctctttcagaaccaactttcaggtgtaataccaagtgagtttagcaacttgaagagcttgacaaagcttgacctttctataaattttcttcaaggctccattccatctggttttcagtacttgagaaaaatgattcagatacaactgtttgataactctctcaatggtaccattcctcaggggtttggtctctacagtcagctttgggtggttgatttttcagataaccacttgacaggtagaatacctcctcatctatgtcgaaactctaacttgattttgttgaatcttgagactaataaactgtatggaaatatcccaactggaatattgaactgcaaaacattggtgcagctcaggcttgttgggaacagtctcactgggagctttccttctgagctttgtaatttggttaacctttctgccattgcattggatcagaataagttcaatggcccgattcctccatcgatagggagctgcaaaaagttgcaaaggcttcatatttctgataactacttcaactctgaggttcctaaggaaataggaaatctttctcagttggttactttcaacttatcatctaatttgctcaccggtcaaattcctcccgaaatagttaactgcaagatgctgcagagacttgatctcagtagaaatcactttgaagggcctttacctgatgagcttggaactcttcttcagttggagattctcaggctttcagagaataggttcacaggaagcataccatcagcgttgggaaacctttcgcgtttgacagaattacaaatgggtggcaacaggttttctaatgagataccacccgagttgggatctctttcgggtttgcagattgcaatgaatcttagttacaataatctcactggtactataccatcacagcttggaaatctcaatttacttgaatttcttctgctcaataacaatcatttgagtggtgaaattccaagcacattagagaatctttcaagcttgttgggatgtaacttctcatacaatgaccttaccggatccttaccccccatacccctatttcagaacatggcttatagcagctttgttgggaacagaggactctgtggtaggcctctaaatgactgtggtgcaaatccttattctcaccctgcatcacatccgggtggggctgaaactcatcggggaaagattatcactgcggttgcagctgctgtaggtggtgtttctctcattctaattgtcataatcttatattacatgagatgtccacccgagacagttgcttcattgcaagagaagtttcattttcgtctgctgattcagatatctactttcctccaaaagatggtatcacattccaagatcttgttgaggcaactaacaactttaacgaaagctttgctgttggaaagggagcttgtggaacagtttacaaggcggttttgcgttgtggaaggatcattgctgttaagaagctagcatctcatagggaagggaacagcattgagaacagttttcgagctgagattttaactcttgggaatatcagacatcgaaacattgtcaagctatatggattttgttatcaccaaggctctaatttgcttctttatgagtacatggagaatggtagcttgggtgaaatgcttcatggttcttcttacagtttggaatggccaactcggtttataatcgctcttggtgctgctgaaggtcttgcttatttacatcatgactgcaaaccaaggattattcatcgcgatataaagtcgactaatattctacttgatgagaagtttgaagctcatgttggtgattttggtttggcaaaagtgattgatatgcctcattctaaatcaatgtcagcagttgctggttcatatggttacattgctcctggtaagccacactctttctctcttaacatttgcttatgtttattgaaactgaatatcacatactaatataaatagatttaaggctatttagaattttttgtcctcgaattaaacctactaccaaattgtgtcttctaaacttttcgtcagttataaatgtttcctgaacttattatcaatgctaaaatataagacttttgtttatatacggctgacatgccacataagcgtaaaaattaatttgaaatttaaaaatctatattcttaagaactattaataagtaaattttaaaattactttattttatttattgatagataataagaaaattaatttttcaaaattaaaattacatttgttttgttgttgatataacaatatccattttgtcacatcaaacatttagttagttacgtgggataaaacttaacaaaagttctatatttcagcattgtgaataattcagagggaatttttaactagcaaaaaagttcacgaggcacgatttggtagttataataattcgaggagtaaaaattctaaatagcttagattttaagttttgaaagagacatgattcataacatgacttattttttcattgcagaatatgcatacaccatgaaggttactgaaaaatgtgatatctatagctatggagtggtgttgttggagttggtaacaggaaaagctcccgttcaaccgctagaacaaggcggcgatcttgtaagttgggtaaggcaatatattcgaaaccattcactaacatccgggatactcgataatcggttgaatcttcagaacaaagctattgttagtcatatgctgacagtattaaaaattgctttgttatgcacaaatctatccccatttgatcggccttctatgcgcgaagttgtcctaatgctaatcgagtcgaatgtgcatacaaattttcgtatttcttcaccaacaactactcatgatcttccattgaaagatgatctcccatgaaagtatgtgattcttttcaagctctgaataactgagatgattttttcttttttcgatttcctcaatgttatttgcacaagggaaaaatgacaatatgttgtatattttcattagaataacactagggagttctatatagttataacaaggctaattagattttgatttcttt

SEQ ID NO: 185627 - DNA, 2591 bp, Cannabis indica
ttgaaaaaaaaaacaacaaaaaacagcagaaaaataattgataatttcccaaaacagtagaaaatacaaatatttaaaatcattattcgatagaattttatttttggaggataaattgtacctatttgggagtgcattggcacccccaccgtcctatgcaagtggttcgaagcgaaaaatgatgggcagaatcgtaatttggaaataataaaaataaaagaaaaggaaaaaaaaagagagagaaatatggacggcatcgggtgacgattacgttgctatataaataagtcgaagcccaagggaatctatagtataaagtcctcacatcagaacccaaacagagcttaactattggaagagactcacgagaaatactataataaatatattatcgtattcgtacccaatatttgtttacatcccactctctctctaaacgtgtagagaagagagataaaagtggtagaagaagagcttggacttggagttggtaattttgttaactttttcctttttattttttttcctttggccactgtatatgttgtctcttagctcatcatcatcatcgtcttcttcttgttattctagttatttgggtcatacttgctgctctctcatcactctattcttgtgtcggtttcggagtttgatattttccgagattgagtttagttaaatgcaggtattgttagtggtgcttaatctctaacttcgaattagtcagttagaaaggaagagaaaatgtgccagaaaataaaaagaaatgaaacagaacagaggcggcttctgttatctttggataattctgtttcatttttccactcttttgggcttttcctgcaacccaaacagtcttttcttgaacagggttctttgtttgcttttattttgaaaagggtgttctgtttttccatttcggaaaaatcttttattttaaatcttttgtttgataactttccctgttggggtgtttgtttttcacgtggactgattttcattttgtattttttttcacttactttttcttatgttccaaaatttaaatccttattggatgaaagctggaatttttgctattgaagagcaagctttctcttcttcaatttaattttatggattacagctttcaacgttattcttcttaattatcatcagattttcagtttgactaaacttgtcgtagttttagcttaatctttaattcggatcgtattgaaagttttttgagtacgttgactgctgtcaagtaaagatgaaagctttctcaaaggttttcagtgcttttgaattcgcttattattactttcgaacaacttctcaatagttttggaagcttcacttcacttctatcagattcataagaaaaaaaagagaagaaaattctcggcaagatgaaaccataatgtttttttttttggctggcaatagtaatatcacctatcaatatgattctatgaagagatattccaattgttgaagtgggtcatttttgcttgttgataattatgtttcagtacgccttttaggactataacaaattcgcttttattgggaaccatagaaaattgactgtttttgtattggttcatagtttaattggttaatagtgattgactttatttcttttcacattcaagcaaattcacagctcaattaccctgttggtccgagacagtagataagtatgttggaaaagatggaagagttcaacggtgacatagtgattgatgaatttgaagccttaactgcagattgtgagagggtccaaaggaagaccctgaagcagattttagaggaaaatgaatcagcagagtacttacagaattcaggactcaacggaagaactgacccagaaagctacaaatcttgtgttccaattgttactcataaggaacttgaaccttatattatgagaattgcagatggggaaacttcacctattctcaaccggaaacccatcactacaatctcactaaggtaactgttacctactactgtatttaatttacttaaaaaaatatatatttttttttatttatttttgctacagaaactacagttttctgagattttttctcttctttttttctattattttagctctggtactactcaaggaaagcccaagtttgtacctttcaatgatgaattgatggattcaaccatgcagatatacaggacttcttttgcctttagaaacaggtactgctactatattgtaacttttcttgtctgtttgcattttcttacctcaactacctagtttataatatctgtgattctattaaatgttctcttcttattcccttttacggatgagaaaattcagtaatcatgtgatattttggtgaataaagtatacgaatatttttctatccaaaagggatacagatactaatcttattatatatataattcttttgttcagagaatttcctataaggaatggaaaggctttgcagtttatttatagcagcaagcaattcaagaccaaagggggtcagcttgcaggaacagctacaactaatgtttttcgaaactcgcagtataagaaaactatgatggcaatccaatctgagtgttgcagc

SEQ ID NO: 185628 - DNA, 5190 bp, Cannabis indica
gtaattttttttttatttaagctttaaatggcacacgaagtgcaagtcatttgaaaaaaaaaaattgcacccctctcaatgtgaaaataggaaaatgaagatatgaggaggcatgagaatcatcctttgagctaagggcggccatcgtgcctaagtcggcggacgtttcagatgtagctgaagctggtggcagcaaggggcaggatggtctttgtgcgataggtccttacgtgcatggtggagaaggacaaaagatggtagtggaggttttgcatggtacggatgcagagggggaatgtggtcccagtactggtccttttgtggtggataaggggaaaggtattgctgaggtggataatgaaaaaattaaacatttgacaatggttttcaaagcctctctggaccctaaggcacaaccggcccacaaagcttctaggcccattagaagtctgggtaagactttctattctctaactggatcaggaaaaaataatgctactctaagtgggccaggtaaaaaaaaggcgactgaacgagattggggatattacattggatcataaggctggtaatttattcactccccattttaatgaaattgggacaaaaaaggcttgcttatcaataagtggtgaccctccttctctataaggtcggcttcggagaagacttgggcatggcatgttgatgggaagaatgagattcaatctagcctggagaagtcggaagaggagatcgtggattgcgatggagttggtaaggaagttcctactcagggagatgttcaaggcaagcaggattttgtgtgggcgaggaggcgggcctttacatgcccccaaatcctccatgttaattctatcgtggaactgtcgcgggcttggcaaacccgaggcagtctcttctctccgaagcttaattcagagtgccaatcctgatgttgtttttcttatggaaacgaagaaaagctcatcagatatggaggaaatttggcataggcttggctatttaaatggtacggctgtttctgctattggaaattccagaggggttgctctcttttggaaagttgggtggaacttacagatagtttcttcggattgtaacaagataatagttcgattcgctccggttctgaatataacagagtggattggttgcttcacttacgctcccccccgtagagaacatagaagggagttttgggataatcttggtaatactatgaaggatttcgctagtccttggatggtcatgggagacctcaattcggttcttaagtcggaagaaaagtcaggaggtaggccggtaacttgggccgaaggtcagggtcataaaagttttatgtttgatcttggggctctcgatttggaaggggcaagggctctttttacttggtctaactgtcaacattgggatcgactggtgcgtgaaaagcttgatagagttattgtgtctcctccttggataactcagttcaaaaaggtagaagtccgaaacctccctataagacattctgaccatgttgcaattcttttggatactctgcttgatagggagaagattatctccccttttcgatatcttgatgcgtgggccgcgatgatgactgccacagagttatagaggaggcttggaaggaggctctctcgggttatcatagtttcattttatgtcaaaagttgaagatcacggcgaaggccctgagtgcgtggaatgttcaggtcttcggtcactgccaaacaaagttaaaggcccttgaaaagctcctgggtgatgttcaaaatcgcacaccatccaaagaaaatgttgagcttgagggcaccattatgttggaaattgatgaagttgaacaaagattggagtctatttggaaacaaaaatcccgggaaaattggctaaaggagggtgatcgcaactctaaattctttcatgcctcgattgttgtccggcgcaaacgcaacttcatatgggctgtcaaggactctaatgacagttggattgaaggaagggactcaataggtaattattttcgcaatcactttcaaaagatttttgaatcttctaacccttgtcttgagcctgatctggatgatcttattcacccgtgtatcactccgaatgaaaatttagctcttttggcttgtccttcggctgaagaaatcaaaggtgtcgtatggtctttgcccacccttaaatccccggggccggacggtttccccacaaagtttttcaaagattttggggacattgtgggtggccaagtgattaatttcgtccaagaatttttccaatcggggaatttcgacagagaagtcaatcgaacttttattgttctcatccccaagaaatcgggtgctagtagtttcgatgagttccgtccgataagtttatgcaatactagctacaaaattgttgcaaaaattttggctaatcgcatcagcaaggttctggataagctgattgctccttatcaatcggtgtttgttaaaggaagatggattgccgataattctattattgcgagtgagatatttcatgatatgaataggaaatcggggaaattggcttttgctagtatcaaatgtgacatgtccaaagcctacgatcggatggaatggaagttcattttgaaaattttgaaagggttcgggtttgatcagcgtttttgcaatctcattggtcattgcctgagtttggttcaattttaggtgcttctaaatgggagtcttaccaaggctttctctccgcaaaggggtctcccacagggagaccctttgtcgccttacttgtttattataggagcggaagttctctctagactgctgcttaaagaagagttagaaggaaggctgactgggtattccttgaaccgtgaaggtcctattatcacccattcatgtatgcagatgacctcttgcttttcttcaaggcgaacgggagcaatctgaatgtggtttgcaatgtgttaaacaaatattgcaattggtctgggcaagtaattaatgtggctaagtcaaagatctttttctcaaagaattgtttgcctaaatgccgcaaggaattctgtgatttactgggttttgctgaaatgaaaggtgatgagaagttcttgggcagccctctgctattcaagagcaacagaagtagtgattttgattatattattgaaaagatttcttcgcgcttggaaggatggagggctaatctgctgtctcaagcagcaagaatgacattaattaagagtgtgctggcctccgttcctatttacacaatgtcagtcttccttcttcctcgcaaaatcacgaatcgtattgacgcttcattgagacggttttggtggacggggagctctaaagaaggccgttacctctctttgaaagcttgggactctctttgcaaaccaaaggcctgtgggggtctcggtttcaggcgagcgagggatatcaactttagcttgatttctaaattgggttggcttttgatatctgatggcaattctctctggactacggtagtgaatgctaagtattgtcaagttgaagggttcttttcgactcctcggccttcgaaagcatcgctggttgttagagggatttgggctacgcgtgatttcattcgtcaaaatagcatttggatcatcggtcaagactcgaaagtcaatgtgtgggattaccactggtcttgtggtaatggtattcaatatgatgctggtgtccttaacccgaagatcaaaggcattgatttggtaaattccttttgtgatccctcgtagtctgggtgggatcggcggaggctctcggcctattttacccctgaaccgaccaattccttaatctcggtggataggaggttgttagcagacagtgattcggtgtattggaagtcttcttctgatggcaagttctctcttaaagttgcctattgggatttaaataaggaaagagttgctgaaaaagatgagatgtgctccttgatttggaagtcaaaacttcatgaacgtctcaagctgtttttgtggaaactttgttgtgatgttcttcctttcggatcaagacttcagagtatatttggtaagactccggatccgtgtatgttatgtggtcaaagtgagggggatgatgtacatcattttctttcgatatgcacggtcacgcaacatctttggtttgcttctcagtgaaatttctgttccacggccctgaatttttcttctggtagggagttagtgcaatggcttcataatccttcctttaggcacctgctctctaaagaggagtctcaggagttctttctttatggtaccctgctgtaccataaattgtggatgatgcggaatgagatgtatcatcatggaacacctttggatttatctaagctgcagaagcaagttaaggatggcttcattgagcataggagtttgctgtagtcaatttttggttcttcgcaggatcttggcagtgtggagaaggttcgctggggccttccgagactaggaagaatcaaaggttatgtggattttgcaaagtcggatgaagaaggtgcggtagctgctgtcttctttgacccgtctggctctgttctggcttttggagccaaaaaagtttcggcctcctctgtgttacaaggggagttggaggctatgcggtttggtgtggatcttgctactaggcttcacctggggggtttgtgtatcctctcggacaacctccatctggttcagtctgtcaaggcgaagtcctgccctttttggaatctgcatcttgcgtttttctctcttgttggtgctttgcattcggggggttgatgtatgttgggtctctcagattaataatgcggcgcactctcttgctagatggggtttgttccaccagtgcaatgggttgttgcggttttgggaggtgacgtcccatgtgctcaccaatcttcttggttttagtttaatgaatgtttggtttcagctaaaaaaaaaaaaagaagatatgaggaaaacgacaccgttcgcaatgcatcctcatttagtgaacaccgaaaccggaacaagagaaaaggagacaagaaaaccaccgccaccagttcttgatttctcagaatcatacataatcccttttatcttcttcatcaccaaaaatagggtttagggtttttcatattcttccattcagtgacctttaaactccaccatttatcatc

SEQ ID NO: 185629 - DNA, 3274 bp, Cannabis indica
tttttattcttattctcagttcgtgctcgaagatgtcttctagctatgttttgtttttcctaaccttcggttaattatgtatcggttaatgtttatgtttgtttaaataggtcaatgataccgttggaactttagctctaggacattatcatgacgcagacactgttgctgcagtgataatcgggacaggtacaaatgcctgttatttggaacgaacagatgcgatcataaaatgtcaagggctttttacaacttcaggagccatggtatttttctcgtgtttttcttccgaaaaatgatttttactcaagtaccattcgctactcacttcccctttaatttttaggttgtaaacatggaatgggggaatttttggtcgtctcatttaccaagaacaacttacgatattgatctagatgctgatagccctaacccaaacgatcaggtaaagatgttatattgctgacacttaataattagtattactatggaaatatcatattgctgataaattctctgcagggcttcgaaaaactgatatcgggaatgtatttgggtgacattgtgagaagagtaattcttcgaatgtcacaagaaacggatatttttggatctgtttcttccagattatcagtgcccttcatcttaaggtgagtttccctttttcattgctcatattatagtaactaccaactagaaatcccagaagtggatgtgtccaaaaatggtttctttattccttaatccatctcaaaacataaaacaaaataatgtgttgaacttatttggtgagttgtcatttttatagatattattgtaaagtttgcaaggacaactaagtgatgagatggagttggggtctctattcttaaatcattattgctctactatttgtacatttgatgttataaatatagattcaaatagatataaaatattactcttgtgactttacactatgtttggtagaaaggagagatgaaatccattgtttggtaggcgagagaagagagttggaggggtctaccttctccctccgaatcccgaaaatttaatccttccaaaaaacaaagtaaatatatcaaatagtaaaattacccttcaaaaatctttatggtaattttaataattaactttctctcgatctttcctgaactctccctcgatcatattttccccgtccatcctactttccgtccttcctatcaaacatattgaaggaaagatctctctccttaggaagtttctaaaagcgttcataaatgtttaaccgagtaacagtcttacttacattctttccacttgtattttcaggacgccgttaatggctgcaatgcatgaagacgactctcccgatttgagagaagtgggaaaaatcttacgagaaatcttagaggtaaatctttctcctttttccatttccctacaatatcaagtaaaataacactgattttctgattatcattcctatttcagattcccgacatcccattaaaggttcgaaagctcgtagtcaaagtatgcgacgtgattaccagaagggcagcaagactggctgctgctggaatcgcgggcatcttaaaaaagattggtagagacgggagtgggggcctaacaggtggaaggagaagcgataacaaaatgaagagaacggtggtggcagttgaagggagtttatacacaagctatacaatgtttagagagtacttgaatgaagccttgtctgaaatactaggagaagaagttgcccaacatgtgattctcaaagtaacagaagatggatcaggcattggagcagctctccttgctgcaacaaattcacattcatcactacaacaacaacaacaacaacaacaacaacctgtggatagagtacagttgctataaatatatatattgttcatataatatatatacatatagcccctgtaaatgtagaaagtatcattctctataatctatatatatagatatagatatataagtatattatatattatctctttgtgtaaaaagaaggtttgtccatatattttttcttacatatctttgatgttagctgtggaattttttttttgttattattattttatttttacaaaaaggtattaatttctagtttggttatgtgttatatgcatatttatttatttatttatttatttgtgaacaaatgtagtgttagaatgaatgagaaaaacaatttcaaagtgagtttggcaaatgtctttttaagtttttatgaatgcttagttacatcttttcacattttatattttgtctaaagagtaaaaatggcatggttattgtaaaactttagacagtctctagggttcttcttttggtcggaatttcatcgatcgatcgagatgttttgccttttctatgtccgctttgggtgcgttttatcgagggggtctctctcctttattttaggtcttcctttgcttcattgtgtgatttcttaagtggttggcgttttggggctttatggttgttaatttcaggagtgggttttctcgggttcttttggtttctagggtgctcaggtggctagggctattggtgtgttttggttgtagcgtgtcaaggtggattctcagcttgatagtagtgtcggtgttcacgggactttcagtgttattttgcctcttttcttttcttgttttctatttgagttttagttaggtgttgttttgtttgtgttttatttgtaataatggtgttgtatcatccaattgttgggactggcatgtgccaatttttgcttcgtctagcctagtcgtgttttaattaagaattttatcttctaaattttgacatttataaaattatttctcataaatttttcatagcgttaaaaatttctccgaattattgagattgtttgattcaatgatttctgttcaattccgtttaattttgataacgtgacgattgttgctgtactaaattgtgtctcttaaattttgatatttaccaaagtgtgttctcaaattttgacatatactcaatcgtactccttaaatccaataataacttagcttattatgattatgattcttcaatttgattgagagtgaatctgatttataatcaaatccaatttttagtatatatgtatttaatctaaaataatatacaaaggaaagagtggttcatgtcatgtgaaagtgatttgtagaatttatagcatgatagctaccaaatttaactcatatataataaaatcttggaattgtttcaagaaaacacaataataataaaaaaaaaa

SEQ ID NO: 185630 - DNA, 7529 bp, Cannabis indica
atatcatttttgcattataatctgaactacatcttaatcttgccagtaaagtaaaagtggcaattttaattttataacatcatataaatttacccttatccttgtcttatcagaatgatttggtaattaataaattaattacctataatgatgataatgtagtaatgaatcctacattataagtgaaacttaacaaaaaaaaaaaaattaaattaaaactaactgcatgtgatactatgctttgagctataatttaaactataattttgctttgaaatcaactataagagacacctcagaattgatctgcctctaagaatggtttacaagaatggtggcttgacctttgcattgtctcaatcattacacattaattgattgttgtcaattgtcatttgattcttctgaaattcaggccacacattaattgattgttgatcattcttgatggtgcaatgtgttatagtttggtggaataattacatcatgaaatatcttccattttttttattcactcagtttttttttcatataggatgatgatgatgaaagcaataatgatggctgggagactgttggcaaaaaaccccaaagactacagcacaaggtatgctttctttcacttcttctcgcattccatagtactatagtcatccttcttcctttattgttagagtaaattaacagaaagagactaagaaagaagaagaaagagaaagtgaaagagcagagaaataattcagaacagaagataattctcattgatgagctcagatgagctgaagtgaatatatgcagaattaaagagagaaaagcctaaccgaagttgctaacaagaattaacaactcagctaacaaactaaaaacacaaaagtaattctgaaaagaattaacagttgtattaacatttatgaaattaactgtcttcgtaccaaagattttctagagtagatattagcctttttcgaggcattggcagtgggctcctcaggatgcttgaattataaatatcattggcattggcagtgttctgttataaatctgctaagactgttttgtagtttgtaatccactttctgtaatcattttcacatatgtattgttttcttagagctttttgtgctttagagattttgttactgttactgtattgaaacactgaaatcgatacttgaacagattcagaaggacaattggcaaggatacaaaaggcctgcaagtgagcaagaatacactgatgaagttgaaatcggttctaacattgaaccaacagaagaagagctggccgatctatctcaagcgtgcaacaaactgtgggaacttgacttaaaccgtttggtaccttgcaaggattacgaaattgattgtggtgagggaaagaaagttcaccaaagggaagatatggctggaggaagcttattcaactggctgagtgaagatgtattcaggaagcctacattttctcgattttgttctcttctagataactacaatcctaatgcaggaatcaaagaagttgtcacttcagaagagagacaagagcaagctgctttcatagaagaaatcagcagaactgcgccaattagatatctacacaagtacctttcatccaaaggaattgtgtctcgaaaccttcaagagttcaaacaattaatgacaagtctttggttcgatctctatggccgatgtggtacatctggctcctcttctgctttcgaacatgtttttgttggagaagttaagcaacgtggtgaacacgagatttctggctttcataattggcttcaggtatgcatatttcaacttgtattaatttaaggggcatgaactcctcattgcaaattactcaaaaacagaatgcttctaggctgagtctatagcaattcattaacttgttggcatagtgttgtgagaaatttgccaaactaaaacaacataaaagtgtaaaatttggcataataatcacattcaatttacaatgtcagactataatgatcgctcagtgtaactttagtgtcattctactcttaaagattttttctaaaaaattatcctcatacagtacatacatttttcttccattaaatttatatttcgttttgttttaagctttggaatttttatttggtgaatatgaaaggaaaaatatcatcatcaaaatgtattatacatacatctaagtgaataagtcttaagagcttgtgatttatgttacttttcttgccagttttaccttgaagaagctaagggaagggttgactatcaaggctatatcttccctcgacgacgtggtgaaactgtaagttgtttttttcccttttatcattttaagaaaagaaagaagaatgattattgatgattgtattgtttaatgtttttgcagccagacagtgaaacccaattactgacaatccagttcgagtggaatggtatcctgaaagctgtgtcaagcactttggttggagtaagcccagaatttgaaattgcattgtatagcttatgtttctttgttggtggagaggacaaccacgtacagttgggtccatactcagttaatatcaaatgctatcgccttggcaacaatattggatctgcttttcctgtctctctctcatgaaactcatttcaggtaatgtgtgaaaactgtttattgctcaatcacagtatgttctattcaaacactaatgaactttttcactttggtggtataaactacaaactacaaagactaattttaatttatgtaactttggaaaattaacaattttctttttatgaagacaattgtttatattttatctatgttctctcttattacataaaaaatttgtatatggaataactttgtacagtaaaaaaaattaatagttaagaacataattaactaataatggggttattgtcaaaactttttatttttattagtggaagaaacattatgttatgtttagcagatcgagcataaattttaataattgtagagtaatgccttatgttatttgttacttctcattttctaaaagatcaattgaggccccgcatcttttgttgcggattattggactgctctcttgacggattggattaaaatcaactgtgatgttatggtttgggaaagagctatcttcaagggaattatgttttgtgttaatctgatgatctaacacttttatttattgatgaacacttaagcctctctccctttttgttattgaactgaagtttaattatgacactatttattttgtaataacatatataaaatcttaattaaattatccttggtagcctagcttattttcttacagtattaagtgtaatgccatgatcaaattattatttttttttcaagaaataaatttttattaatcaaactgagtcaattacaaataaaggggtaaagcgtgaattctgccaatacactacaactcttttacttttttaagtatagttctatcaagattagacaactttttctcttttacaagttttagtctaacttttaggctttctttaatgctactacctaaacaattcgatgtcaaatattttttcttaaaatacataaattttggttcagctaaatatcataaacgacacctgcttgtgctataagacttcttggtttgtttaaaccaagccaaattcaaagatcctcaaaggatgctaggccaaatttgactagcaagacaactctttatacttacaatttataggtatcaaactataaatttgatataaaaattattataagtacaccatatattatcattatcaatgtatagtttgtatttgctaaaaaagtatagcatgtgttactaaacattataaatacgtacacttagatattggacaaaaaacataaagtatgtgtccttttcaaagagatcttcattatttatattgttgcagttttaagaaagaaaattggctaagaagacaataatactataatagtaaagagttcattggtgtgtgtgtgtgcaaagttggtggttcttggcaatttcagtaccacaaatacaaaaacacctaagctaagctcatgtattgtatcatcacacattgtttcagtttccaaatcaaccgatcaaacagaatataccaatttagtcaaaatatctgctcaatatatatatatatatatatttatatatatgtgaaaaaatatcatacaaatatctgaagatatttttcaatattaatgcaacctaatatctccttaaaactttaactattgaaatatctcatatgtttatgttctgtccaaaactattgatgtgtcaaagaagaaataccaagcaaaaaatattaattgaaaaacaaaactctcttctctttttttccctcaaaatttgactaattagactcaaattgactcaaataactaaatataatcaaataacattttggggctctgtataaatatgattttggtcactcaatgttaaatgtggtgacttggtgtttttttttaaacaaagaatgcttttaaagaaagagaagagcagcaagaatacaagggtcatctacgatttaaattgaaacttcatctaacctcaaagccaatcttgcaggcttgtgagcaaaaatgttaacagagcacttaacatgagagattggaacattgataaaatgagataagaccaacttaatttgcttgatgagatctccaaatagagagagtaataagtggtcaaaaattcaaaactcatggttttaaactaaatttaaaattatgacattatttgtaatgggaaaagacaagttatttctataacaagagatatttataattatatattttgttatgttaaagactataatattcatcataattttagaaacttacgaaaaaatagagaattaatttgccttaatttatagtaagtaggagtagacctatatagaggcgaggagagacagtcgctttttctaaaaaaaaaaaatcaaaaagaatatatacatacattttaactagttataacatatatttttaaataaaaataatatttatgaacataatacaagttttggtataatagtaaactatttcatgatgggagaggtcatgagtttgaattctaataaatgcttgtttactctatatttaaattttagtttttaaacctctatgaataacacttctattaataacacttgtatttagtgtttcaattatttgaatacaatttttttattgttacttttttttactttatactaaaatacaaatttaaaatcttaaaacccaccttattaattaaggtaccgagtattacagttattaattttccaaataaaatatgtagcagtgaatgaagaaactatccacaccacaaacaaaaatctttcatgctattgctatatcaacaaaatatattttatattcagagccaaaatatatgtcagcaatagcaacagatgttatagttatatttttggtattttgagaaaaaggcataaccacataaaattaaagaaagaaaataaataaataaacaatgtgtagatatgtagttgtgtgtggggttagatatgaacaagtctcagtaatggagaacactattaacaaaaaataggaagaaagttttttaggtgtattattattattattattattattattattattattattattattattattattattattattattattattttgttattgtttttctacatagtgtgaaatgcattgctgctttggatgctttttgtggggaagcggcagcgtgctgtttggttatttctgctgctttggattttgatgccaagtttgtcatcgtggaaagcaactcgagggtagtcatcaatgctctcaatgggaaggagtctcattgggttattggaaactatgtctctttttgtaatagtcactcttctttattttcgagttgtattttctctcatattagcaggacttgtaattttgttgcccgtaatgtagctaagtgggcgtttacccacaaattatttggtgatatcccgctatctaccattccgttaaacttattatgtaatgaccgtgaggtctaacttattctattaatgaaatatgtttttcttcaaaaaaaaaaatgcattgcatatagaaatggggccttggctctttgtttgcatttgtcttaaacctacttcttacaatacccaaaccttaatttcaatattattgctatataatttataggcaatggattttgtaatagttgtagaggtaaacagaatagatatttgttaagaatgatcgattcctatgcaatcaataacattgatccaagaacactacaaactatgcttgaattgagattgaaatgaaaacttgagcaatacagctcgtttattgaacataacagtaatgtatttaaaattttggtgtctaaactgaattctaattacaatgaatgacctaaagctatttatagctttgtcctaggtgtctatactagtcactaaccgaccataactaacaatctctaccttggttgaaattctgttaaagctattatagattacaaacaatagacacaaaagaaaacattaaactagattacagacactgtcaaggattactgtgattcatttgtaatcctgagaagatttagacaacgtttgaactttgcagttggaagggccttagtcaggatgaatagaacaatccttgatagggttaggtgcatgttgatttatgctggtttgcctaaaaacttttggataaaagttatattatctacttgctacttaattaaccactacccttcctcagtaataacctttaaaactccaattgagatgtggttaggaaagcgagcaaggtatgatcacctaaggacttttggatgcattgcatatgctcacctaagacaaaagaagttaacccaggactagagagtgtgttcattgggtatccaccatgtgttaagggatacaaactttttggagcattgaaccaggaaatcatcaaaaattaatacttatcagtagagatgtgatttttgaggaagataaagtatacaaagacacactcaagaattgatccacaacagaatgaaggtagtggtaaaatacagtttgaggtagggaattaatggggtattagtgtagaccaggtagtggaagaacatgctagctattgaggcacaggaagaggactcaagtgatgagatgcaagaaatgcatgggtactgaagccattttggattaccagcttgttagagacagagaaaagagaagcgcaaaggcaccagaaaggtttggttacgcataatttattatgccttgaatgtatcaaatctcaactatgatgaaccaaagacttatgcaaaatctatgagaagtgaaaacaagctggaatggaacaacgcaatggatggggaagtttattcattgaaaaagaatgatacctggatcatggtaagaaaactagctagtataaggctcattagatgtaagtgggtttataggcataaaaaagggatacctggggtacacgcagagatgttgaagacagttaagtctgt

SEQ ID NO: 185631 - DNA, 2833 bp, Cannabis indica
atgatatactaattccaagagtttttagtttatggcgatttttcctgataattctactcttttttcatattatgtagatttctcatatgaagaaagaaatagacgcaattcgtgctaaagacatatctcaaggtggattatcacaggggcagcaaactcagattgctcgaaatgaacaaagaatatctcaggtaaaaattgcacggtcctttgattttcattgttgatgtggttgtcaaacaatggaaatatgatttattggcttttgtttaaataactttttctgacatattattcttttcattagtagatcatggaagaacttgaaaatctggaagatacactgaatgagagtatccaagaaagtattggtgcacgcacagggaaactttctcatggaaagaaaggagtaacagaagaagaagaagaatttttgaggtacattgtcaatgacaatcacttgttactgcgatagaaggttgtaaattttaaacctaagatttgggatttgtggtctggattgcttgtttgactaatatcatcatggtttaaatttaaatgaaatatacaatggctgatatatttttcacttactgaaattgctaaatgactaattagttggtataactattcatttttgtttagtgacgaagatgaattttatgatcggacaaagaagaaatcttctggtaaaaaggatgccgaaaacccatcggttgaaactgcagatacccttctcgataagagagatgtgatcatgaaagaaattgaagacaagaaagagatgatcttggcagagaaaaacaaaatagcatctgaaaaaacagaagaaactgaaactggagatgcacttgatgcttttatgtcaggcatttcatctcagcttggtgaggattcttatttcaaaacctagtacctagataagcttaataatccttaatgagaaacagattacgagaagtatttctctttctcattcattaacgtattcacttaatagtaagaaaaaatgaaacacttttgtttacccctatagtttgtgaaactgggaaaaagaaatattcagtctttttcttatttgcccttattattttcaaaaagctttcaagcttagccttttataatgttttagattataaaagtgtgaatgattgatttttatagttcttttgtttttttaagaaaagatattgcagaagttaaaataaattttatgatatatacgcggtggggttaattcatatttgtattcaagctacgatgaaaatagatcaaatacatgtacacaattttttttggttgacactgacagataagaacgaaagagcagttttttatgtatttttttttgttctgtaaattccctttaacctgatagtcaactcacttttcttggtgatttccttgtcagtgattgatacaaccacgcaactccaggaggaattaacagctctccaagccgatctggataggatattgtaccttctgaagattgcagacccaaccggagaagctgctaagaaaagggttctgaaatcacaagaaccaaagcctgtaaaatctcaaactcctgctcttgctgtgaagaagcaacctcctgtaaaaccgaagaaaagcactgagcttgaaaaaccagcgaatgtcattgatcaaaaagtggaagctgcagatgaatcagggagatctggcaagaagcccgatgaaattgtacaggatgcaggagaggttgaaactgctgtttatgttgcccccaagccccaatggctcggagctgttaacaacaaagaagatgaggagaatcgacgattagcgcctctaaatttggaggactctgatgagtttgttgactataaagaccgaaacaaggtgttgatcaatgctgatgagtcccagatagaagtggaggaacccaagatcgaaaatgcagctcccggtctgatcatcaggaaaaggaagcaaattaaagaacttgagggtaacaatggtgcttgtcagcagactactacttccacatcctcaggtgaagttatggcactagatgctgtggcattactgctaaaacaccagaaggggcgttatgcatcagatgaagagaatactactgagagccaagaaacttcaaaggagcataaaaagcctaagcgagtacttggtcccgagaaaccttcattccttaactcaaattcagactgtgacacatgggttcctcctgaaggttagtgattttagaagcattggtatttgatcctcttaaaaaatatataaatctttgatttggttagtggagtcatttgcatttataatttatgcaggacaatctggtgatggacgaacttccttaaatgatagattgggctactaatccaagtgcgtgtgataagcaagaaatgacagttcattgttatgaagttactacaaaaagtgctgttcttcagtgaaataattgggaatatgactaattagagaagagctattcatctgacttgaagtcgacaaattttatggttattccaccaaaataatcttttctgggatggtgagttcagaggaagaacaaaagaaaatactaagatgttagatataaaatagtggaagtactatgtagacaagttcttttactgtgtaaaaaatatatttgattataacaaaacagcatctcattttactgacattttgtggtttgtctttcaagctttcacgatcgtttaatgtatattttaagcttacaatccaatttattgattgtttgattaagaatatttaaagacttaatatgcttgatgtagcagcttgacattgtttaagtcttggaaaatacaaaaaaaaagttggg

SEQ ID NO: 185632 - DNA, 1039 bp, Cannabis indica
aagtgtcttggttgtaatattttgactataaataaagactttgctgccctgtttagggtaatgcttttcagattcatttgatgcatttgttcttgcttttagcttctatgttttctctggttttaccttctacatggtatcatcgttcttgactagcgttaatggaatcttccacttccgatcctctggccacagtggcccctgctactcccgctgctcctcttcattctcaggttcaatggaacccatttgcttactctctttcgtattctcttacagtaaaacttgatcgactcaattacttgtcctagaaatcgcaagttgttcccactgtaattggccatgaccttgaccaactcttgttctccgatgttactccgcctacaaatctggttactggtgttctcaatcctgagtatctccaatggaaaaagaaagaccagcttctcctttcttggctccggtcatctatgttcgaaccgattcttgcttcagccgctacattcactacatcgttctccgtttggagagctcttgaacaaaggttctcgagccaaaccaaggctcgtttgctgcaacttaaaggttctttctctcggcttcagaaagggaaccaatccatcgctgaatatgtggaaaaggcccaatccacagctgatgctctagctatagcaggatccccagtcaccactcaagatttgatcttgcaactcttgaatggtctagggccagagtttgatttagttgtgtctggaatcacttcgcggagtgatattttgtcttatgaggaggttcaggccctgctgcttttccatgaaacccgattggaacatcacatctctatgacagatttgtctctaagaatgcaagccaatttgagtgttaatccatcaagaactggggcacatcaagggcctactggaggacaacacaatagttcaaatcgtggtcctggtagatcatttgggcgtggtgctggatcaagattattgtgccaagtttgtctttggtttggacacacagctgctgtgtgtcatta

SEQ ID NO: 185633 - DNA, 2803 bp, Cannabis indica
gtaattttcttttctaaaaaaaaaaaaaaaaaaaaaaaaaaggtataattttttacttttttttcaatagaaaacacaggtgtaattttttgttttttggataattttctatattattataaattaccagtcatttacaataatagagaaaataggataaggaatttctcctatccaagaaacatctttatccaactctaaagcatacttagctagaccatgggcaactttattagcttgcctacgagcatgagcaatagtaactccaaaaaacgaggataaaagacaacgtacatcatcaattaaatcattaaaacaagataactctctttgaaaagagttcaaagaagaggaaactcttaaggcgtctccacattagcaataggtaattggtaatgtactgcccagtttaaactgtgaaaaagcgcatttgctttcatttcatcacttctgaaacaaccttggactagctttgaaaaagcagcaattacttctcctttaaaattgcgaacaactgctccacttcctaaaatcttatccttgttattggcagcagcatccacattcattttgagcatatgtacatcaggaggtttccatgctatgtcttcaacaagtcctttaatgccggttgttgtagcaggtgtagaactggtctgctgatgcactaatttagtcgcaggtgactgctaatggattgattcctgccgagtacaacatggttgtgttccaccaactgttggtattggtggttgaccgtgtctcaagaccaggggttgagcaatttgattaagcccattaacagtttgattactacatattgacacaacaggccgtgatttatgctgctgctgtaattttttgcagcacagtcctttggcatttcggtagttctcaatataagttaaagcatatgttgcaagagaggagggatctctgtttgaaccaccatgtaagacgttatttcgatcattctaaatactccacaaaacaaaaattaatgattcaacattagctttgtccattgtagttgccaagtgaattagataatccccatttagcataccatgagcttggtgaaaattaattgtaaactttgtgcttttccaaactgccttggcattcttgcatgtgaacatggcatgaccaattgattcccaagcatttttacaccttgaacataaggttgaatctatgacttttcgtttatgtaatgcagaggcaaccggtaaggcatgttgaatgacttttcaggcaaaaattttgattttgggaggtaattgtaaggcccaaaaggacttccaccaacatttgtaattgatcgatgaggattcttgatctttctccaagatagaggatgcaaggtgaaagtctgtgtttaaccgtgtagacccttgatgtgttatgatgccatatgagtcgatccggtcattggtaaaagcttaaggggatggtgagaatttggtcaatgtcaatttgtgcaaagttttcctgaagagaagccctattccattccatagtatcaagtatgtaagcagagaccggagttgaaggatcaccagtatagcaaattaggcttaaatcttcatgtcctggaatccaaggatccaacccacttctaacttggaacccattaccaattttgtatctcagacctttaaggagtaggtcctttccccattggattccttgccaagttagagaaggtgagtgtccatggtgagcttccaaaaaagagtttcttggaaagtatctatgtttcaaaagtcttcctaacagtgagttcgggttctcaaacaacctccatgcttgttttgcaagcatagcttgattgaaatcaactaaagaacggaagcccattcctccttcaaactttgatttacaaagcaatttccatcttttccaatgaatttttgaactgtctttgtttttccccaccaaaaattggccatcataaattcaatttgattgcagaaacctattggcaaacgaaaacaactcatggcatatgtaggaatggattgaacaaccgccttcagaagcacttccttgcctccaacaaaaacaacttttcattccaagcatgtaggagtttccaaattttttccttcacattgctgaataactcatttttattatgacttgaataggcaggaagaccaagataagtttcatgacattcacatattagcatccccaaagtttggctgaagaaattcttcgcgtcattggttgtattcggagagaaagacatgattgatttttgagtattgaggtattgtcccgaagcttgatggtaaacatctaggattctcttgatggccaaagcaaagttattattcgcatgacaaaataagaggctatcatcagcgaataataaatgtgacacggatggagcatgcctaatgagttttagaccccgcaaattatccagttgttcttcgtgtttgagaagccttgatagtccttccgaacagattaagaagagatatggtgacaaagggtcgccttgccgaaggcctcttgttgcccaaacattaccaacaacttctccattcagttgaaatgagaaactattggaggagagaatggactagaaagcctttttaccctgaggaaattatactattaaaaattatttatttaactatgacacttttaagtttaatcaatttatataattattttttttttagaatttttatggtatttagggcatcttcaataataaatatcaaatttggtgttaaatcaacacaaaaataatagaattttcacactaattttttttattccaatcaca

SEQ ID NO: 185634 - DNA, 3603 bp, Cannabis indica
tattattattataattattaataattatttagatttggaagctttaaaaatgtccgactgcaaaaatcgtagaacaacagctcttctctctccttaggttttcttcttccattgagatcttgcgtataacattacacaaaatacatacatacatacatacaccaatatatatatatacatctgtttgtacaaattgtattgtttctttacatagattggtttccttttgtgtgtgtatgttgacaatattaaattttgctctgttgtatcgtatcaatctgaattttccttgaaagttgtgaactttcactagttgagagagggagatagagttttggataaggatgcatggaaatttgggagcatgaggttttgtcgagaaaataatgaggggagcttcgttgtgggccgacgatgctaatgctccatcgacctccacgccgccgattcttcaggcggttcagggcaggcacaggtgaattgattaaactctattgttttcgtgatttgttttaaaaaatttcgtgttaatttaggctgttgttatgtaaagatctgaattttgcttgaattctttgaatttcaatctggtttgaggagattttgataagtttttgatgaatttgttagcgaatagggaaattattattaaatggattttagaattattatttcttttctggggttggaattgctcaactattttcattgttatcttcattaaattaattagcactttgagaaaaaaaatcaggatcattgaggtattatgtgttactaattctgattaattggttagggaagcaacaatggtattgatttgctttctgttattaagagcatcagaattcgtgtactcaagagatttgggacacttgacaattgcaatgacttgagtttgttaatgtaattgattcaattggaatatctttatttgttgttgctttcagagttggcaatatatttgaactgttagctcgaagagagatttctcctcatacaaaacatttttcaaagaggttatggggagaggcttctaaatgccaacttggttctgctaagccaaggtgtgaagtggctaggatttctagacatagtcttgtatcatggtaagcctttgctccttttctgcttattttatcgaaggctttgatatctctagcagtcttgctgggtgttagggtgattgattccttgaactttggttgttttcagggtggaatcagagtcactaagacatttttctgccaaatattgtccacttttgcctcctccaagatcaaccatagctgcagccttcagccctgatgggaagacacttgcctctacccagtaagttatagaccttaaactgtgtgtattatgctgtggcaatgccacataggacttgaatagagctaatgtttactcctataaatgctctagttttgaagtatgcttttttcctatgttttcagtggggatcatacagtaaagataattgactgcgaaactggtagctgcttgaaggttctgagtggtcatcgcaggacaccttgggtggtaagacctagaacttcatttatgaattcataattttttgcattgtttaaaaaggatttttggggctgtcaaaactgaaggcaccttttgagtcatgcatctcattaataataggagacttaaaagactttcggtttttgatgctttggcttgttttcttaagttgatcaattgtaattatgattagcatgatgctaatcttaataatctcaaaaaaaattctgaactaagtgatttgagtaaagagtattacttgtccgattttaaaatggaatgcacttagttcttttttaccaaagcaaattattaattcagtccttgagctgataaatcctgctgggtactacttcttacaggttaggttccatccattgtatcctgacctacttgccagtggaagtttggatcatgaagttcgtttatgggatgcaaatactgcagagtgtataggatcccgcgatttctgtaattatctcactcttagacattaattatgttttgcacaaaggcaacataagaaaaaaaagaaaagaaaagaaaagaagaaaataaagctataaataacaataatgtttactaagttattaagttatatgattgattgtgtttttgtttttcctctcaagcagaccgtcctattgcttccatagctttccatgcaaaaggggagcttcttgctgtagcatctggtcacaaggtgaggaattatatagtttggaacttcatatgagaacttggcatttctgtttttatgatgatcctgacttttaaaatgttatattagctctacatatggcactataatagaagaggggagaattcttctccgtcaataattcttaggactcggcgttctcttcgggctgtgcatttccatccacatgctgctccttttcttttgacagccgaggtgatttgctttttcatttcatcaacttgtaactttggctttcttgttaaaaatattactactctcttactttttcttaccttcttgttttgtgttgtgtaggtcaatgaccttgatacaacagattcctcaatgacgcttgcaacttctgcaggctacttacgctatcctccacctactgtgtacttagcagatgctcaatctaccgagcattctagtttcacagatggaatgccccttacgtcattaccatttatgatatggccttcatttggcagggataatggtagaatttccatgcaacgaactgatactgatgattcaagcagcgtccagcagagagttgacccctctgcttcagtacgacttttaacatattcaactccatcaggacagtatgaacttctgctgtcccctgttgaaccaaatgacacctctcctgtcccagaagaaataggagctaatcctttatcaagtgaaatggaggctgaactttctcagtctgcaaatgatactttagagcctatggaagtgcaacctgaagcaagaacaaatcctattttcccttttggtgacccaacatattgggagctacctttcttgcaagggtggttaatgggtcagaaccaagctggtcaacgcaatgtgaggcctctcaatagtgctgctcctgataataattctacacccattgcgatgggaactccaatttttccctcagtaatcccgactagtgttggacaatctagacttataggacgatctgggtcaagaaatcgtgcttcgcgttctcgtgcaatgtcagtgactggtgctagtgaaggtgctagtttgaataataacatgcatgatgaaagtgatcctcaacctgttgttaatagaattcaaaccgaacttgccacctcacttgctgcagcggcagctgctgagttaccatgcacagtgaaacttagaatatggcctcatgatgttagacatccatgcgtgccacttgatgcagacagatgtcgtttgtccattccccatgctgtactttgtaggtatgttctctttaaatatatttttcaacatattcttactatgttaaccttaacatgtctattacagggttctatagctttgcagacatgtcatttttgatatatatatat

SEQ ID NO: 185635 - DNA, 5766 bp, Cannabis indica
aaattaagaaccaaacttcagtctgtgtagaattacacaaaccagtaatagaaatagagagcgcgaccatttaagaccattccaatctttaactatcacaccgaagctaagcttccccaatccttgtctattgttgcatctaaattatgtttaaaaaatcaaggaggaggtggtttccataaatccttgaggatgtgctctcttttcttttggttgttatgatgatgttttcaataaaattgaataacaaattgtgtaattgtttatgtttatctttgagaaaaagcagatatatatttccgtgtcaaaaggttcttacaccttctaaaaacaattcattaaaatgtttatatatctatgcagtatgtttatttgcatgtactcgaaattattaaagaaataaataaatgtaatattattatttatgtgaatataatataagcaatgtttctgtacatactagctaacaatgtctggataattgttttttttcttttaataactgtgagattgtatacaaactgtcatcagattccacggaacagcattaaacaataattactgtcactatattaagaaatttaaaattattcattcagactaaatataattagcaattagcaacatcaatgaatacatgaaaataatttgttatattaacaacatgtattaatagagacaaataaaaagcttggacacatctgaccaccacaataagtaataattaatgccaaactacagtcttcctgagatttaattttattaatttgaaattaattaaataaaagtgtcagtgaataaatataaaagtgttggagacaagataataaaagtaaacagctggtggaatatagaaattaattaatacaaaaatgcaaatgctatattcattttcactaaaacgttatctagttggttgtcattaaccactacctgaatctttgtctcctcaatatataaaaatatgttaaacttattaatttggctattgaggttgaggattgaaaactagtctatttttaatgaatgaccccatcatggtcttgatatatttatagggggacaacttctccattattattttttgatgaaaggatgagatgatttttccaaatgagtgatctatatggttcaagctcttaatattatatcatatgtatctgctatatataattgtgtacaaaatgcggatgttatgtttatttatttttttttatgtatttttacagactaatttaatttaaagtgtgatttaatatgtttactattttattgtatagatttatgtttggttttaattttatttgattttaagaaaaatatttggagattctcaattttagtaatttttgtgttcttcaagtcttattgagcaaaaataagaaattataaggtaaaaaagaaactacaatatacttagttggattttttgttacctaaaattggtcacaattttttcagaaattcgtgatctagagtcaagagtaatcactttcaaaaaataaattaaaaattttaagttttgaatgttcaacatgctccgtttgtaattgacaataaagtctgaaacttcaagctaattttttactatattttttcacttttaggaaaaactttatgaatggatgttctaaatctctcttttatatttccaagacatttcgaatcgtccaatttcgagttatatcgagagaggtatagccaaaatattatcagtcatcgtagtagaaaattaaaaatgggaaagtacaaaaaccagtgaagaaaagaggaaatcgcttgtaaggttgcaacctcttgatgatttttttcaggaaacttggatttttgaattataaaaggagggcttatggcaaagctttgccaccattcgaaaagagagaggaattctaagtgtagaacgaaagcaaggagtagaaagcaccattggaggagtccaacagtgatctatctcttcaattctattttttgtctttagcaattttttttttattttacaatgtattttagtaactaatttcttttaagaattattatgtaaattactgaagtatattttatggcttaatgtgattattcaatttctttttttttctttattgaattattgactgatcaactttaaatgttatctattaatttgaatcaaattttaaaaggtgagatttggatatgctctgattgttatgaatgaaaattgatttaggaggaaattaaagtacctaggttgtttgtataattttattagttattatgcttaatgctatctttgtgattaaacttaccattaaaatataagatgtcttcatatagattgagttaatatgtcttaaccacattataaacttcttaactcaacttactaaattggataattacattatgaagtaaaataaaagatagttggggatcataataattcttgtttttatcattgttatttttttttatcaaatattaattaatatttgttttattttctttttttttccaacaattattattcaccaaatagaactaaaaaattaattaattggtaatttataatcaattcttgtagaaacgatactctatttatcattatattttattatatcgattgtgtatacttacgtatcaattttaccgataagtttttacaccattgttggggattgaaatcattaatatcagtttaattatttattattgtaatttgatttttgttttttcgttgtttctatcctatttggttgagatttttgtctatgtcaggggaatctattatatgtgcagtaaaaaatgtacagagagccttgttcctttgaatcctgagattgataaatctttcgagcaaaatagaaagaacaagagagaaacaaagaaattacaagatggcgcatcataaagggaatgatctaattcttggagttaatcaaggaggtcaggctcaccctaacgttgaaaagatcctacaagactatgtactccctactctgatagatgtacagaacagtataaccccactagaagtggaggccaataactttgagatcaagccatctatcttgcaaatggtaaaatccattctcgaatttagtggattgccttctaaagatccttgcgcacactcacttggctaattttctagagccttgtggcactttgaaatacaatggagcgagtgatgatgctataaaattgaggctttttccattcttcctaaaggaaacagtgaaaagctggcttaattttctacaactaaattcaattatcaattggaaagatctggctcaaatttttttatctaatttcttctctctttctaaattcgttaaactgaggggagaaataaataagttttgtctgaatgatggtgagtctttgtatggagcttggaaaaagtttaaagatctattgagaaaatgttcccacaatagtatggagcagtggatgttggttcaaaacttttatatttgtttatgttctactgctagaaccattattgatgttgcatctagaggtacattcatgagaaaaagtgcaactgaagcttatgaattacttgaagacatcgctatgaacaatcatcaatggcctgatgaaagagcttttgggaagaatagtaggtactcataaattggatgttattactatattgacagctcaggtagctatactcactaaacagctacaaaagacaacaaaagcagccaaacttgttcacgccttagctgggtgtgagatttgtggaggaccacaaacttttgataagggtgactcaactaaagatattgtgatgagtctagctcaagtgcaagcaattacaaaattctagaggaaattcaatagattgtacttcatttcatttaataatggatcggcaaataatcgacgatggcaacaacaatttcagaggaaaaattctcaagctccagctgctccaacaactaatctacaagttgctctacttactctcacaaatatataaactcagttcatgactgagacaagagagtccataagatatcttgaaacataagtgggacaagtggctaatattctacataacatacctcaaggaagttctcatagtaatacagaggtaaatcctaaagaaaattgtattacaatcactctcatgagtggtaaagagttagcagagccggccaagaggcctaatcttgcaccatagttcaagatcaagaatgatggtttagaggaaaataagtttattgagaaccttgggaaagagcagccactgattaattattaccaccacataaagattccatatcctcaacaacttcaaaagaagaaacttgacaagcattttcgaagtttcttgacattttttggaagcttcacattaacataccttttgcggaggcacttgaacaaatgccaagttatgtgaagtttatgaagcaaatcttatcaaagaaaaagagattggagggttaagagcctgcagaacttaccgaggagtgtagtgctatcttcccgaagaaattacccccaatgcttaaagatcctagtagtattaatattctatgctctgtaggaggctcggttgtaaaaaaggccatgtgttatttaggcactattgtgaattcagtgcctcactcaatctgacaaaagctaagattgggagaatctcgacctacaactgtctccttacaactgacaaatcactatgttacatatccttagggaatgattggggatgtcttggtcaaggtgggtaaattcatctttccagcttatttcattattctggacatggaggaagataaaaatatcccaattatactagggtggacattcttagccacagggagagcattgatcgatgtattaaagggagaattgaagttgcgagtgcaaaaccaagaggtaacatttaatgtttttgcagcaacaaatatcttatttcaattttttcccacatgacatggcatgcccacatgtgcaagatcaatgctacgtggagtacatcttgtcaaaaagagggccaagtcatctactcaacacttcaactgacgggaggtaagtatacttaggagggacataaaaatgacaagccagccaccctaagtggtcggctctacgaccagcataggccgcccaacctctagacattgtaaggccagccagcctacacctggcaggcatatggtgtgcaaccttcatcttgggacgacaagctaaattgtgatttgggcttcaacaacccggaaaaataggggagaaatatcagctacttccctattcttaagaaataattaacaaatttaatacttattatttaattatgtaaataactcatcatttacctatttttaagggatattagttgttaatcttcatgtaagatctactatataaagagcactagcctaaccctaattccctatggtctaagtctctaagttggcaagctctaagtcagaaactcaaactttctcttctcttctctctcacattccctaggcactctctctcacttgagatttgccaacttggttctcacattgtaatcttacgagagtcgtttcgagtgccatagcccttgtgatcatagcggtattctctttggtattaatacaacaaaaagggggttaggtcattacctgctaactaaaggagttgaacctctataaaatcttgtgtctcttttactttttcgttcttattgtgtaacacatggcaaacattagtaagaaatacgactctattctcgattggtcgaattcgagttcattagtttggtgctttcattgagag

SEQ ID NO: 185636 - DNA, 2241 bp, Cannabis indica
acaaaatatctgttctaattctttcttcatactccttttctggattctttgttagttggggtaagttctcttattttgactcttacttttattctttagaaacattatatttcgtacgggacttttgtatattgttgcctgacaaaacattaagatacataaagcccatagtcccattaccatttaactttggttggtccagtttgaacaattttgtatttgaataatgtttttttgattaaagaaacagaaaaaatccaactttaacgattggcttgcggtttcaggtaccattgttgatttggtctttcccattgataatcaaagcaattctggtgaaaatgtttgggtttatgaaactaccggctaataagatttctaagcagaaatcagtagatcctggattttcagcttcaactgcaaacccatatgattcagacaccgagaatgccaaacagaacatagtaaaacctgcgagaagaacttcctctgaaccaatgctatttgtgccagattatggagatggcgataggtacaggaacgattttcgggattcgggtggaatagagaaccaaagtgttcaagaactagagaaatatgctgtgtataaagctgaggagacgacaaagagtgttaacaattgtttaaagatagcagaagatattagggaggatgctactaggacacttgatatgttgaaccagcagggtgagcaaatcaaccggactcatatgatggctgttgatattgacagagatttgagtcgggtgagtccattttgtgattatggcaagtgtttgatgtggaatttattattcctatcaagattctgcatgaggtcaatggtcaactttacaatgcagtgagattatcagaaagtgaccttaagctttttgttattcattgtttgtgatgcaaaagctaccattcactaatattttctgatcatttgtagtttcgtactttttattcgtactttgtgattttcccattgttggttttgaccatatgtgactggaacaaaaaaaaaaaacagggtgaaaagcttttaaacaatcttgggggcatgttttctaagccatggaaaccaaagaagactcgagacattaccgggcctcttacaacagccggtgactatctttccatagtataactttgagatcatatattttccataaaattttcagtattgggtcagctttgtatttttaatttacaatactggctcaacagacaaggcttccaaaaggagtgaaaacaacttggagcaaaggcaaaacttaggtttagcgcctgtaccaacaggaaataagtcaacaacaaagacaccacaatctgaaacaacaggtgccctgcagaaagttgaggttggtcttcatggattatattttgtgtatgttagattcagaaataaaaaagaatatggggttgtgtttttggtgagtgagtttacatagtaatgggttagaattatcaggttgagaagacaaagcaagatgatgctctgtcggatttaagcaacattttgggtgacttgaagaacatggctgtagatatgggaagtgaacttaacaggtccgtatcatctcaccatatcatattctttatagttactactagtctctcttggatacagggccaactaatgatgggaaattgcaggcaaaacaaagctcttgaccatgtctccgatgatgtagatgaactcaactctcgagtaaaaggtgccaatcaacgtgcacgccgtttgattggaaagtaaggtgccaatcaaccaggccgtttcaaggtgttggttgaaatgagatttttttcttttataaaaaatttaaaataaatattatttaaatttggacacattttaactattttatcttcatataatatttaattattaataatatctctagagtgctatatatttaagcacttttataaaaataataattaaaaaaaataatagtatatcaaaaattatgacaattttttgttagattatatattagagtaatttcattaaaaaaaaatatatatatatatgttaaatataatattttctcgattttttgtacagtaatacatcaacagtttatgcttccttacttactatttgttgcttactaactttttttttttttttacttattttgttgtaactaaaaattatatgttatatatatatattaatttaaatttttcggggtaccgtctaaaaactaagtggggtccgtggggccgtac

SEQ ID NO: 185637 - DNA, 784 bp, Cannabis indica
tcgcacaccgaaggccagacaaaccagcattttgtagtgaatttaaattctacgagctgaatggagaaaaaataggagagaagtgatcagttatgtacggacataacagtgaaactttcagccaacagctcgtgaaggacacatttgaaaaaaagttgcatggcctttcaagaaaatgagagcagaaagagaatactcttctcttattgtgtggttaaaagtctttcccttgttttgtgaagggaaaagtggatggaaatgaagatttttagtcgttgactgatactctacaacatgagtgaataattcacctctaaaatttctataatacctgggaacagaaattaccttaaacaatgcaaccagatgacagacggggaacatctgcatatacttttacttgcagtatgatgatggaaattaacagacgatgatacataatagctataggttaacaaaagtaattatacgtactcctaaagccttctctgcttccctttctatccaaataagtccgtgatcggatgtggcattacatgataatacaatatgctcgaatctcccatcaacaggaatggcagtcctgacttctgggggaaatctcccacatctgtgaaaaaacaaagtaaggagaaaactaacttcaattgtttcagaaattaaagcataagctttaacttgacataatacgatatttttttccggatccttctacatgaaataaagcagtaagtggatggaaggacatctttatgttgattaattgttcaatcaaaatatttgg

SEQ ID NO: 185638 - DNA, 3882 bp, Cannabis indica
atcaaactttaaattagaaaatgaatacgatggatgcaaagtagtaattatagtttatattgggattagctaagatagaaaaaaattctattgttttaatggaattattttattccaaattaggacacttttttaggttgtgactttacttcttagattaattttttaacatcatctataatttaataacaaaatttcatctataatttttatacattaattaatgcatgaaagcaattattatttgatcattatatatattaaaattatttttaaaatttgtttatattaataattttctttttctttgtattatattaaaatattatattttgaaatcaacaattgaaaatctaacgactactaacaacaaaacacttgtattgtattaagaccaaatttttaatacaatggaagctgtattatttaatacataacaaattattaatattaacttgtaatataatatttatgtgaagaaatgtaaggttccatctcaaaactaattagttatgattggagtaacttatctttgtatatataactctatatttttatatataatctatgtgggacaatgttctctaatgtaccacctacctacctgcaaagtaacataccctcccagccagagccccaccaacactcaaacgtgtagcgtgttgcctcgtggcacacttacgttatggctattctgtaatatgcatgctttgtttggtgttcgatcattaagtcttgcactaaatatctcattaacattaagtaagggttgtgcgagcaagtgtatatctacttggagtatccaaatagctggcctttgacaagacacaaggtgatcatgtaatagcctctggccaagaggagcaaaggagcgagaatcatatatattgatagctgggaagagggcgacaactccctttgacagaaaactttagtgaaagaaaatttagaataaatataattttagttacaattaaaaatttataggaacaaaatattaatatatatttaatcataggtcattaattattgtacttttagttataatattataaaatttcttgtgactactaaaaataaatatttactcaaagtcactacatttttaagagtaagattttaatttttaataataaaattagaaaattagaaatctatatacaagtccaaattaaatttagtcatatagtatgaaattaatgattttggttgattcctatatttgaaagtattttcatagatcctaggccatgctatagatatatatgcagacatatttgaccatctgtggccctcttaataattctcaattgtcaacaacaacaagtgctgtgttttcatactctaagaaaagagagtgtaggatgggaacctctagttaacttatccaaacgactagagagtaaagacatacacaaccttttacatccataccatattaaattcttaataatgcagttgtgatcactggttatctgcccttgtaatttgcctacttgacttcaatttcgtaaaaacaaaataacattttaaattaaataattatttatataaaaaattcactatattccatctctaccgtcacgtggttgacaaactagcacaggttcggtgtcccaaagctataaatatatccaacaatttcattggatacagatacagttgtattattatatacacataaccatgaaaacaataacatcatttcaacgatcgcaagaatatatatatgtaatctaatcactttgaaaatttcagaacaagtacatatttgtcgtctaatgatttccaaatctcgtcacacatcattaatttacccttttgggttatccaaacgttgaactaactagaaccaaaatcatgatactatatttcactatttctcttctcttgcttatttttactattgatttcaccaattgcaataccattttcggccaaagccatttcggcttcgttggccttggcaacctctctgaacttcttgtaaatatcacttttgtaaaacttatacgtcctaatcaccaaaatcatcgagacaaaagtcccaaagagtgtggcagccgcaattatgataaacgacaactgaaaacacttcattccattgcaaaccaactgttgatgctcttgccgttcaactcccttggctgctaattgcctcagcgcttccttatcgtacaaatgaccagttactctgacatttaagatatacaacccaatggggctagccacagccccaaaattatgcaacgtggcatagtatttgagcccaaaaagctccgatattatggcatagagtaacggccatttggctccgaaacagaacccgattataacggtagccaagtaaagaccgttcttgacattgaaagctatcaaaagatgaccaacgcaagagagcaagaggatggaagttaacatgataggacgagggactttgtaacgagtcaacacgtattctgagaagaaacccgcgaagactctgcctagataattccatatgcttacgagtgagatgaatgtgcttatgctctgttttgggtacccgagcgaagtcccgatctgaccgagattgtctatagccgtcaatgtcccacccactccgcagatgtaagagatgaacagaatcagcatgtcgatgctgaaaaccgcttgtaagattgtgaagtcgtctcctctctctggcttcttgaatgcggttctccagcacgatggttggctttcgaatggtttagcaggctctgaaacagagtcgttctttgttgggttgttaagcttgttttcgatcttagcagcctcgatattattcacgtcgattacattcttggatttccagagcttaaattcttcttgaataacaagagccagtgggagaaagagtaggaaaatgaccattcccgcactagctccaaactctggtctagtaaacacaagtttcttctgtaaaataatcatgaccatgagaaacccagctaggccaagagaaatatagagaagattatagaacactctgagctggtttggttgaggtatgattttcatgtaccgaattgttggaagaaaaatcaaagaaatagctgtgggaagccagccaatgaggagaatcaaagcttttgtatcatcgaaataaaaagcgtggaagagctgagttatgatagctccactaagacccacgtagcccttgaggagacccaaaacggcgccgcgtgactcggggaagtttttgacgaccgtgactagtgagccggtgttggcgaaggactgtgagttggctcctatgcatatgtagagacacatctgccagacttttggggtaggaattttcttggccactgagagccatatcatgacgtagccaaacaagtttaggatggcacccactaagaggacaacccacggaggcgttacttcgttgagtagacctgagaggacaccaaagttgccaccgaggtctttgaaaaacgacaacaaagtaattgtcgtttggtcgtatcccagaaccttttttatttcacttgagtataggccgaacatgtaggttgctccggctgccgacattattagaagagaagcgaataccatgaaccaccgccctgttatgatttggagggctaggctcttggccccaccattgccacctggcaccattaccaccattttttttttttatttctctcttaaatgaaagagtgaattattattaagatgttagtgaagagtttgaagcatgagagggagagttagagcctatttatagagatgaatatttaaaaatatatatatgatttaataataatgtgtacataataataatccagaaagactttggagtagttgacttgagtgttttggggaaggaatatgggagagaaaaaaacatat

SEQ ID NO: 185639 - DNA, 1996 bp, Cannabis indica
taattatcaaaactaatttttttagtaaagtttaattttctcgtgaatattgaaaattattcttaattcaaaagatcacctttagttacaaattataactatcaaaatatttatttggactaaaaatactcaatcattataacttatgtatttttaagtgactcatagtcttttgatcgatcgatataacacttaacgaataacgatgagtacctacaaattaatgtaagaaaatgtaatggttaacagtttaagtatcatttaccacgaaaaaatcaattcaagtagttaggtgtattgaaggtttggatattttttaatttgattggtgggtaaatactattttggattttgtgttttgcaaaaattactaatttagattatctgttttgttaaataacaaaatttatcatgtattttctaaaataatataaataaaacactgaattgatttttatcaaaataaaattttataataatctgatctaatagtgttatgacaaaattatttacattttctgtatttgatcgtattaagaatagtcttatactaaaaaaaatattaaaaattaagcttagagatttatttttaccattttaaattgaaaaatacaaaatttaattaataacttttgcaaaacacaaaatgtaaaatggtatttactcttactcagtttataataaaaatagagaatttctgtgagcgagtcaaaaaaagagccgaggcatcgtctgcaccctgtagaaattaggagatcatcgaaggactccttcggcagccagacgtcatttttgaaactgcattttaaagccacgtgtcattcacttattattattattattattattattatttttgcaaaaaggaactgaaacagaaagtcgttctatgccaaatgaattttctagtttaaagccacaaatatggcatttttagtaaatgtgttgaattcaacttacaatgatatatatatatatataaattgccaaccatcattatccattgcgacaatgtcagaattaaatcaatgtggaacaattccgcgttttagctgttcatatttgaccaaatgcatgtgaaattgagtagctccattctattaattaatttctgtgctttagaaggatttatgttcttttataggtgtttttttttgggagattaattagatttctttaattcaaagtctcgagtacatgttaaaaactggtaaactagtacctagtttcttaagtagctagggtgtaattataattatcatcaattaatttttccaaaatgcaattaaccatcgaattagaatgaaattcatagtgttactaattagtagataggtaaatctaaattcattgagttaggtggcatcccattcacattagttacttttttggtgttttttttataatctatatgatgtgaatacttttgtttaatttgtgtggaaaattatggggttttatggtaaaattaattgatgataaatagagtattctatatttttatataggatttactactttattatttattttatgtagaataatgttcacaatgatatatgtatatataaaatttagggatacgagatacggacatttattatgttagtaaaattaaattaaataaaaattttgaaatttaataattttaataattcataaataaattttactgacttaaaaaattaaaaaaagcataatttaaaaaatttaaatagcaaaattcctaattatagtataagtgtatacatacagacacaaaacaatatattagaataaatattgtacttcactgatcaacatgaattatataattaaataaaaaacattaattatatatatagctcgtaagtatatagtcaaaaaggattcatgcaacagatttttaaatacatatcttttgttctagtataagtccaaataactttttgtgtattgacccaaatcaacgtttcttattaatttgtataaagaatcaatttatatatatatatat

SEQ ID NO: 185640 - DNA, 1336 bp, Cannabis indica
atttcttaaaaaaaaaaccctctaatagtaatagtggacaagaccttgagaaaggttctgaaatataatttaactgatacataataaagaagaaaaaatatatcaagaaaatagcaagaagagatagagagttaaaagtacttgatcttcaccttcttgggttttttatctacttcctctcaccaacacttggtgaagatcaagatctagaactaaaataaagaccagtagagtaaagtaaaacttatctcaccaataacccttctcattttagattaggaaaaaaaggaaataacaacacaatgtccaattaccatgttattaagcttgattgatttaccacaaaagagggaaataaggtaagcccaagttattcaacttcatcatcataaagagaaaaggaaaaggtaaaagacaaagcttggtgcctcgagagacttgcgaaacacttgatcaatccagtgagagcacacacctgaggcatcctccttcatgcatcagatgaaacgcctcgttaatctccccgagtttcatgttgtgagtaatgtactcatcgaccttgatttcctgcaatggaaggatgataagtaacgttttaattgggaactgatgatgtagatgaaccggtggttttctatgttttgcgtaagtgtataacctttttcaagtacttttcgactagccaaggtacttgagttcggctcttgaaacccccaaaggctgttcctttccagacacggccagtcaccagctgaaatggtcgagttgatatttcctgccctgatgctgctacacccacaataactgatgttccccaaccctgaaagggttagttttgaaaaacgcatagaaggtgaggttagctccacttaagcataattcaatcgagccaccaagttcagctaacactcaccttgtggcagcattccaaagcagctcgcatcactgagacatttccaatgcactcaaagctgtaatcaacacctccatctgtgagatcaacaaggacctgttgaatcggtttatcatggtcctttggattcacaaattctgtaactccaaaatgcttcgctgcaaataagtcgaaacatcagtcaatcaacactacaactatcatcatccaaaattccaagtttttttccctatctacttttgttcactttctacatcaaactcatgagctatggaagacctcgagctatacctgtgtcatacttcttgctgtcgatatctatgccaattactcgggaagcaccagcagattttgcgcctctgcaacctgtcaagttatgatcaaattgagtgtaactgaaataataatgcattcatcagaaag

SEQ ID NO: 185641 - DNA, 1427 bp, Cannabis indica
caaagaataccaagaaaaaaaaaggacatgatgttttcaaattaagcaaacacatatatgatatttaactctaggattcaataccaaacagaacaaacaagtaagcatatttagctctagtaaacaataacacaaacctccaaggtacttgctcttctctatggaaaacttctgtgcctcagctggcctataaatatcgttaaaacagataaccaaccaaataatctgaataagcaagaaagcaaaataacaccctttttaaagttcatcatgaaaaatggcaacagtgaataaaatccaacccgagatcgacagttccaggtggagcaacggcatgaaatgagcccaattcagtaggttcataatcagggttttgatcctccctacgctctttagctcggtctctgtattttggaagttcaggctgttctgctgctttctcttctctgcccaatccaaatatacattaaactattaactgtaatgcatacaaaataacttcactttcatcctaaaactccacaaaaaacagcctcttcgtcaatcacatccagaaccagaaccaaacatatttggaacaataaaatttcttacaagaaaaaaaaagaaagaaaaatgttccgaaactcaatttagatagaagtgagcataattcgaaaagaaaaaattgcatagttataaatttaaggacgaaaattgattgattttggttaaatttcattgaaaagaatactcacttgcgacgaactttttctttgtaatttttcttcgcagaagtcattgtggagactaacaatgagaaattatctgaaactgttttgctttctttctttcaaattttgctttctatcatcagaacagaatgaattgagaaggactgtgttcttcccctgattagggctcaaccaaatacaggagaataggggatttgattatagtttgctccaaatattcaatatttatgtcgttttgtaacattgtcgtttcatgaggattttttttcgctaaacgtcgtttttccaaggataaacaaactatagttgtagtaaatacgggccgggtttccaaattctgcgtttccttgagtgctttgttcattggacaatgaacatggttttagttttagttgttggagaataactaggattaaaaagacaacatcattccttaaaaaaaagtttgtaagctataaaaaaggaaattaagtttgtaataaaattccctttcaaaaaaaaataaaagattataaaacatgtttttttaattagtttttataatttaatatatgttttttaacacaccattctaaaatataatttttttattttctctctcatccacataaaatttgacacattttccgatcaaaattacttggcaactttaaggctatgcagggccggtcctgagctaagatgaaggaggcg

SEQ ID NO: 185642 - DNA, 2912 bp, Cannabis indica
gatggagattggaagtgctgcttgctcaaattggattacccttcgaaattcacatcattcttttccattctgccctttttaccgacaccttaggatggacgacaattcttttcactttcaatatattttttttattttcttcgttgaagtaagatctattcaaaaatttctttgtcgatggcccattgggcccacgggatcacgtcactacatccagtaccatacattaattatcttttaataattttttaatagagtcacattccaagtctaaggtctaatgaagaatgataataataattaattaaaaccatgcagaggtcaatgatgatagtccagtagtgttttttagatgtgattccgtctcttatctttgtctcctaatcctcatatttggctggctggattgccttggggtgggctctacatttggattcttctttcttaagagttgagcttgagacctaggttatatctatatttatatgtgggggcctggttgtgcatcacttccccttgtagaattccatccgggctaatgatattcaagtgatcttatcactactcactactgtatggaccaacccactcgtcagaaacttcttgcccaaatttcttaattttgttgatgtcctctcaatttttatttttggcctcaacaaaatttcagtgcttatccttcttagtgtacaaaaataacatatattatagtaatggcagagacacataaattaattatattattgaaattaattttgaatgttttaagttttaacatatactaaataatttaaaatattttaaaaacttgcaaaacatcttaaataactacagtcatataaaaaatattgaggtgagaaaagaatgcatggattaatcctttttagtgttacatcacagaattttcatataagtattatatagaaaaaataattatgatacactctcaagtcttatcatatatatataattgaaaaaggctaaaatatcttattgtttggttgaaaataaataaataataataatgcaagtaactgttgataccacctgcttaaacagacaacaggaaaggcattcggaatagttgtgtttcttattcatggggtcgtgagatttgtgtcgtttagtcataatagacatgataaaatatgatgttttccttgcgtagtatctaatagaaaaacactatttgtaaaagcgttccattttgatgatatataatgcatatagggtcgtaaatgataaactctataaaagagatcaagagatacaaacattgtcagagtaagggtttgtaatgtttttctctcttgttttgccttaaatgggtcgacaccaaaatctcatcttgctggatatggagagcctccacttgaggtttaagacagaaataacaacattggtcacgtgttatatgccacactgtctgccattgctaatattgcttacgttcaaaagtttcaaaagatcgtatataggtccacattcctatcagtaaacaaaaaataaataaataaatgtatgcttgcgtggttaatcataaacatcaactaacactaaatcttgtaaaccactcttttatgattgttcagtcattcacttagattcgacactttgaaactaatggtaaccattttgctacgtgtgttcgatgttaccatgtcaacagaatgattttaattttttttccttttccttttacctctcacctttttttgattctgtcttgctggatttgactatcgttctaattggttggccgatgaagatttttgtgaatattatattatggtctggtactataacgctaattctagaaacttaataaccttttcataaccaaaatattttgactctgcttttttattatgaattatttggcatttggcttgaccccataaagaaaatgttattaaatattaatatttatcactaatcataaatttcaactgttctctccaggtgtatgaacgagtctgttggaatacgatggttcaattatttacttactggatcatcagcttttttgttctgtgtctattccctgtttttctatattatttttactttagtatttttgatgtatgatgctttataataacaaaaaaaaaaaaaaccatataaattcataatcataatctgtcttccctaacctttattcacaataatgtcatttactttggactaaattggaaaatgtacaaatggctttctttctttcttcttctcattataattgaaaagaatatgtggtgaatgaagggagactgtctcatcagtccacagtctcaaatattactttgccaatgtggaaattgatggtcttagaatcacagtaggcagcataataaaaagacttggccaccagtagaaatgtctgcttaatttttgtgttgatgtcatctgaagatttttgtagcaccaattgcacaacctcttgcatatctgactctatttctggtgttaagatgtttctgttaaattctccattttgatttgcctgtattgattattccaaagaaaaaaaaaagttcaaataataatggactgtatctacaaagatgatttactgggtccacacttttcactagtgtgactgtttaatgaaatgtctaagtcaaacaaaattaattaaaatataaatgtgttgtggatggttgtgaatcatatataccaaccttggccctatgcctttgtctttgaaagtgacgaattttgcagcaaactttgtttgtggtactgaagagtttttcatagtgaggatttgacagcaagagggccttcacaagtgtacggcctgagctaaggtttattgtttggatcaataattctgcttcttcttcgtaatgtccatcaccaccctcttgccacttcaccagccacttttcccactaatacaaaaaaaaaaaaaa

SEQ ID NO: 185643 - DNA, 998 bp, Cannabis indica
tttttttttttaagtatttcatatattttgaaaatgttcctgtaatgtttgattattttctgtttgcttgtgctctgcagtttcttgatggttgggtcatatttgcagagtatgcaagacctagacctccattcggccaacacgaaaacaacatggcttctccatatggtcgtcagtgactcctaaacttgaagagacgtggttctttatttattttgcatccatcaatatcattttttatcattatatagctgacaatcttaatttgaaggttgattactctccatcatggcagttttaagtttgggagagcatcatatataaaccaagattgaataggtaacatatggtcatcacattgtcattcataagaaattttgtatgcagagctgtttgtttcatgaacatttataaggatttgaactatgtgtaaaagtagagactcaaagcttagataatggatagatttgctcagatctgggcttgtctttgttttacatttattgtttgttgaatggtgatgtgtttaaaaagtttaggtccaattaagactgaacaactcaaaatagttatggtgcttgctaggaatttcaagtttacattgatgctttagcatttgcattttttgagttttttatatattgggatagtttcagtaggtacatatcttattcttacagaatattttaacaaatctgttaattaaaagctatttatttgttaaggtttgtgactcttcaaaaaattgcaaaaaaatacaactaatgaataggaattgattcataaacaatacgattcaaaacaatgaatagccatgaaaaatctacttctctcctggccacgccatcctgaggagaggagctatatttgagctatgccactttgagtgtgtcagtgctctcttttttagggagctctgtcatgcttggtgttgcagtgttttttttttatgatctgtaccgtgcttggtgtggcagtgctcttcttcatatgagtta

SEQ ID NO: 185644 - DNA, 5417 bp, Cannabis indica
actaattaaaaaatattactaaaaaccacttaaatttatttaaataaacaattttcccctgtactaaattttcaaaccgacggacgaaacattggacctagtacggccccaaaggcaaccccagaaaatcaaaagcttcaaaggttgaaactttacccgatcaaaactgaccaaaaaagggaaaggaaaatcttttaccctatcaattacttggatctacccataaactctttctttctcactctcctaggttagggtttctgcttatcttttaatagggctctcgatttttacacatatatatatttttgtatgatagtatacaaacttatctaacgaaattgttgaatatacgtagatatggctgggagagaagataatcgtgtatttgttggtggattggcctgggagaccactgagcgacagcttcaagacgctttcactcgatatggaaaaattcttgaatgtgtggtatgccaataatatattatgtatgaatttttttaatacgttttcaattttattctatttttcccttagtacttacttgataattctatttgaagttctttgactcataaaattaaggattgtacttgttcatggaaggaaaaagaaaggaatagccttttattatttttaattttaaaactccaaagggttttcttcttctttttgggaaaatttctaaactgatttgggactattattgtgaagattttattttttaaataaatttagtatttgatctcatgaatagattattgttttttaaccagttccaaaagtagaggctttcttaaattggtggtgctattattaagggggtagaagtagacctaattgaaaaggttctccttgtttaatgacttgacaatgaaacttacaagtgagcattggaagggttttcggtttcatctcatgttatgattaggctaaggctgtttttcatttaggttgtggctgacagagagactggtcgccctcgtgggtttggattcgtaacttttgctgatcatcgagctatgggtgatgcaatcagtgatatgaatggccgggagttagatggtcgggttatatcagtgaacaaggcgaagccaaagttgggtgatgttgatgctggtttggaatatgacagggactatgttcctggtgggagaagaccaggaggccgttctggctctggttctgattgcttcaagtgtggtcgtcctggacattttgctcgtgagtgccccttgggtggggatgttggggacgtttctcatcccagtttggttctggcagaggtagtggtggtggtggtggtcgtggagatcgtttcaggacagaccattttgataatcgattcagccgaggacgttatggagatagggatcgttttgatggtagagaaagcaggtatgaaagccaggatcgttatgtcagtgataggtacagtgaaaggtatgcacctgctcgtgacacctttgttgaccgagagctccaaaatgagtatggtagaggcagaggctacttcagagatggagatccaagaactggtggtgacaggaatggaagtggagggccagatcgtcatgtgccttatggtaggggaggctatagagaaaaggcaggtccttatgatcgtcctaggaggggagatcatctatcatcatatgatccatactgagacaattttgttagttttatttgtagaatgtgtttatgtttacaccagcgttcagtttctgatctgtgaccgtgtgatggaggcatttgtagctagttgctatgttaacttagtttttcttaaatatataagtatggaacttctaatggtgtggaacttgatgtctggaactcatttcggatatattatggctgattctttcttcagttaactcctatgctagtgggcatggaaccaaaaatggataatgtctgagatgctttctataagttttcacaaggcagatatgaaaagaagaaagtacataatgtctattgatggttatttatgttttgttatagaatctttgatcttttacagttgagccgtttgttaattggactgctgtttactccaagatgttaccaagttttggttgtgattattggtgcacaacagcacaagatatctctttcttttaactccctttagttgcaattcttattgagtcttacatctgggattcagccgctactttcagtggtagtttttccttggaaattaatgaaaaaagaaagtaggagcaattcctgggtaacagttactatagtgatcttacagaagaatagattgctaaggacattctcatatgccaaatttgttttcacacattgccaaatatctttcttttttattacagagatatttctatgatggttctgtttctggtggtttagtacagtgggagtaacaccagtacttacagctgcaacattttctatttctgttattctgttatggtttcaattaggtgtgatctgagtcatagctgtttcttcctccctaaactttttgtagatatcactctggtaaaactttcttgttcgaaacaccaaaatgaatgaaacaagggagccaaacaatgtcacagctgtgattactatgaaagctgtcctgtaacacttaccgccattacaagtcaattcctccccagctttcctcacaatgcctagggctttcatttgcattagagcctctttatcatacaagcgaccagccaccctcacattgagaatataagagccgagggggctcgaaagtgctccaacattgtaaagagttgagtagtatttgaggccaaagagttcggatatgattgcaaacaacaatgatagttgtgctccatagcaaaagccattgattactgatgcaaagtaaagagaatgtgagacagagaaggctatgaggagatgaccaacacaagagagaagcatcactatagcgagcaataaagggcgagggagcttgtactttgttaagaaaatttcagaagcaaagcctgccacgactcgtccgagaaaattccatatgctaatgagagatataaatgtcgctatgctatgtttaggataccctaaggagcttcctatctgacccaaattatcaattaatgtcaatgcccctccagccccacatgttgtggcaatgaagagaattaccatgtcgatgcttaacacggcctggagtatggtatagtcttcacctctgtctggtgcattgaaaatggttttcatccaacttaagtatgttttaaatgaatttgtcataactctgtttgcaactggatgtggctcgggggtcagggggttttcagtaataactggcaattgttctgatattggaaagtcttgggaagtttctttcaaggcttgctttttgagcttccaggactttagttcttcattaatgacaacaaacaatgagaaaaagagtagaaccaaaataacagaagcacttgcagcatattggggtctcttgaaatgtaagctattttgtataataattatggtcatgagagatccagctacaccaagtgatatatacaggaagttacaaaagactctcaactcatttggttgccgaatggtattcttgattcgaattgttcgaagaaaaaccaaagaaacaacaggcggaagccaagcaatgaacaagacaagagccttggaatcatttccataaatggcatgatagacctgtgtcaagatggcaccacttagaccaatcgatcccttcaagaggcctataacactgcctcggttttctgggaaattcttcacgcaggcaactaatgcggcggtgttaggaaaagacaatgaatttgcgccaatgcagatgtaaagacacatttgccaaacatgaggttttggcactctattagtgatggcagtccatatcatgaggtagccaaagaagttcatggctgcaccaattgacagcaccacccaaggtggtgacacctcgttgattagccctgccgagattcccagatttccacccaagtctttgaagaagcttatcaaattcagggtgctttggtcgtaacccaattttgatttgatgtcatttgagtataaaccaaacatgtaaccagagccattggcgctcatgatcaagagtgtgccaaacaccatgaaccatttgctttccaatacatgaataacgaagttccttctgtcttgccaataactgaagccaattgccatttgggttttctttttgcttcttttatttttgcacttgaaagattttgtaagagcaagaaatcaataataagttaataaccaaggccatgtttaagcttaaatgtcattttacttccccaatttttaatcaggtttgaactttcttgtcccatctatttggaggaatctactttctttattcttggttggcaagactaaccagtgtagaaatttatatttagatataacaacaaaataaataaataaaataaaaaataataaaaaaagcaggccaatatggtagccctgtttttttatttgcttttaagtcagcttgattacgatgtaatctggcttgtttgtattataaattgtcctgtcattaggagtcgggctcttgttaaacaatttcaacactttgaaaaattatacatttcgcatttcaaaaaaaaataaaataaaaaatatatacatttcaaattcaaagtaaaggaaacatgtaattaggcccataagaggatttgacacttttggactaacaaagtgttactgtttaagtttgaaaacttagctcaacaattggaaaaagctcaaactcatccctacaatgttctcactttcttaatacttttcttcttgatgggaccctggaaattaagcaaggattttttttcaatcattgaacaaacactttcgtctaatccactcggcaaattatatatcaacgaatcttagcaagttgcacaaaaattataagcactcgaaatgagagaaagcttttgataactctactatctcattgtcaattctaacgttttgtttagagaattttctccttattatccaaacaagaatcatttggcaataatgtgagccacaaaattaatttagtgaacccatcaagataatgggagttgttttagttgattaagaaaacattgtctttcttatctaaatattttgtattgttttaattaaaagtaattacataatttagttattattaaatgtaattattaaaaatatttcatttaaaatataaactactaaaaaaatttattttattgtgtaattattaattattttgtcaaacaatatattaaaaatttatatttaattattactttatatctaaacacacgtaacattacttaattacacattagcttctaggagcctagattgagactagtgcgggtagtgactctagtgaactccatttgatttgatttttttttttt

SEQ ID NO: 185645 - DNA, 4290 bp, Cannabis indica
ctcgatcagatagtgtcatagtatggttcagatcagatagcaggttgtccatcataaaaaaaaacaagaaacagagcatcaaatgtgaaggattcaattatgaattgaagtatgatttgaaattacatggaggcgcgaacagttatgttaatttggcttgatgaaaagtggatagggacacagcagaaagaccgttagaacagtaaaaaagaaaaaatatactcaactgccacagagctttttaagggcacacacgctcacttaaaatttttaaaaaaatccagtttaccttttacgctattttattactactactttgttactattgtataaaataatacatgtgtaaggctgaggttaaatctcatgtattttctttgattgaaatattttaaaaatttataataattatttaaaatcttctattaataatataaagtaatttataaaaagtaaattaaaacattaaaacaattaaaattatatctcattctattcataagaaagcatataacccaaaatagaacaccctcattttgtaagaacagtaacccagaaatgaaacccctcgattctttctcttttctttcttcaaaacgttaatagaggaagaagaagtaaaagaagaggaaaaaagagaagaagaaacactccagtacttgaaatctatgtcgtaagtcgaaaaagacgaagaagagtttagggttcatcgatcggccgtcgtcgggcttgttcatcgcaggactggttcttcggtcggtctaattcatttgcttaggatttagtaatttggctttccattgagaatgtagttattttgcgggttcatcgctggactggttctagttttttgggtttaagtttcatacgagtgaagaaagaagaatgtgttattttatgattcagaatgagggagggtaaattgggttaacttaagtttttttttcttagaatttatataatgtaggaatagatttaattatgattaagggaatattatttttttgaaataaatacaatttaggaatggattttttttatataaataagctagatttaatctcagccttaccgttgttgtttacaagtaacagaatggtatacgtatagtgccctaaactatcattctttctttatatttgttctttctatttcatatttaatctatcatttacctaccttcatactttttatgagacaaaggctaataatgcaagatatactttcatatttaaggaacacatgtacatctaatgggctcatcgttcaactaatataagcaaaagttgtttctatgtcttctaagaatttgttgttgaattaccaaaaccgaagctgaacctccaaaatcaatagtcccaacataatctccaatgatccccaattcaagcaaattctctgtccaattcgacaatccttcaagaagtacaggattaaccccatgttgcctccccacaatccacagatcaaacgacccgtcgtttatggccttaatagccgcaatagtttcagctccattccttactatcacttctctataaatcaacctctcattctcctcattctttacccaaaaccatgtcaccattccatcatctagcttcttctccatctcgtcatcaccattgccattaaatgacaagaacctcaccactgttagcattattcccgggttcccaagcatcctatcagcataggtcaaggcctctctagcgtctgccccgcccaggaacaggaccgcaaaatggtgcggtgcgtgcccgaacgaggcatcaacaacagggtttctgaggttgattttatcaacaaaaatcccaatggaacaaggcgcattggaaagcacgaacgagttcacactccgaacacctaacctgtgctcggagtctaaactgtcgttgctgtaaggtaaaatgatgagagtagatttatgtataatagcttgctcgcaaatgtcttggtacatggttcgtttaggggtgacaatggtgaaggtttggagcttaacgctttgtaatcgactctcttggaagtactggagagcattgtgaatgtttaagcaattcgcgtattgggatggtacctctctctgcttttggtggtcgatgaagactggattagctcggcctgagagctccattaggcatagggctgtgatggagaaagggttggtggaagttgggttggaggctttgagaaggttgattaggctgctcactgtgtcctggttgtgaatgacgagaagtatctttagctctgtgtttatgggtgtgtgttgaatggttctcctcttgttcaccatgtatggctttgatgggtcatacaggagagttattagtggtgtggatatggccgtcattattgttgataggaccaccatcaagctgaaatatggttgtactagaagctgtggagagcaaaaaatgagatttcaattataataatgcaataaatatatattgagatgatgatgaaatgtatacctgtttgtccatatagtgaatgaataacaaatacaacacttgacccctcacgctaagagtaaggctcaaggcaaggctgtctcttagagacattttgaaataaagagaagttagaaatgtggacaaaattttagaaacataaccaacaataataatgatcaccaacggtttcaacgtggaccacacaaagttagggtggaacacatcagtgtacattcctataaatgtaaaagaaaacggcatcagaatatcagacacaatcgtttgtgtacggtcaacaatggtggatccgagtggtgggccatctggaatcatgaacccaaaccacattgggccattagctacagccagaccaaacaagtcagtcataaagcccatgaagagagcacttaagatgatgaacactataatagtctggtccacagctttctcagtttggagtttggcaacaatgtattgcattgttctcttgatgcataatatgaggcccaaaaccatgaccatagagagtatgtaccagcctgcattttggctctcatccatggcttgtttgtgggcctcaaagcctatgactgcattgaccccaatggcatctattatgatggaagtagaaagggccatccggcccaaatctgaactcacaaatttgagctcttcaaggagagggtagagatctgggaaggctgttatggccattgaccaaacaaccgcgcccattgatgatgggttagccaattctttagccatggaatcttgtaacatcaatgctgtcatgaggagcagtattaaaggaattcccacagaggctaatgcaatccctatgtgtttctttcctgttctggagaccagagccaaatccatcttcactccagacacaaagagaaatagcatgtatcccattactccaatatttttcaccataaagtctgcatttttcgggaacaaaaattccccaaacttcttgtttcgtcccaagaagctcggccctattagcatgccacccttaaaaacacaaatgtgcaaatattaatacatctttcacccaaaaaaaaaaagtaaaataaattagtttatttctacgtacttacaaggacctgagcaacaatcttaggttgtttaagaggcttgagaagaaagtgaataattcgagtagatatgaggacaaaacttatttctaacaacattaaagagaaggagtaagttaaatagtttccaccattattatagaaaacaccaaaagggtgagtagggtgtttaagttcatggcaaacgaaggccccaggaagactgctgaagccttttctcttgaaatcttttgtatgttctttcatagaagtatttgctaaatcgtgcaacatcatcccaaaggccgtatattgatgatgatgatgatgaggtttcattttccatgtatcgatcaagttctaattacttcaaattaaatgtaattcttggtttaaattaataataatttgctgcggttattggggacctgatcatcatcaactttttacaaaagtgtaaacgataaacagatcatcaaagagtagaaaatcaaacaaatgatatttgtggtcaatcgttgaaaaggtatttacacgtatataagctctcttctaattatggtgtgtgtttgaccattttccacaaatatagttccgagattcatgtacttttttttaactacactatttatggtaagcattataaatatttcaatgagatccttaattaaatatatatttgagaaaataattataattacatgcgcatacacattacactattgttcctatgcatttgataggat

SEQ ID NO: 185646 - DNA, 2469 bp, Cannabis indica
attggattgatttatgcacatccttattttaccataaaaagtgacatatttttattaatgcattttaatattagatttggtatattttaatttaataaataaaataaaaataaatcactaatcaatttagagtaaataatatcaatatattgttgaacatgttaagatgataaataggaatgctcttaatccaatttttgttaataaatttgaatttttgaatattcataaaatttagtaacaaatttgattgagaaatgttaaatagcataataatgcctaataatattgatactattaaggatggagtcctatatttattagtagtttttaatttttatggaatattgctaataaagtcaaacctgtaatgctccatttgattatttagtaaggcagtcaacgttcaggcgaagggacccataacataagaacattttataaatatgagttttgacaaaattgtaactcaagtctttgttcaagaaacaaactacttaaaaatgtcgtctatacgagggaagaagaaggtaaagagagaagtacttctggaatggaacaacattcatgtctctttctctctctgtcaactaaaaacaacggatgatgaagattgatttgaacagttctcttcactcgttgaatttctcaatttacaattacccaaaatctgatactacacggaatcgcttttttgagtgagttaatacgcgcctaaccactcttcattaattccatttgtttcaaacaaccaaaaacagatagaaacaccctttgaaaccctcttcccaactactctgacaattacaggatagtagaaaaggtaacaacaaaaaatgaaaaattacttctttacagtttgattgctctgtcttttatgttttcttatctgggttttgcttgatcttcaagtttctttgtttatctattcttcttgaaggatctaccaatctgggccaggtttcatttcttttgtctcaactggtttttgtcatttttttttagctttcatgtcttagccaagaaaatctttcataatttttttgttttctttatttattgaatggtcaactatttttaccttttctctcttaccctttgcccttcgttttaaataactactttctctgacttttttttgttctttggttggtttgtaaattttttaaggacttctaacattttggtttacataattgtctgttaaagtttcattgcagcctatttgaagggtagttcaatcaatggaaagtaaaaggatcctcataatacacacatataacatttgaaacccccagaaatgaattgtttttactacttaaaggacaaggccaagagcaagctacaaaggtcagctccagagctgaaagtggagaccaaatctgagtattcaggaggtgatagtaggattatgaagtcttcttgctctgccaattcgccacgtgggataccggaactatatgaagaaaaagcacataacttgagagtgtttaccttctctgagctcagaattgctacacatgatttcagcaggctttttaagataggtgaaggtggttttgggagtgtttttaagggctcaatcaagcctgctgatgggaatggagaccaaatcgatgttgccataaagaagctcaacaaagatggctcacaggtataataatagtttctaaagaatatattccatttttttcttcatggatcttttaagttataaaatgcttgaacttctctttggacaatgttatgatctgttcattcttggtattatgtattactttattattataggcctagtttgttgagtattcttcatgaatatttaatttaaaatgcttgacttctcattagaatttagaattataccgttgtttagtttcacttggttgactatgatctgttcagtttgattttatattccactattgagatcatttttttttttaactaattttgatctctaaacttccttttttaatctcatatagggtcataagcaatggctggcagaggttcaatttctgggtgttgtagatcacccgaatcttgtcaaacttataggatattgtgctgtggatggagaaagagggatccaaaggctacttgtttatgaatatatgcaaaatagaagtttagaggatcatcttttcaataaggcttatccaactcttccgtggaaaaaacgattggatatcgtgtttggagcggctcaaggattggcatacttgcatgaaggattggaagttcaggttggtatctgttagtgttaagtctgtcatttctcaatgaatgaatgcagctcatttggggggtgggagggtctaaaatataatgttattatatcgtttttcaaaacatttcggcatttataaaggtccatttttgaaaattttgtatacattctttagatctaagatattgtcccatctgttcatgccttaagaaacccccaatacaaaatgacttacc

SEQ ID NO: 185647 - DNA, 3336 bp, Cannabis indica
atgtaacataagtcttttaacaaagttggtagtgcatgagttcatttaaatagtgcatatagttttgttgagattggtgcatgagctttgattacattttttatctccattcaagaaacccatgtgagtatttaatcacaagaaattctggggcccgtgattacttaaatcatattttagtaccaaaatattattttacattaaaaggggtgtcaggtttggtaatggatgctaacttgagctgaatgaatggggttttattcacatttaagatttgtcgttttctttcaaagtttttgagaatttttagtcagttggggattccagaaaatgggttcgttttcaaactacaggacccccgattcctctgagttttttgctcttgcaataataagtcagtgttctaaaatttgcgcatgctcaccgcacagtgagtaataaaataaaaccactgtttttggatgtaccttagtgcattatataaaaatgtccttgttttctgactcactcatttactcctcttggtcccattatactaactgcatcagaacgttgaagcttcaattctagtgatttattaacttctttaccaacccaaccaactttcattgttatatggataaagttacatttttctatatcatttattaaattaaaatatgtgacaccgataacaaaatgtacttaataacggtgtaacacgttacagtctattaggaaatttttgtacattattttgttttgattaatttttatttgataatgttacagcaattgtccctcaaaggatttgccggagacacagcaaaagctcatgcaaagacaagtatgattgccggggaaggtgtgagcaacatccgtactgttgctgcattcaatgcccaagataagattgtgtccttgttttgccacgagcttcgggtacctcaattgaggagccttcgtcgcagccaaacttctggcctccttttcggtatctctcagctcgcgctttatgcttctgaagcgctcttttgtggtacggtgctcatctcgtaagcaagggcctttcgactttctcgaaggtgatcaaggtgtttgtggtgttagtcattactgctaactcagttgcggaaactgttagccttgctccagagattataagaggtggtgaagctgttggctctgttttctctgttcttgatcgtcatactaggattgatccagatgatcctgatgctgagatggttgaaacagttcgtggggaaattgaacttagacatgtcgattttgcatatccttcaaggcctgatgtcatggtgtttaaggatttcagtctacgtattcgagctggccaaagccaagctcttgttggagctagcgggtctggaaagagttcggtcattgcgttgattgagcggttttatgatccaatggctggcaaagttatggtcgatgggaaagacattcggcgtctcaacttgaaatctcttcggcgtaaaattggtttggtgcaacaagaaccagcattgtttgcagctagcattttcgataacatcgcctatggaaaagaaggggcaaccgaatctgaagtcaccgaggcagctcgtgcagccaatgtgcatagctttgtaagcggtttacctgaggggtacaaaaccccggttggggagagaggagtccaactctccggcggtcaaaaacaaagaatagccattgcgagagccgtccttaaagacccggcaatccttcttttggatgaagcaacgagcgctctcgatgctgaatcagagtgcgtgctgcaagaagcgttggaacggctaatgaggggaagaacaacggtgttggtggcccacaggctgtcaacaatccgaggcgttgacagcattgcggttgttcaagaaggacgcattgtggaacaaggcagccattccgatctagtgagccgccccgagggagcatattctagactgttgcagctacaacaccatcacatttgagatggttatggtggttatctttattattataaaaggaaaaaagggggcaatgtgggtcttgtttgggtgttaattaaagtgtgtccagttaaaattaaccttttatgcttccatttttattctagttgtagatatgggtggggtggtaacatatttcagaactcatggtgactactattctctgatatttctcaaaggagtagcaaaggtgttatattatttcatcaaattaatattttatttatctgaagcatataatatagaaaattgggctttcttttgaagatgaaatagaaaaaaagaaaaaatgaagttactttttggttttaatcttttttgtgtatagcattggtatggggcatcaagatcactagtgcacaagagtgttatatttctcttttttctctttagtgtaagtgaagctttggttatatgatatggaaactaaatttgcagcctcaaaatcaaagcatatcatgagaataagaattaaaaagccattaaaaggcatacttatctttttttctacattacaaaatggcgacacattcatttgacatagatagatctgaattattgcaaagatatttataagatagaaagaggtaatacatacatatatacatgatgtgatatatatatcttgataaagtgtaacagggcccacattgtgtacaccatgatggcccattttgtttactttatggatcaagggcccagacagagtatatatgtacacaagtcaagtgcgttttgagaagaaagaaaaaaataaaaactatatgattatttgcgactgcctatagtttgtgaatgaatgatgaatctgataaagttcagaagatgtcctttgcttatgacaaaatgcccgttgcgtcgttgcgacatgactctcgataccatgacaagaaaagaaaattatcgggttttatttctaaactaattgacaataaaaagagtaattctatatagaaaataaagtgtctcttattcttaagattagataccattatatatggatgtagtgaaaatgcatggagtagggagattctccaaaaagcaagatatattgtatatgggtgtgagtgagtgtacttgatctgaccaaaagcaaaagtgaagaaaagaaagggttaatgaaggagacatgtacatgtgtctcctctgaaaacttttacagttcaattcattgaatcactgtaaaataaatcacattgattgatacataatatataatagttaggtgcatatattttattactacctggacctcaatatagtaaaaaatatttgggtgattcattctattctagggctcctcttttaacaccaatttctctttgtttttttttttttt

SEQ ID NO: 185648 - DNA, 1500 bp, Cannabis indica
attttttgttacttgttgtagacaccaaaaagatgctttgagcgtgcagctgaaaaatgtcatactgattcattgacaagcattgttgcttcatgttcatgggcgaaacatgtcgctgttggtactggctcgaggtttgatatcctctgggacacaagagaggtatttcataatttactgaattagtgttttaagcttttatgctatttctattagcttttataatcatcattctgtcattttctcttctgttccagatgggattaaatcaagaggagacaaacaatgtatatgactttcttggtgttgtgggtgctgcatctggaaaagaaacaactactgggtgtctcggtgaagaaatcgaggagattatactggaagatgacggtgaagtttgtgcatcacccgagctcgagttcgaccaagacaagccagtctttgaagatgatgatgaatttaaagatattccagatgatgattggggtttcaaagctactcaggaaaccaataacgatgattggggtttcaaagctactcaggaaaccaataatgatgactggggtttcaaagctactcaggaaaccaataatgatgattggggttccaaagcaactcaggatactgataatggaggatggggcaaggtatcatctggtaaagaagatagctccaatagtgggtggaattccaagtcggctgaaaagaatgttgcaactgaatccacctggggagccgccagttcagcttgggacaatgtttcaacaaaggaaaaaactgcttcagaagatgacaactccaattctagtgggtggggtgcaaagtcttctggaatgaaaacaacagaatctccatggggcaaaaacacatctagggttgaagttgattcagacaatacttctggtgggtggaatgtcaagtcgtctgagtcgaagacaattgaatcctctaaaatgaaaacaacagaatctgcatggggcaacaatgcatctaggggtgaagttgattcaggctccaactctggtgggtggaatgtcaagttgtctggatcaaagacaactgaatctgcatggggaaaagataaagcaggggctgaagttatgtccggagatgaccgcttcaaatctgggcggggtacttggtcaggagggaataaacgaaattctgagaatgaagatgtcccctctagaaaacccaatgacaacagttgggattcctcaccagcagagcatgctggtgggtggaatgccaattcttttggagcaaactcaacaaaatctgcgtggggaaccgataaagcaagtgttgaagctgtgctagaagatgaccgctccaaatctgcatgtaatgcttggtcttctgggacaaagactacagaaactgagagtgaagatgttccctttaaaaaacccaatgacagcggctggggttcatcaccaaagcaaattgcagaaacttcagatgcttggctgtcaccgagtgttggaggcagtgttgaaaaac

SEQ ID NO: 185649 - DNA, 6335 bp, Cannabis indica
aataaaactacatgtcgttttacatcgactcgcgcgctatctaggaaaaatccaaagaagtagttagcacttagttgggggcagtctatgaacaagtaaggaaaagcgagtcactgcaaacccataaatctcttatgtaaacaactgagttccattctcacattctcactcagatcacaccttcgccatgaaacctcttccaattgctcttcctacattcgattctcttcaactcatgttcctttcactggtaatgattcagtatccccattccactaatcgatttgatttgaatgtttcattatctatttctgtggattattcttcttaaacttccaatttaattaacgattctgcttcggattagacacgcgattcgttaagatcatttattttgtttgttttgtttttcaagatcggtacggatttattagtttaaaatatataacttctgtgatctagaacagtgaattttttatgattggatcagctactgtgtttgctaatttccaattttgtacctaattgattgattggattttgcttaatttaatcaggttattttgcctcttgtcgcttctggagtttcagataattcggcaatgtaaggtcattcaaccctcttctattctttttgcattttttaatttgaactcatgcggattattaacgatttatgatggctttttctcataattttttgtttttctcagtccgagagatatcagtagatatcgaccattgtatgaatgtgagcaatgtcaaggaagaaaggtttttaatcttatacttttactcgtaactttcattagtatatgtgccccctttggaatgtagtatataggttcagacttacttgtgtacattatgtgctatgctgcgttgatttactttgtgattattgctcttttctcaggaagatggttcttcagttactggacttggtactcttttagatcaacaggtatttagtatttagatgaaccattatgttatagaaattattgtcaatgcttattttgttttaaatttggtacaggattttgacataacagtgatgtatactgacccttctggtgctgtgcggcttagaaaggtgaaaggcagggacttatctgcttcttgggtcttggaacacccgaataacgcaaacagtgatcagccacagaggttggaggtaatttcattattagaaggggaaaactctaatgtgcttaagggtatcatcactaattcatgtaaacaaactacaatagaagtagagaaggcacaacatattcgatagtaatatagatgtgaagaataggacaagaagttatcatctgcttttatactgctgtttgttctctcacaagtttgacatcataatgcaagctattatttctaatgtagatgtattggggaacaatgtccttgattgttttcttatttccagattctaaaggactcatttcaatctgtggaattgagagagacagatgagcatctatcaggagaagatgatgtcctacatcctaatcagttgtctatgagtccagtgaagctcatgcggcaggtaaacagtcaaatgctttctccctggaaatatttttttgacagtgtttgaattccaacctgctgttttttgcagaaaatgcggcaagaaagaatgaatcttcgaactgctgagctactacgccaagataaagaagctgatgaccagatggtagcagcagcaattgaacgctctagaaatcttgacactactgtcaagggaaaatacagcatatggaggagagattatgataatctgaactctgattctaccttgaaacttatgcgagatcagatcataatggcaaaagcttatgcaaacattgccaaagaaaataatgatacgagtacttttgatgccctcatgttacagtccaaaagaagccatcatgctattggagaagcaagttctgatgctgagcttcaaccaaggtattatcggtctttaccaatctctttattaaaaagcatatgccctttcttttctcgtattcatagtttttcttcattttttactactttagtgcacttgagcatgcaaaagcaatgggtcacattctctccatggcaaaggacaaattatatgactgccctgtaatggcaaggaagtttagggccatgcttcaatcaacagaagacaatgtgaatgcgcaaagaaagaaaagtgcgttcttgatccagcttgcagcaaaaacagttccgaaacccctacattgccttcctctgcaacttgcagcggattacttcctgcagggctttcataagagagaggatattaacactgaaaagcttgaagataattctctctaccattatgcaattttttcagataatgtactggcaacatcagtggttgtaaattctactgtactgcacgcaaatgaacccgagaaacatgttttccacatagtcacggataaactgaattttgttgctatgaaaatgtggtttctgatcaactctcctgctggagcaactatcaaggttgaaaacattgatgaatttaagtggctgaattcctcttactgctctgttcttcgccagcttgaatctgcccgaatgaaagaatattatttcaaggcaaacgatccttcctccctttctgtgggttctgacaatctcaaatacagaaatccaaaatatttatccatgctgaatcacctaagattttatcttcctgaagtttacccgaagttggacaaaattctattcttggatgatgatatagtagtccagaaggatttaactcctctttggtctgtggatttacaagggatggttaatggtgctgtagagacctgtaaggagagcttccataggtttgataagtatctcaatttcaccaatccaaagatctccgacaacttcgatccaaatgcctgtggttgggcatacggcatgaatatattcgatttgaaagagtggaagaaaagaaacattactggaatttatcatcgctggcaagatttggtaagcatactaatcttttcctttgatcactgcatttctgttcttcacaagcattggcgtgcataattttagtgattcttttatgttacatgttaactgatatgagagctttgttacagaacgaagatagaactctttggaaactaggctcgttgccaccaggactgatcaccttttacaatctcactcatccactcgatcgaggctggcatgtgttggggcttggctacgaccctgctctaaaccaaacggcaatagaggatgcggctgtcattcattacaacggaaactacaaaccatggttggatcttgctatctccaagtacaaggcatactggtctaaatacgtaatgtttgataacccttatcttcaaaattgtaacattagtgaataatggttctttttcatactttcctttcttctaacaccctgtaactcacacctttgtataccaattttttttaggggggccaagagtcactcttgtaaaacctgataaccatagagagaaatataattttgtttagtttttatatggtaaaatgattactaaacgtgcagaacaaactagggcaaaatagacccaatttggaatatttcaattggcaaagatgcccattatataatactattattgggtaaaatatttatgtttaacacgcacatagttcttggcgatgcgtcccacaatgatcccagtacacttgacccaacagctctgtaattggagcttgaagctcaaagagtcatgcaatattggaaaatggcaagaagtactttgccaatttcatgagatgaaaaaagctgcaactactcaacttacagaccctactgtgtttccttctattctaaaagcttgttcaaacatttcaactggatatggaaaatcagtgcatggatatttgataaagaaaggcttagaatcacacacttccattagtaattccactatggacttgtactttaaatctggttattttgattctgcattatgtgtttttcatagcatgatgagcaaagattcagtttcttggaatattttggtatatgggtaccttaatcagggtattttagaagaagggttgtggtggtttaaagaggctaggcttgctgggtttcaacccaatatttcaaccttggtgcttgtgattcaagcatgtcgtaatctgggtgagcctaaagaagggtatacattacatggttatgtgattcgaggtgggattttggctattcattcagttagaaactccttgttgagtatgtatgcaggagttgacatgaaaagtgctcacaacatgttcgatgaaatgcttgacagagatgtcgtcgcgtggagtgtgatgattgggggttacgtgcagtgtggggaggctcaaattggtctgcagatgtttcgaaatatgatatcggaaggtggcgctgtactaccagacgaagtcactatggttagtgttctaaaagcctgtgctgatttaggagacttgactatgggattatcagtacacggattggtgatcctcagggggttggactgtgatctatttattgggaactctatggttgatatgtattctaaatgtagtgattctgattctgccttcaagattttcaaggagatgcctcaaaggaatattgtatcgtggaattctatcacaactggatttgtcctaaatgagaagtatttagaagcattatcattgttctattctatggggaaatatggaattgaagcagatgaggtttcacttgtgaatattcttcaaacatgtaagtattttgtggagccattactatgcaaatcagctcactgtctaatcatcaggaaggcttatgaaatgaatgaaatggtgctcaactcgctactcgatgcttatgcaaagtgcagcctcgttgacctagcacgaaaagtttttgatgggatcgaaagaagagatgtagtttcatggagcactatgattgcagggttcacccatttcggcaagccagatgatgcaattgctgtgttccaagaaatgcagaaggaacaggagaaacccaacacagttaccattttaaatcttttggaggcttgttcactattagctgatctaactagatccaagtgggcacatggaattgcccttagaagcgggtttgctttagaagtagctgttggaaccgcaattcttgacatgtactcaaaatgtggggcgatagaagcgtcgagaagagccttcgaccaaattctgaagaaaaacattgtctcatggagtgccatgatagctgcatatggtatgaacggtcttcctcacaaagccttagcgttgcactctgatatgaaagttcacggtctgaatccaaactcgataacaactctctgtgttttgtctgcttgcagtcatggaggcttagttgaagagggcatttccttcttcaactcaatggctcaagaacatggaattgagctaaaaactgaacactattcctgcctaatagacatgttggctcgagctggaaagctgaacaccgcgatggacatcataaggaaaatgcctaagaaaggattagaggctggtccaaatgcttggggggcactcttgagtgcttgtaagaactataaaaacagccaacttggttcagaagcagcctctcgtgtcctcgagttggagccattgaattcaacgggctacttggtggcttcgagtttgtatgctggtggtggactatggggtgaggctgcaaatatgagaaggttgatgaaagagagaggagtaaaggtggttgctggttatagtttagtgtatgttggtaacattgcatctaagtttgttgctggagattactctcattcacaatatggagatatccattttatggttgaattcttgcatagttgtataaagatggagaagaagaatgatttgacagaaaccatttagttttctccttgtgaatagtggatatttgttaagcagattccaagcttggttactcatgtaagaattataaaaggaatagcctcacagtccaattaagtgtcacaaggaagggaaagaagtaacaaaatagatatgtaacttggaaaacaaaatatggtcatggcattattcttattatttctttacaatgaggatgatgatgtagtgtaaaatataatacagactctacatcaaaaattgtcattaaaacacacaattataaactagtgggataacttttcttttgttgccaagcaaagtatttatttttcttttggtgttgtttttaagagaaatgttaaaagagaattagtagtgtctaacactcaaattattatcgataaaattatatattttactttatgtattttttt

SEQ ID NO: 185650 - DNA, 4299 bp, Cannabis indica
ctctgcaacttttgtcagacccattttagagctcaactcactagagttgcatgtttataaattgaacccattaccaatccattgattctcccaagcttttgaatctctcactaacttgagcaaaagttttgatcttttgtaaagttttcaactttcaaagtaaagatacttcttttttggaagttaaccaaaaaagtttgagtttttagaagacgaaagcaatagagtcagacataagaaggaaaacaagctttttggtatctgggtcattttttcatccagttttggtgattttgggaggtgggttttgaaggttttggcttaaaaaacttcgatagatgattgttagctcaccttgtaatgcagggactaaatttttggtgagtttgtttttctttttctttttttttttttacagtctttgccttttgtatttatctttactgtttttttgttttctcctttcatctttgttactgtatatttgtactctagtccttcataacttcatacgttagaaaaaacatttccttttctcctaccttattgtcaacattgctacaagaaaatgttttatatatgaaaactgccttcttcaagtttcaacttttgatttgtttttatatgcatatatatataatataagcatatgctgtgtgtatgtgtgtgtgtgtattagtgtaaatgcatgtatgtcctttgttagcttgtaccagttaacatattattttgatattaaatgaaactgtggtgattgattttgttaaatgggtccaatatccaattcatttcatgcattcttgctagatttctaatctggacccaccaaatatagttctatattattgagtacattcataaagatttgatatatattggttaagaataataataatattaaaaccaacaaatttcattcattcattcattcacacacacacacacacaaaaaccacttttaaattatactggtctggttggataattgatgtcagtggattttaataattattaaagatacatagatgatgatgatgttggtccatttccaaaggccttaatactagtgtaccaaatctatgcattaatttcttttttataataatattatatgacatgattatgtgtgtttgtgtgttatttttttggttgatttatggaccttttgtcctcttgtgagtctgcaattaccaataattggtgatattattttttaattacttagttgttggtgatattattgaagctgtaccatattatatggctatgcatattagagtatgaatttgtaagtgataaaacttaaatatggtcagtctgaccagaacagtggatgtcttttgtttatcttatgatttttagcatcatgtttggttgattataatatatatttttttaaggttcaagaggaattgcattcatctaggatgcttctttagtctcaatcagtttgtttggtcaaccatagtttaatggggactctattatttaatggcattggatgaaataaacattcaaacttgtgaagagtattattattaactaataaattcacttaatactttggttagtattgatcaatatgtttagaaatgccatactactttataactgcattctctatgatgtttggtttgttgtgttaaatgacttgttttcttcaaattgaccattactaattctctttgctatgtgaaaaaaaaaaatagggggaagaagccatagatgtaagaaagatgacagaacacaaacggagcccctgctatgttgaccaaagcagcttctcctcgtctcttgtatcgtcgaaaagacaaaagcccgatttatctatttctactaaggtattttgaaaagcatataaactatatttgcttcaactttgtaacatgaattgaaaatactattcttcaccttggttggtgtttcttaagagaattttgcatattatacaagtactgttattccatgtgaaggcatttcccccttgaggcttgtcccgaattcattcttgtgttgttcttatattgtcattgtatgtcattcaattgctttaaactcagttttttcttatggtcttgccctttgaagtgtacctttgtttagtaattgtctttatttattacgggtttgcattctttcgttgctctatcaggaaagaaaagagaacctcggggcaaaaattgtagctctacaacaactagtttcaccatatggaaaggtatgcatagaaatagagatttgtttctaatctatgtaaccgaaaattaattaatatcatctatgttcggtatgagctcgtgagattccattaattctttttcttagctccacaacattatgtacaatttgcagacagacacagcttccgttctcttggaggcaatggaatacatacaatttcttcacgaacaagttaaggttcggttaaactagccttggccctcttcagaaatggagtaatagaatagagagctgtattctgttgttttattaatctgatggtcttattatttatgttcgttgtgcccttgtaggtgttaagtgctccatacctcgaaagtacaccacccactaagatacaggtaaggaaaacaaaaattaaaaatgaaaactttatcaagattagacatttaattgtatttttatgaaaagtgcataggaagagaggaccccatgaaattgaaatttagctataaatgtttgaacacttccaaagccttgaatggaggagacatctaatgatagtaatggtagtaatggaaggtggaagaccccacaatgctaaatagtatggatgcacctaattatgaaatttgatattgatgttgatgttcttgggtgaaaacaatactttattttgagaaaaataaaatcaaactaaatgtttaatgaatggtgatgattagtcaaaagagaacagctgtgagtaaattaaggaaagttttgaaattttggtttggtcaggaaatggaggcattcaagttgagaagcaggggtttgtgtttggttcctgtgtcatgtacacttggggttgctagaagtaatggtgcagatatctgggcaccaattaagacaacttctccaaagtttgacacctcttcttcttctccttcttcttcttctatctcacactcacaatttcattgatattatatctatatctattatatatatatatatataaatatagtataacagtactagtaactagtaactaaaccaaatggaatggatgtcattgttaaggttaaggagggtgagaggcacaacaaagttttgtcatcaagaaatgaaatgtaactgatacactgttattaattaattaaattatatatatttttatagctaagaagatctttttcccaaatgtaattttagtatatatttatgtatgtatgtatgtattgtattgtactagtctggttcaaggccaatctggtttattaatgaattaaagtggtgatgggactaatttggtagttgtttgtttgtacatggcgaacaactgatttagtgaaactatttatacacaaaaatgtgtgaataatgataataataattgcacatgaactcatccctagtaataatgatgataataataataagagttttgctaaggtgtctagctgttttgactagacattaaaattaaattgctctaatagccatatctttattaattttctaataataatgtacaatgttaaattctatgtatctgttgttcgatgtaatactccatagcaaatttgctaatagttggacctaataaaaccttacctgttttaccagacaaacatatggattagtttactactattttacttcatttttttatttgctatattcttagtactttgattaaggttgtgcttctttccaacattttacacttacccatgtaaattgaaaatatataattttgacaaaagagtatatatgtttcggaggatcttagtctaattttgtgtgtaaaattaataacatgttctaaataagaaacacgcatgctatggattgttcaaattttatttttaatttgatgtgttaaatgtttttgaattttttaaaattttataagatattttaagtgcaattcataaaaaaaaaattgaactaaatttttttctaaaatactaaatagattaagatggtatctcaaaaaaatttcatatgaagatattttaataccataagctttatatgactgatttttaattaatttttttagaaaatgtaaaatttatagtagtcaattcatttaaaagggtacaaacttggtagacttgttatattttt

SEQ ID NO: 185651 - DNA, 2713 bp, Cannabis indica
ataaatgttatccacaccttatagatgtgttttcataaataaagtgtcaatttgtatttttttaaataataattcatatattatttataattaaatttaaaaaattactctcaacatttatttaaaattttctttttttcattattttatgctagtttcaataattgccatgatttttgtatatcacttataatttttctaatttttatctaataaaaattttcaaaattattttttatttttttcttaatatttaaaatatattttattttttatgtatatttttttaacaatatgagaaagaacactttttttttcttaaaaaaatattttaaaataaatatatattttaaatgaaaaaaatgattaaaatatgtgtcttcataagattttgctatgtaaataaaactcttacatagatatttttttttaattattttttactctttaaatttttttatttacaaaaatacctcttcaataaatataataaactgttttttggttgttttatagttcatttatagttccattaaagttgtcatgaggttattttttgattgttttataatttatttataattgatttatacttgtcgtgaggttgacttctagttatttttaagttgttgtcttactttttgctgaataaagtatatttttataattttaaattttgaaagtacatttttgtaaataaaaactttaaatcgtaaaattgtaaataaaacataaaaaagagatattttttttttttgttattataataagttaagttgtatacatattaaaaggggcttttctcattaatacgatgataattaaaaatttaatcatttatacggaagaaattaggctgtatatctcttttaagttggtgtctttaaattttaccttatctttctatattttttatttttaccttttcttcaactgttctactaattttgttcctatcattacacgatatactgagtcaattatgatggatgaggtagaaattgcatgtgttggactgctatggcaaaattagggttctttgcatttcagactaattaattaaagtagcatatgtaagggtatattgggtaataaacttataaaagttggtagagttggtagatttgaattgattttaatgtgcaactattttttgtgaattgataaagaagtatttctcaacttatctctatttatagagctactcgtaaacccaatcatttcctcctccagaaattgtaatcacctgtaccatccaacttgtctatgtcaatctagacattactcataatgttaaaaccaaaatttaagtaagatgaggttaaagaatttaagttctcttctggatcatttgaaagaatgtccacaaaaccttctttgttgaattcagcttttggtggattagcttcctccagatttttctttcaagtctagatcaattatcttgagtttgaattattcttgctgaaattcgcagctttcataccattattggtattttacccttaaatccctccaccgctcacaagagaattagccacatattaaagttaatcttaaccttttacacacacaaacgtatgaacaaagcatgccacacactgttttgaacaatattcttattttaccaaattttatgttttatctttattgtttttatcaaattaacaagtgcgtatcccgagcccaccataatcaatgcccctattaatgagggtctgaaaggttttattgggcctttattggaaaacgaccttatttccaacgagcccaactcctcttggttttactctggggacccatctgttttattggatacgaaatccaagaaaagaaaggctgcagggaatgtttcccctattatcattaaagaccccaacagtgtcttttccatttcaaaaaatcccgaatccataccggagttgggtctgatcacggaggggtcatttgtctcagggaaagctactcccagcaaaagtaatggcaacaggaagaagtctagtggtcgaaagaaagcttgcaacaagaacactcaggatcctagtaacattcctcttggggaagatcctatcctaccaggtaacacatcgaactgcattactgagattggtgaaatgctttatgaagtcaagattgatcagaattttcaagtgggcgaggaggcggcccttatcaagcccccccacccccaatgagagctctttcctggaattgccgaggtcttgccagaccgtcggcaatccaagctcttggggcttgggtcagaaagtttcagattgactgcttgtttttgatggaaaccaaggtgggagctgatcacatgaaaaaggtttgtagcaccctcaactttgattgtggtagtttcatctcttcaaatggtttagcgggtggcttttgcttgctctggaataagaatgttgggattatcaatacgactaagatggatacggggtttttgtgcacgattaatgatctaatcacgcacagaaagtggcacttatttgctgtgtatggtaccccttacgaagatcacaaatcggaattctgggatcaactggcctctactattaactccttcgtggacccttgggcgcttatgggtgatctaaatgtgcttctcacaaaagacgacaaaacaggggggcgccctttcagattcaatgatggtgatactttgagaaattttctcatttccacaggaggagtggatttg

SEQ ID NO: 185652 - DNA, 3826 bp, Cannabis indica
taatagaaaattttaaaaggcaaaacaaccaatctaaaagctcataaagaccctcaaaaaagaaagtaagaaagattacattttgaaatttatagtcatcaatcatcataactggggtagatctgtaaaattcaataaatatccccgtgagattagattgcctaagcttagctccgtttattacggtgggagaaaatatatataaaaattataaagagaagttagttggcaggtagaacccccttctattatcattcaaaaactcagcaaccaacatttaattttaatcataattaataaaaataatcactcaaaggcaaactacacccgtgactaataacgataaataaaactacaaattcaagcctctttttaattatatgttttactctctcccaaaatcaagctcatatatatactagtgataaaatttataagctatctccttcccaaggtgatatattcaaagaatttggtgccatgggatgggcccatggtgatggaatctcttggtcgagtaggtccccttagaaaaattgagtgtagaaataatgttattttttaaaaattcaatatattctgaaaaagaaaaaggaaaaaaagacgtaaaaaaacattgttatcttttagttttgataaaagagaggtagagagagaaagttttggtcattgaaagaatctgaacgtaaaaagaaaaatgaaagttaacataaaagcctgaaagcacgtgaggaaagctaatctcaatgtttgtttttattattattaattttagtttttttttttaattatttatttatgaatatgggtctcactctttttgtcataacgcaattattcaaaaatgactttattataagttgtgaatgatttcactcctacaacctctgtcactctccttctctttgagagagtattataatttctgccatagttattttccttcttcttcttcctaaatccaaattagaaagaagaaagaagaaacgatgatgtttaatccttatttggtgttttttattcttctgggtttaacccaagtttccatggctaacgtggaagagaacccaaaatcaacttacattatcagaatggccaaataccaaatgccggcggttttcgaacaccatacccgctggtacgactcgtcgctgaaatcggtatctgggtctgccgaaatgctctacacctacaacaatgtcgtccatgggtattccacaaagttaactgctcaagaagtcgaagctctaaaagcccaacccggagttctctccgtttggcctgagctcaaatacgagctccacacgactcggacgccggaatttcttggccttggcaagagcgattcaatatacccagagtccgattcgggtagtgatgtcataattggcgttctagacaccggagtttggccggagagtaagagcttcgacgacaccggtcttggaccagtacccagtggctggaaaggcgcgtgcgaaacgggcaccaatttcagtgcctctaattgtaaccggaaactgatcggagcgagattcttctctaaaggctacgaggccacactgggacccatcgatacatcacgggaatcgaagtctccgagagacgacgatggccacgggacccatacggcgagcacagcagctggttcggtagtggagggagctagtttgttcgggtatgcacagggatcggcgcgtgggatggcgacgcgggctagaattgctgcctacaaggtttgctgggtgggcggatgtttcagctccgatatcttgaaagccatagaccaggcggtggaggacaacgttaatgtcctttctatgtcgcttggtggtggaatgtcagactattacagggacagcgtagcggtcggagctttcgcggcaatggagaagggcattttcgtctcttgctctgccggaaacgctggacccagttcatttagcttatctaaccttgctccgtggatcacaacagttggtgccggcacactagatcgggatttcccagcttacgtcagcctcggcaatggtaaaaacttctctggtgtctcgctctacaaaggaaacactttgcccggaaccctgttgccgtttatttacgcagccaacgctagcaatgctaccaatggaaatttgtgcatgatgggcacattgatacctgagaaagtcgcaggaaaaattgttatctgcgatagaggtgtgaatgcaagggtccagaaaggatctgtagttaaagccgccggtgggttaggaatggtattggcaaacacagccgcaaacggcgaagagctagtagccgatgcgcacctattaccggcaacatcagtgggtcaaaaatccggcgacgacatcaagaagtacttgtcttcagacccaaaaccatcggtaaccattctcttcgaaggaacaaaggtaggagtacagccatcgccggtggttgcggcgttcagttcgagaggtccaaactcaataactccagagatactaaaacctgacatcattgctccaggtgtcaacatcctagcgggttggtcaggtgcattgggtcccacgggtcttcccatcgacgacaggcgcgtgcccttcaacatcatctccggtacttccatgtcctgccctcatgtgagtgggctcgcagctctgctcaaaggggcccaccctgattggagcccagccgcgattagatcggctcttatgaccacagcttacaccgtatacaaaaacggtcgaaacatacttgacatagcaaccggaaagccttctacaccgttcgatcacggtgctggacacgtggatcccatcgcagcacatgatcccggtctagtctacgatctaacggtcgatgattacgtgaacttcctttgtgcattaaattatacagatgatcagatcagtggtctcaccaggaaagaaggaagttgtaaagcaaagaagtacagtgtcactgatttcaattacccatcgttcgctgttaattttcagtctacaggtgggtccaccgtagcaaaatacactcgaacactgaccaatgtgggtccagctggaacatataaggtgtcgttgaagtccgagacccaaatggttaaagtatctgttgtgcccgaaacgttgactttcagtcaacggaacgagaagaagagctatacggtgacgtttaatgctgtgggagcaatgaagcctaactcaaatagctttggtcacattgaatggtcagatgggaagcatacagtggggagtcctattgcatttagctggagctgaaaataactattaataagagttgggacaaatggttttaaacagatactaacgtcacccactcgaagaggggtttgatttgtttgaatcagaatttcaagctctttaaatataatataatatttataaataatataatgtcattgtttttaaggttaattattgtaatattagtgtttttagtattttaatgttggttacctgataaagtttgaaaaatagagacagcacaacaagggaatgggtggtagtgtggggtgttttcttttttcagtgtacaatattgtctggtcaaatttatttgcccaagatttaaactcaagctttataatgatttgctttattgttcctctcatacaactatataatttttagtatcttaaaagatagatcacatatgctgtaaatatgcataaacggtttaatacaatgcaactccggatgacttttatctgctttatatgggattgggaaatcaccgttttagatattaaatcctttgattaaaaaaaaagattaaagcctttgtttttcctttcacgagcatttatgttgcttttcaattt

SEQ ID NO: 185653 - DNA, 5462 bp, Cannabis indica
attaattttggaagagtttttcaaagtttaatatactattttaggcatcggtaaaaaattttgctcacaccaaaaaaccaaccattggcaatactaagaagaattgtcgatggttttgcacattcgattatactatagtcggctgggcaaaccaataaaaatttacgttttacagcgactgcttttttttcgttatgttgtagaatagagaaaaactacaaattttctaccatttttattctatattgcttgtacatttcaaattttttataattttatacaatagcaacaataattaatctaacaatatttgtaatataataaaaatatttgtatcatataaatttatttaactaaattaaaaggtacacgactcgtaagtttaatgaaactaattacttaataaaaaatataaacatgaattgaaatatatattcataattttccttgtcgctctatctctactctcacataatttaaccactaatcacgtaaaacattaatatcatcatttgtgtatgaagtgtcgaacttactgcctgtaaaacaaaagaaagaaattattaagaacaaaacaaaaatggctccgactgtcgagtttagtctagtggtggactgttagggtttatcccctgaaagtaaattttctccttctctttgtttctctcttggatattctctgtttttgggttctctctgtgtggttctgtttagtttgggcggtctggctatggctaggaaggaggtctcggaggtggtcttacaggtggattcagtggataatgaagcaaacagggtccttagcagggatagtgagatggaacttgaaatgcttgaacgggtgcaaagatatgccacctctgcgttagaaaatccttcagggagtttggaaacgattaggtggctggagaatgaagaagtgcccggatggggtaatgggattcttttttgattctgaacatgactgctctttcgtgatggagaaacgtctgtggctggtcaacggggtgctcctcaaccttaaaccatggcctactgagggcgagataagaatcggggagtttgaagtagcaaggttttgggtgcagtttcatggcctccccacgcgatgcctctccgatgacaatgcccccatcgttgctaagaaggtgggtcactttgttcaaactgatggcaaaaccaaattcgagttggtgcgcatgggttttctaaagtgctggatagatgtatgggtcacccacccattcccggcgggattttttttaaaggcagatggcaaggaagattcgtggatccagttcaaatacgaaaagttgccacacctttgtttcaactgtggccggtttgcccattttgacaaagtctgtcaagcgcctctggctatggttgtcccaaagtcggggaaagcagtgaagatgtatggcccgtggataaagtctgcatttggaggtggtaactgcttttccatggccggaagaggagagactctcatcattgaagagtcaagaggctggtcaaagaactctggatcaggcggcaaatggaaacggaaatcccaaaaggatgatggcaagcgtccaatgctcggggataatccggccagaaacattttactgggagaaggtacatcaactgtacaaaagaatgttgaggtggccgctcagaatgacacacgtcatggtactgggaatgttagtgggcgttcatcttgtactatccttgcagcaaatagtaccagcgatgaggtggcaaaggcgggaatcttagctgaacgttcaaatgaacaaaggcctatccctattgggcctaacttcttgaatttacctaggcccgattttgctaatggatcaattgaagaggtcaagatacctgacattgggccgtccatagcacaatctttggagataccacactccaggctttgcaatcacaagtcccacatcacgtttccgagcccattaacctcacttggccagttgatgacctagaaagacaagctctcttcctcaaacttcatggccctgaggtgatagataacgtacaaggcccaacaatctttaatatgtaacccccctgatttgtcagaaatgataatccacctgcttggaacaggaaacgcaaggcccattcatggtatcaacgctccccttccccaccaaaatgcaatattagtgagatttctaaatctgaagagtgtttggtgctgaataaatcgttggaggttgatccacaggcgaaattcgttgctggaagttcgaataccaaagtcgaagactctaaaaagggcaggggcagtaggaaaagcaagcttgtggggggagtaagtggatcaaaaagagcctctggagttaagacgagacgtgctagaaaagttgcagacaaagatggtaactctactgtgggtaatcttgattcgattttggctaattgtattgaagtttctgttgaatatgtgcaaaattttggaattggcgaggaggcggccgcaaccatgcccccacctccccaatgaggtgcctatcctggaattgtccggggcttcgtaggccctcggcagaacgaacccttcgaggtttggttcgtgaggcgaaggcggatgttatatttctctcaaaaacaaaagtagactcggcttttatgactcaattgcttcttcgaatggatttccctcacagttgttgcatctctgcggtgggaagtgcgggtggcttttgtgttgcttggaggaatggtgtgaatttagatgtttcagaggtctttgaagctggttttagagtaacggttcgacctatgtctggctaccctcaacggaatctattctgtgtctatggaactccatatggtgaactgaagaaattgtattgggattggttaactagtaaggttcagatttgtattggcccgtgggcgctgttgggtgatcttaatgttattggtcatgcctcggaaaaagaaggcggaaacccttttcattataaggagggggatttgctcttgagttttcttgctgctacgggtggtgtggatcttgggtttgaagggcctatgtgtacttggcaaaatgcgaggaaggcttcccagcgcattagaaagagactggacagagccattgcaaatggcagttggtgcattgaattccctcatgctaaggtttctcaccaccctattcttggttcagaccattctcctcttgttctcagtctgtcggaaccaaaagctagactcaattatccgtttcgtttcctagaagtgtggacttcatcccatgaatgtggggaagtgatatctgaatcttggagcaagccttgtatcggatcccatggtaatagactcaatttcaaattccaagtcactaaaaaggctcttaagtcttggaaccagaatcgattcggtttcagtgataggaagcttcgaagtttatacagagacctgtccgagattcaaatggcccccatctctcaggattccatcgctactgaggcgaaaattcaacttgagattcttgaacttgagactagaatggagcgggtctggaaacaaaagtctagagaaggctggttgaagtatggtggtggtaatactaagttttttcatgcatctactgtcatacgcagacgccgtaataatatcgataatatagaaagcacccctggctgttggttaaggcagagagagcttattggaaaatacttccaggataatttgaaggaattgtatcactccacggttcctcaaattgatgaagagtttgactccctatttgttgacacggtttcccctgaggaaaatgaggagctctgtcgcgtcctggaaagtgatgaaattcggagaatagtttttgatatgcaccctctaaaggctcctggcccagatggatatccggggatcttctacagaaagtattggaacattatagggctgagtgtttgcaatatggttcgtgagttcttcgacaaaggggtcctccctagtgccataaaccacaccttcatctgtctggttccgaagaatgattgtgccatgaagtttgataattttcgacctataagcttatgcaatttttgctataagattattgcgagaatattaacgaatcgtttgaaaagcattgttgacatattaattgccccgaaccagtcggcctttattccgggacgatggattgcggaatgttccctgcttgctcaggaggtgcttcactctataaagggtaagaaagggcgtggtggcacaatggcggtcaagacagacatgagcaaggcatatgatcgccttgaatggaacttcttgagaaaggttcttattgctaacggctttaatgggaaagctacaaaattgatcatgacgtgtgttataacagttgcttattcggtgcttctcaatggtgcccatttggctcccttcaatcctaatcgtggtctgaggtaaggggatccactatccccctacctcttcattctctgtagtgaagttctctcaaagcttcttttcaaagcagaaatgagtggagagatagcggggatcaagatagcgtgcaatgctactcctctatctcaccttttctatgcggatgatgcgattttcttttgtcggtctactgaaaaagatgcctctactctcgttgggtgtttgcagaagtatgaaaagtggtcgggtcaaaggatcaacaaaggaaaaagcggggttattttttctccaaacaccaagagtacatccaaagatcgtatccttgcggttcttgggatgggaaaactgaagacaaatgaaacttatttgggaaaccccttcttcttcactgcgaagaggaagaaagattttcatttcctgaaacaaaagatatccaagaagctcgaaggttggaaagctaagtgcctttcgatggctgcccgttctactctggtgagtactgtcatacaaagtattcctacctattgtatgtccacattcaaaattcctactacgctttgctccgaattagacaatataatggcaaagttcctttggcatggttgccgagagagcaataggtatttggtcttaaaacgatgggcggatgtctgtaaaccaaaaagttgtggtgggcttggaatcaggagattcagagactttaacttggctttacttgctaaactatattggggtatcattcgtgaagacaacaaactatgggtgtaatcactgttatcgaaatactgtagcactttggacgcttgggaagttgaaaagcgtgggagtgactctatttgttggaaggggctgattaattctcgggagttatgcaccaaaaatgttggatatcttattgctgatggccaaaccaacatatggactagaccttgggtccttgggaagtctatggaagaagctaaggctagtttcagctacagaaggatacacgcatttaatacagtggcggacctgtttcttgataacacgaagagttggaatgagccacttatcac

SEQ ID NO: 185654 - DNA, 3195 bp, Cannabis indica
gagagagagagagagaatgagggaggaggaggagccgtttttccattcctgaatattccgaccgacgagcaccaccagctcaccctctctcctcctctcctcccaccggttcccattccaatcccaggatggaaaccaccatcacagccccaccaccgtcgccgccagaaggtctcgatgtttcgcccatcggatctccccataacctggctgatgacgtacacgaggctctttctgaggacgaactagtagatcataccctcgatcatgatcatcgcctcctcctccaacccaccggtgctcttactgaggatctgaaacgtagaatcattaagcaggtaacctctccttcctttatcattggttttttggaaatgtggaagaaaaaagtttgtttctttatgaagttttttacatgacctaattttatgcattgttgttcttgtttttgctgaatctgatttgtatatatgagttaaatgttaaaccctgtgattttttcaataagttgattaatttgaaaatatatatgagtttaaaatcactctagcaattctaattttccttgggtttttcttcttgtaggtggaatattattttagtgatgggaatttagccaatgacaaacatatgataaatttgattagaaagaacaaagaagggtttggtaagttacatattttcttggtaaattatttgtctttttccatctttaaagaactagctcaatggttgttgttgacattatttattagggaaagaaagaagtttgaggcagtttatgttgatctttgcccctatgagattgtgtaccgaaatatgatttatttgttgtataattataatcatttgagactttgaaatacccatcatattgttaaccttttgtaacaacacaagaatagagaatgctgaaggtgatgagataaagcaggtacttctgacaggtctcattgtccagatgttttcctggtgctaccatatttggctgtgccgagcatctgagactgtgctgaatgactatattcttactgctgactgattccttctctattcatattaatccttatgagattaggatgttttatgctcgcaaacattagtcttatttctacagtatttgtttgtactgccgcgtccatgtgcaatgccatggtttcgggttctaagttgctaatcatatcgacttatcagatgctgttcaagctcacagtgaactaacgatgataatgttgtgcttttaacaatttcaacttgagtttgagctttaggttcgctctgccatttctgagtcatcgatgctaaataattacctcaagtttcagccaagaaattttaagctaaacccttatttacttgataatttctctggttagttcgttgaacatgtaatttgcgactccctggtgcataataatcatcttagcttattaggtcttggccaagaagtttaagggtaaagctaaagtctaaagcatattgcattctcttgctgtaccttacattttgttgcttctaatgttttcagcttgagtttttgttgtgcaattttgatacatgatttagaaaaatacttgagaagttatttgtaccgttctaattattatttttcccaccatttggtctgtatgactggataaaaagaagtgtaagagttcaagaacaataaagccttagctggcaccgtctctgatcccaattgtctatgagatagtcttcatatgtgaattacgtattgtattgtgaagtgtgatatacatttgattaagctgtatgatatcctatttataaacttctggcgtaatcttttctgcagttcctatagcaattattgcttcctttaggaaaatgaaaaagcttatcagagactatgcattaatagcgactgcattgagggaatcaacctctcttgtaaatcttcttattttctctttcaagtgtttagtacttatgaagtcgcttcaagtagtagtaattttcgtacgtcgttcatgtaggttgtcaattcagatggaaagaaggtgaagcgacttcatccttttctacttgctgaaaccaaagattcaaaggtaacttgtggggtacttgatattgattgtgtttgtattaattcttctaaagtttgtcttcatctaatttgtgcaccctagttatatactgttttggtagagaatctacccgaggatcattcagtggagaacatacagcaaatatttggagaggctggaaagtatgctcccttttcacttctcttattgttactttactggcgctttcttctaatcgtgtattaagatcgtatattgccttttctaattctatctttcaggataaagaatatttgtttacgtgatccacatgcaatagaagcttcatctaaaggagacagagccgagaagtttatcagtaataaggtaggaagccaaactaacgtaattataagtgccgtcggttttctatctagtctttctttctgtctgtaacctgtgaaatgatttggttcttccacttggataattatacaattcctacttcattgatttcattaagctcactttatgacatttgacgaatcacacattgaacgttgtattcgagggatataaatgctctgttgttataactaatgtatggtgtttaataatggttgtggacacaagatatgagcatggaagctattgtaggattaaggttctaagctgtaatagaggctgctgtgaaaacttgagactgaattttaaatgttttactgttttattctattgtagctttatgcactcgtggagtacgagactgtggaggctgccgagaaagctgtgagtccttatctgaatttgcatttgattttgttgctaaaagttgagtaattgaaatggaggacaactcactttctgttgaaaattatatcaggtggctactctgaacaatgaacagaattggagaagcggtatgagggtcaagcttctgaagcaagcggtattgttcccttacttattcctcaacttcaatctcagtaataagcggaactgaaccttgtgttgttgtatatatgccttaggcaaagcacggccagcgaaagcaaatgtggaggccggctgattctgagaaaaatcacagtattcaactgcctgatcggaccaaagacgaggggaatcataacaccaccgagcagcatgatgatacacccgatgaaga

SEQ ID NO: 185655 - DNA, 4128 bp, Cannabis indica
aaagcacccacgtaaggtgaccttaaactttaataatggatcggaagtagggaataaaataccttttggcctttgttctttgcttctattctcgttttgttctagtttcaacttcattgcttctccttcgtcttctgagcttaaaaaaccaaacaaaaatggcttccttctttcacagactggctaaagctactccattagcagcatttcatgggcaacgcaagtccaccacaactggtatcccctttggagctcttgctgcactttctggtggactttcttacttgtactactattcctcctcggaattggtaatcatttctttgtgattcctatttttttagggttttattttttttttccttgcttattgcaatgctggttagttttgtatctcaaagggtttgtgattaagatttctcgattgatgcaattttgagtgtttgattgtgatgagaggattctgatttgttgaagatacatcttttggtgttgtaaacgttagtaaagatttttgtgtttgtatgatcggtaatctttatgattaagtttcgtgaattggaataatgaatctgtttgattaataaatataatggagtatgttcagactgttgtgaatttctttatcatttgctgaaatggtgtttaaaaaaaaatggtcgtcaaatgaatggaaggttagtgaaaacttgcagatttaatacattcattcgaaaatttaactgtcttaaatgtttactattcctcattttgtgctctaacaggttcaactagattcaatcaaggaagaaacaggcccaaaagttggtgagtccttttctttgatgacagatgatcatgcgttaaattttggcgtacatgtttaagttgtggcctttctgaactgtttcgtaaagctgaactatcttaaggactttggattaagatttccataacactatcatagcatgtacgctcactgggtgtgtcacctattttcagcattaaatccagatgcgtggattgaattcaagttgcaagacactgctagggttagccacaatactaaattattcaggtaagtgctcacttgtttgaatggaatagaagctgctgaattatctgtgtgacttcagtgtagtgatttcatgtgttgcactgcctgttttcttatttattttaactttttataattgggtaaaaatgttaactctttctttttcccttcacaaaataccagattttcatttgatccctccgccaagttgggtttggatgtcgcttcctgcctccttacgcggtacactgcttttcaaaattagtaaacttggttctcaaatttctttttgcaagcaatcagcttctatttttttcctctttttccttccactttgtttttgaacagtgtttcttgttaactgcagggctccattaggagaagatgctgaagggaaaccaaaatatgtagttcgcccgtaagttcctattcaaatataacatcctcgatttaaagcattttactattttcccaatttttgtcattgtgctgagaaaatcataatagagtaatagttaccagtacttacactgtacaaatataaatgaggccttgcttaactagactatgttattttatgtttagtattttccccctttatgtacatctcgttgatgttcaggtacactcccatatcagatccagattcaaaggggtattttgatttattgattaaggtatgcctatctggagttctacatatcctcaatgtggtgggggtcacatactcctcatattcctgttgttaaggttatttaatgcgtaacttgtggatttcttctattaattgcaggtgtatccagaaggaaaaatgagtcagcattttgcaagcttgaagccaggcgacgtggttgaagtgaaagggtactttatatttttctacaactattatcagaaggggatattcttgtaataatgtatataatcaacatcatgtattatcacaggcctattgaaaagctcagatattctcccaatatgaagaaacacattggaatggtaagggaaggtgtagtagtaatagctataacataaattaagcggaaaaatttagtatctgtatattgattatcccacccccccttagttattattggttttgcatctattctgtagctctcctgccaacaatctgtttcctgttaaagatgtgttcattcttgagtgcttcctaaaataacatgattgataaactttatctaaaataacatgattgtaaccttatctaaaaagcaattggacattttctctcttttgtctagattgctggtggcacaggaattactccaatgcttcaggttattgaggctatcctgaaaaatccggatgacaatacacaggtgagacatgagctgtcttattggcaatttcacaatctcattcttttcccatgtaaatgttaaaagattcagaaccacctcatatagtttgatctagttcaaagataaattggacatttataagtgctgcagtttcacttattgtttcattattaaaatattgtatgtgaagtgaccaagctctctttctctctccttttctccctctctcactctctctggctctcgatttttacttgggtcttacaacaatctgtagcgtctgactcattttgacttaatggttgccttcaattctcccaggtttctcttttgtatgctaacgtctccccagatgacatactgcttaaacagaaacttgacttacttgcagcgagccacccaaacctaaaggtaccctttttattattattattatatagatactacattgctgaacacattgaaaatgatatttgtctcatacaaatttggctttctttacttcgacggcatggaaaaatctcaggtattctatacagttgataatccaacagaaaattggaaagcgggcaaaggttttatctcaaaggagatggttgtaaaaggcttacctggtcctggtgaagattctctcattcttgtaagtgttacttttaaaaggttttatatagactaagtctatcctaatcatacatttattcactataagacggttgttggtttctaaattgtttcccgattcaatgttggtttgattagaattattcattatgtgagatacttggtacttttgtaagtaataagtttacaattgaactggtaattgaatttacaagcaccatgacaagtgagacatttttgaatccctttaccagcaagcattgtctctatagatctggttcatatttaaatttatttcctttcctttccttttgatgaaaccttacatacaggtttgaagataaatataggaaaatacggttacatcatatatgtgacaccttttctacttgtgcaggtatgtggccctcctgggatgatgaagcatgtttctggtggcaaggccaaagactggtcacaaggagaggtagtagccatatttctgtctcttgcggtttgaagataaacctgattttttaacacacaaaagttattactattacactttcatagtttcatgagttcattactcttttcctttttttgcaggtctctggcatacttaaagaacttggttatacagaagaaatggtttacaaattttgagtgacaggagtggattcggcatctaaagcagttagcaattttacttttagattataagaaataaaatgtatttctcaaggaagactagtccttatcaagttatcaacatgagatgggtttatttctcttttttatattattattattttttttaatacaaaaccacttcttgggtgtccattgatgtttgagttttcactttaagaaatttcaagggtcatccgtatctaccataataacatttaattgtatggtgaaatgtattggttttccaataataaaattataggcaaaggtttgaatgttgtgaaacagtagctctgaattcttctaataacttgttctgcagggtgtgagtgagagagatatatgttagaagtctaaagatgtattctttcttgttatggggactcaataatcatgtttgatatgagttcaattttcaataaagcaaattatttttctaataataatttgagatttgtggtaacccaattagttttt

SEQ ID NO: 185656 - DNA, 1336 bp, Cannabis indica
tctccttgtcccatctccagcctttggtctccacgccggccgtacctgagcgcctccccgccctcgaagcacgagcacgcatagatctcgaggcttccaagcgagaagtcggggccccaccagccggcgccaccgtctttctcaaattcgacaccggagatggaggtttccctcctaccacaaccaaatcgacccccaccacaacatcctcttttccttcactttcctcgataccacccacctcgacggcctcaagactattcttaacagagaaacaactagcgtagttcgattggatattgagccaaggtccaaataacgggaacggagttccctgttcattgagtaccgtgaccggagaagaaaggctgcaatcccttctttgatgacccaacaatccacacaagtaacaaaaggttcccaacttttcatatttcagttgtatccatttattttcgccattagcgaccttgaaaaaacacccactgcaaaggggtctgtggacatccacatccacctgaactcggatccatggcttccaggttaccggcctcgattcatccagctcaatgttcaccacagtaccagccaaggctcccaaaacattagcattcacctttgagtagtaatcatttggtaggaaatgtatctggacccgaaatcggatagaagagaaagataactccttggctccaaaacctgaagaccacgagaggagcaccaacatatcacctttgatacaccacgagccattctccaggacctgtttactaaccactccggaatcgaaaataaatcgaaaggtgttagtaccagccaaagcaaactccgttggttccactctaatccgagctttccacaggttggagcaagtttgattcacatcttttggagtaaaagttcttgacgacacaattataccaaaaaggcacactttggagaggattttagtagaaaccatagagggggcaagagaaatggaaacttcatttaaggagaggcacctacccctcttaccaacacccaaaccaaccacctcccccattttcataaatacaagctctgaccaacacgaacgccaactcgcccagggacacacctacctacccaccccaaaaaaataaaagaaaacacacaccaacaaacagagatacaaaagccccacacaggaaaaatagccccaaacaaccaaaagtcaacactcaggaggggccaggccaagggaaataaagatcgaattaagaacaaaagtcaacccaggagaaaacagaaggcaaaaaagcagggaaagaatggaaagacgccaaaaggtggagagaatagtagaagaccattc

SEQ ID NO: 185657 - DNA, 2065 bp, Cannabis indica
taatttacacacgcttcgcttataaataaatgatgatgttaacaattgggtatatgtaaattgaaattctagtcatttaaaggcaggatctaactgtcctttccttgtagggattgttgggaaatcatgcttaacgaattggtttattttttatgcttaacgaattgttaaaaatttcacaaaaattggtagaacatccaaagtaactaattaactacgatgtgcaacatcatattatatatttagattataatttctccaaaattaaaatatggtaggagctaaagacatgtttccatcatataaactcctatatagttatataaaaagttctctctctcctattttgtttcttcattgccaaaaacacccttacctaattgatgatttacccaaataatcggttacacattgagtatttaagagagaaaggcaatggaaagagaggtatgagaaagaagagccattaaaattaaagagatatatataggatagtaatagttggttttggtttccccttgaaaagagcaacaaaagttgcatatgagagtctgagattagtaagctattaacttgactttttgaccatgcacatctctccagatgtcatggttcgtagatgttgtaggacacgaacggtcagacctagtctctttctaaatcacaatcagaatcacagaacacatatcccttactatacccacaaatccaccctttggaaaagaaaactctttccttttgagttgacttgtgacaaattttccattctttttctgtcaaactctttctaagccggcaggcattctgtttctttcataatgctgtattattattattattattaatcaattaattaattatagagttaagaagtaggtttttcttttattaatgttaatgtgcgtggtgatgtgattatagaaaaagactcttttaaagtaattggagaagaagataatgagagcccctcaataccgaaacttgtcaccaaaatgatgaaacggttttccatgttgagaaagccattgtttggtacaattgctcttttgggttacttcagaaaatcatcaaacaaatccacaacaacgaaagaaagtggcaaagagaaatgatcatcatcatcatcatcattatcaaactaacacattttgctcatctgggcactgatcaatattggtcatgatcatcatcttggcatcgtgaacaacaacagaaaaaggagaaaaaaaaacaaaaaacgacatccaaaaatgagcagagaaagcagtagtaatagcagtagcatgataaaggcatgggaggcaacggtgcggaggacacaggcagcgaagaagcgcgcgaatagcatattcggaacatcaatcatagctcacgtggacgccgaaaatgaagaggaagaggaaaacgacagtgggatgagtgtggttggagatatgtaccacgcagacaaagtccttcctaatggggactactacacagggcaatggtctgataactttcctcacggacaaggcaagtatctatggaccgatgggtgcatgtacgtggagagtggttcaggggcaaaactatgggtcgaggacgattcagttggccgtctggggccacctacgaaggcgagttcaaaagcgggtacatggatgggaccggtacttatactggccccaatggagatacttataagggacaatggatcatgaacttgaaacatggtcatggtgtcaagaactattttactggtgatttatatgagggtgaatggcgtcgaggcttgcaagtaagataacatttgtatatattgtatatacttacatacacataaccttcccttgtttaatttctctgaacgttatatccattgttgatcaactgttattcatatacatatactaaccattgatcaaaatgtatgtggatgaatgaggattagcattaccttcgtataaatttatataatagagttactaaattttcaatcttcctttacttttcattactggttactagatttcactgcattttccatcagaagctattatggttgcaaaagaaaaatagaacaaaa

SEQ ID NO: 185658 - DNA, 2415 bp, Cannabis indica
ggaagtagacccaagaagaaaatttaccacagagtccatgaattggacaaagctatggacttgcagaagaagccatctttaatcttaaggctgaaatccattatccaatctcaaaaacagcagtgtctgcttctccgtaaccttgaaaaagaagttgggtttgtccaaaaatggaactttatgtctgttattgagaaatacccttcaatattttatgttggtggtggtaatcaaacacccccatttgttagtttgactgagaaagctgaaagaattgctagtgaagaagctaaagcaagggagttaatggaacccattttggttaagaacttgaggaagttgttgatgttgtcagttgattgtagagtaccactagaaaaggttaaacttattgaatcagagttgtgtttgcctgatgattttgacaagtcattgattccaaagtacccagaattcttttcagtcaaggatttcaatggaaaagcttatcttcatttggagaattgggactcttcattagcagtcactgcaagagaggaaagattttcaagtcaaggaattctggtctcttctggtgtgtatccaaggaaggttagaatatcaaaagatggtaattttgttggtcaatatgcatttaaaataaatttcccagctggttttagacccaacacaagttaccttgagcaatttgagaagtggcagaaaatggagttcccatctccttatctaaacgctaggagatttgaaattgctgatccaaaagcaaggaagagagtggtgggtgtgcttcatgagctcctaagtttgactgtggagaagagattgacatctgctcaattggatgcattccattcagagtacttattaccatctaagttactcctttgtttgataaaacatcatggtatcttttacatcactaataaaggtgcaaggagtactgtgtttcttaaagaagcttatgatgggtcaaatctgattgagaaatgccccattttgatgcattatgataaatttttaacactttgtggtagaactggtgggatcagctcatcaaaagacatggcttctacacagcatggttactaaaaaaaacttatcttttgggtagttttttgacatcatctttcaaaagggtgagattttgagaccatcccttagaacatgaaatgaatttggttcaagaagacagagaagaagcccactttaaaattgttgagaaccagaaatattccttggataggaacacagagaagaaatgttttgaagtggcaaaaaaaggaggacagcaatgatttcaactgtatttgacacttccaattacacatgggtcaaaactaatagggtcttggcccaatcaacttttatgtaggtattcccaggcccaatctgtttctgtttgaaggcctgaaattcattcaaattggtttttgcacaaactaaagaattattgtttaaatcacatacaatttagcaggcagttattaatatctgcaagtttaatgacattgaccttgtttatgtgaaaatataaatgttaagttcattacattgcttctttatgatgatactaatctctcttttttctccttattatgttgaggtctcacttgttatttgattgtaaagaaccagtaattccatcctctgcacaaaggtaagaacttcacttgaatagctactcttatttttctttcaaaaagtaaaaattccttttctgatttacataaacttaataagctaattttattatatgttaagagaagtgggatttacactaatataaatataagttaagtattagcatgaggacccttttgatttgtttttctcaattttcatgatttaaagctaatcttccaatatggtgcactaatgaaatctgatatattatccttaaactcatgattttgagcagtgataaattagataatagatatggtatagctattggacagtggactatattggtagggtttcaaaagggttaaaaaggaatagaaaattagttaggaatcacaagttgggaaagaaaaaaaaagttgacacccacttattatagtgcacatttaagaggcatgaagcatcatcaaaactcaaaaaacaaactcagatttcattggctcacataattatggcaaattaggtgtttttggatgactttttcatgaggtgggttatcttagtagtatcctataatagactttaattacttataataatatatgatttaaaccaaatcccagctgtatatgattgatattagtcatgtcacattgtatatataattacttactattctattctccctttatatcccaaatctaactttaattatacaaacatgaataaagtgaagaacagaagcagaaaataagttttgtgtttctttctttattattctcttttaacata

SEQ ID NO: 185659 - DNA, 664 bp, Cannabis indica
atatttttgaaaattctcttaagaattttaacattaaatgagtttcaaattaaaatttactaaattaattatctatcacttaaagcagtttgattaaatttaacataagtattatatattttaatttattagacatgaatgagtatattttaagatgtttgtttgtttgtggcagagtatactcacacactgaaagtagatgaaaagagtgatgtgtatagttttggtgtagtgctattggagcttgtgacagggaagaaaccagttggagatgagttgtttgaggttgggatgaacattgttggttgggtaagggaaatcgtatcagatcattctcaacaacactctgattattatgaaagagtagtacttgcaataatggatcctcttcttcttaatggagattatccaatagcaagtgtcatacatatatttagagttgcaataatatgtgttagtgatgatgcttcaactaggcctacaatgagggaagtggtttatatgcttacaaatattgcttccttctctacctcccaaaataccacccattagtgttaattattggagaatcaatgtcaatttgtactacatttttcttttttataagatgatacatatataatagggataattatactatatatactaaaattttttatttttt

SEQ ID NO: 185660 - DNA, 5798 bp, Cannabis indica
aaacccaatgacttgatcctaaagagaattataatttttcttttctttttgctagcttgaaataattcaatatgatgaatttgttctgaagatttaaacaatttatttagatcccttttaatgaatagtatttttttcatggaaataaacaagtttcagaaaagacaattgtctttttaaatccaaagaagaaaaaaagacagtttacttgatgagaaagcaataattcatatacagtataaaagggccattagtcacctttttttttgtggtgagcagcatagctatctatgccaatgcttgagccattagagaacgatgagatagttgttgctcgtacagctcacggaagatgcggtatttcacttcgtggtacttcttcaccttaggatctttagatggatgaattacctacaaaacgattgttgtctaaattagtggacacaaaacagaacaagtgtggtgtcgaaatcatttagttttctttttattaaatatcaaaggttctgtgatttgttatgaacttatgatgcatacttgaccagctgcatttagagccttcatagcgtcatgcacgctggaatatttttttgcagcaacagaaccgagaatggcagcacccaaaagcacagactcgctttctcgtggcaaaacaattgggcagcctgtaaagaacaattagtgtagagatgttggatggcggacacagcaacaatataggaatgagaaaataacacagaaatgagaaaataagtaaataaattagcaagaaggctgcaagagctgatttctgttaacatacttttaacttttgttccttaaatagtcattgcatcgtaaccttatccgattcacaaggaaaacttacaatgcaaatgaaattgggcctaaaatggaatgtaaataaatataaaaggacaccactaatgaagaaataattgatttattgagcattaaagtatagcaggaaagacaagaaattggaatgaacaaatggagggagggagacaaaataccaattatatctgcattttcttgaatgaataatgagttcttggcaagaccaccacaagcaagtattgtgtcaatctgaaagaataaacaataaggaaattgatcaaaatgatgcaacgcaaaccgtagcaaaggattataatacatgattatcttgtaactttaaataaagattgtatcgttttataaagatttttaataatagaagtagacatattttacacggtagagttaaaccaaaatgaaggtgttaaaatgtgtccagattgatatcattaccttgtgaccatgggcattgcagtgctccacaatgtgacgtgtaccatatgcaataccctgaacagtagcaaggtacataagagccaacttcttctcgcttgtgtcaagagttaaaccactgatcattccctttgctttggggtctgcaatgggagacctgaggcatcataaactaagcagcttagatttgaaaaagatacttacatgaagccccaagaaatgaggttaatactataaaatgattcacctgtttccgtggaaatcaggaagcacgtgtatatcttcagtcaaagaagcaataaatggtagctccagttcagtcattgttgattccaatctcttatttagaagttcatagatagatatacctgaaaaatgagaaacaaatcaacttacttgttaaagaaatgcaccgtatctaattaatgtaacatttcactaaaaactaacttgagcaaaagatcttactttgtgaagcagcgcgattagcaaggtgggagaagcagcatggttttcgattatgtgatccaacaatgcaccagtagcactttggccaccttctgtaagccaatattcaggtaccatagctgaacatgtgcaagaaaagaacagaaaaagtgttaagagctatttactgatgaattatccctctggtcaatatgtcctgttaaaaatggaagaacatcctttaataaggtagcattcacaggaaccatgaacctttgaccaaaaactggctccaattattcttccctatataattgtaccaactttctgaatttcaagagtggtacctgaccagaatggtccccagacccctggaatgaatagcttgctccgagacacagccatatggcaagtagaggttccacatactaacaccatacggcggcatagagcttccacatcatcccctaaacaaaatggatttactttaataatgaccaaaaaaaagatttgcatattataaaaatatacattaacacatatacatatatggacaagtctagtaacctttaacttcagaatctgacataggcacactttccataactcctactccaccagcatgcgcatcaatcaatgaagtcccaacaggtattcctgctactaaacctagttcctgaaattcaaattacttttcttaggaattataactatatttgccatatgcaatagtttatcatgtcaagacacccttttaaagcccaccaagaaagaacaaaatcctaatttttcaactaaataaagtttttgctttgttaatggacctcaagggagcgccagtggaaatcaattggaaatcttcagtacaaaatttcttgcctgcgctgcagctggagtaagaccggaacccaatggatggccaggaaaggctacactacgtcctgttggcaatggacattgtcaagaaaccatcaggagccaaaattagcaaactttagcaaaataaattttactaggtaccaagaaagttgatgatgttcaaaacaaagttaaaagagaaactaacaaaataaggcaaatatttccaaattcactcaagtttttcagttctaatttctaacaatcaaattatggactgagttttattcagaaaaaaaaaaagataattatggaatgggtaggtacttagtatttcataatatcttgagaaattataacataccaatcttagcatgatgtccatctacaagatcacctaatccaatctcttcccaaaagtcatcatcccatccacaagcttccatatctcttgagtccttctcattgtttttttgcatatgcgcatgaccaagatatgtccatttgcacactgtggtacagagactcctggtatcatctcctgttgccctataaaagttgatattatcagaaatttatgccatttttagtcaaatttacttgtacatattcctacttgaagaaaagtcgcaaataattaaagagaacaccaaatgaaatcacctgtatgacaaccaatcactcaagtccatccatctgaacaccattgaccaagattcttgcaaattctctttcacccatagaagctgcaatagaagagtaaattggtcttttaaaagaattaatcgaacaattgcaaactcttaagaaaataagcgagaaaggagcaaaataataatagtaaataaaaatatattgaaaaaataataaattgtgaaagctagcatgttaaataatttcataaggtagactatgatctttttgtacaaacttccaaactatactaactagccaaagagaattcggaaacagaaaagataagccttcaaagaaaatgcagatatttaatatgccattataatgttctggcacaaaccatgtaactggattaggtatggtagtacctttggtggctgcatttcaggggaaaggcccccgccacaatactgcaatacaggtgaattacgcgagttaattctctgagcttgttctacagctctatgatccatccaaactacaatgtttctcctagagtccccactccaagataccgtaacaggagagccatcggaatccacagcaactgtaaggagataacattctttagctttgtatataaatcaacaatttccttcccccttaatctcgatagcctaaacaaccttacttgtcaaagtttcttcataaaaaagtatggtgaaaaatttacataccaagggaacaagtagccgcaaatccaataccctttacttcttcccccgcaacatctgcaatagagcatgctgctttaacagcagcacagactgcatgccagatatctgtagaagattgctgttttataaagtgtcagtaatatttcagttcagtaaatcactttcccatatagtttaaacaaatcagttcaccgacaacttgtagttagagtaatcagccccatgattcaatcccacagggctaaaggttcaatatctaatgtaattgacaggaatttactgctgcccatcgaactagaacagaatgataccagaaaataaaccaaacagggaagagaaagtagctagaaactaatgggcagatctgatactagataacaggtgaataaaatgacaaagagaacaatagaacaatagaatagaacctgaggtattcgagagacctgaactctcccaatagccaaagctcaatcccatacaatttccatacctcacccattcatccccatttccttatacatattgcccaattcatacaactacctttcattacaattactcctttacccattttacatattatcctaaggcctaacagtgatccaacccaacaatttgctaatttttaagttaagtacgttctaagaaggaatcaaatcattcaacctacactacatgttacaatcttcctcataaggatcaatatataaagaaaacaacaactagaaatgaagtttcgtttattcaatctatcattacctcaatacaatcaccttctttccatatctgaattggactgctagacgaaccaagcagcttcccattttcatcaaacaaacctgtacaaacacgtccattgtacaattcaaatcaaacaacacgaatcagaatcgccaaaaaaataataaaaagcacaaattcaaagtcgatacctgcgcgagcgctgccagtgccgacatcgacaccaagaaaaacattacggtcgtggacggcaatggcggtggtggaagccatctcgaggtagatagaggcggtggagagagaatggtgagactttgactttgattttgattttgattttgaagaattttgaggcaataacggcaccgtatcggaccacccctttctattactacctgacatttttattttcttttttcgattagatctccgattttaattttattttttattttttattttttattttatttgggtttatattttgatttgatttagttaatttataattattggttaatccggttttttcgaatttatatatccttgttgttgttgttgtctcattaaaattatcgaagaaagtctaaatttaataaaattaaatttatgtgataaattgctacaaaaaaaaatgtatgtgataaatataaaatatatttatttttgtggtatcgtgtagtccttctatgttggattttctggataagttggaaataaaaaattgttgtaatgaattggaatatttatttgggatttttacactacatatggaaatttttaactttttttagaagtaatttttttaaaaaaaatactgtgtaatttttatactgtatattatgttaagttttcactgttgttccacggttggttttaattgtttcactgttgttttaattttctgtttggttgttttacggttgttttatgattgttttataaaaaaaagagtatttttgtaaaaaattctgtgtagtagtaaaattataaatttttgtctaaaattcaatacttttttgtaaaaacccctattgttttataaaattgtgtttattcattgcattaattatcgtttaatgttat

SEQ ID NO: 185661 - DNA, 1252 bp, Cannabis indica
aaatataaatatacttaccaaacggcgatagaatccaaagcaagctgagggttatctagtaagccagtgatgagaaccaaaacctgaaaataccatgtctccaaacaaagcatcaccgccgaagcacctgacaacttgaaaaactcccacagcccagaaaacgcctctacactaaacccattccacgtcatcttacatttatcgcttactaaaatgtaaccgaattgggccccaacgatgatccaccacgacaacgacaaaaccagagaaattccaataagcccaaagcccaattcaaaggccacggcccaacaagccaccaagtggaaaatcaacgtgatcgccgatatatacgcgctcggagtgacgatgctctgagattggagaaacttctgtatcggaaagttgactgcgtaagcgaagatttgtggtattaatccgtaaacgaagagagccgcggcggaagccaactcaagcggctccccaagccaaagcaagagcggctttgataaaacgtaaacgatagttaagggaagaccagttatggtgagaactacagtggctctttgtagatatatcccaagcatatcgtatcttttggccccatatgcttgaccgcataacgtttccaccgcgcttcccatccctaactgtaaatattaattaataataataaaattaatattttttataaataaatataattaatattttttttaaatatatgtatatatatatatatataccatgaggccataggcgaagagttggatgccgctgttgccgagggaggaggcggcgagctcgaggttaccgaggtggccggcgtaaatccgagtggagagtgacatggaattattgattaaatagacgaagattgcgggagcagctaagcggaagaggagtttgaattcgatacaggaggcttgccagagacgattggtgagaggcagttcggtgtctgaaagtattttctcgagacgagaatccggcgagtgtgctgatggtgtaatatgatcagctttgttctatggaacttattagcaaaggagaagtattagtatcgtcatggttttctactgctaattcctcttgattctgatgatgagaacccataatgttgttaatttgggtcgcagaagtggccacagatacaatagaaataaaagaatgaaattaggtgtttttgaagtattatatatatattaatatttataaagagagagagagagagagagagagagagagagag

SEQ ID NO: 185662 - DNA, 4477 bp, Cannabis indica
acgtcgaatgtcagattcacaaatgctccgagcccacagttttctaacatcataacatgtttcaatgacaaattaagagcaaactttaccgtgggcgaaatcagagaggaagcttatccaatggtttaagagctgcaacaccactccgttcgggtcttgtgtacttctcgtaaatgacctgtaactgtccaagtctagcagctttttgaaattgtaacaacatctccgaacactctctgcaattattaaaatgcctcgagtcaattttgaaatgaagttgacacttgcagaaccaaataaattgataagacaaataccttaattgtgacacttcgtagtgtgcatgttggcaaagtaatggagtccaatgaggagccatttttaaggtacatcgtgcaacatagatagccgatgcacacagcagtgagggcttgaacattaaagcttcatattcaaccaaacacaattcaatgaggtagaaagccaagtgttcaagctggtagacaaccacaaaacacgatgttagtatttgaagtatctgatccactcctatttttattatatggaaagagttacataaatagaagatgattattagtcatcatcagtattatagcctggtcaatttacaagaaactctgtcacaatgactatagccataacatgtaacatacctaacatttaacaattaagtataataaaaatatcagaagaaaagtttgttatataatgtactttctagtttatgtcagaagctattacataccttcgcatcagactgtgcagccttgagaaaccttagcatgaagacatacggagttggtgtatttaagcgaaactttaatttcttaagaataagcttctcctgagaacaggggaaacaaattactaggaagttactacatttcatttcatttgataaataatctatgattagaacacaatctaataatgaactatctcgtcaaaaacccaaaagcatcatatgaaaaggaattctctacttgacatctagcgacaagaggattttcggtttcattagctttttcaatcaacaaatgtctagtttcattctataagcagctaaaagatgaacagtacaaaattacaaaaaacgtgcataataaatagttcaaaacatagattttcaacaaaaatttcaatcaacatgataatgcataccattccaagcatctgctcccttgtgtatgattcagctgatatgctaagcaagtcttttaccttaatgaaatgaaaaatagaaaaatcagaaaaatggatttctagaaaagataaatgtcaagattagtgtgagaactagataaaaatatgtacccttggaatccattgccatgagtcctcatactttgatgcaagtagaagtgctgtaaggccaaccaactgcatttcattcttctttattgccacttgagaaagataacgatctaacaacgtaatcgtgagataaagtgtttcttgcattaaatcaaatttaaggtgtacctgttatcataaaaacaattttgaaaagtactgagtaactgaaccagataacaaagaccaggggaaaagagaaacatccataaagttaaaataattacttcaattaaccaattgatcaatacagcccgcatatgaggtgtaatttctatttgaattgacatgtaatttgctgggggtggattttgcgcctgcaaaaaaatatttttagtcagtgaataaatcaaatataaacaaatggaactaactaattattcagctaaaatatagcccgcgtactcaaataaataccaacagcaacttgcaacagattataaacaatacaacattgcttctggttgcctatcacaaatggtgagagagcgagaagaaaagcttcagaagaaacatgatatactaaagcaaaaataacttgagatttaataggaggctatgtcaattaatcatataaatccacttgcaatgcaatatttctaatccagaagtcaagattcacagctaagtagcatattcattattgctttggttacttttttttaaggatttctgttcttgtgaaaatgctaaaaaaaatagccttaaaggtacatttacagtgattgacaagtggttggatacctagatcttgtgaactctcaaaataatgataataaatttcaccgtcaataatgtagctaaacatagaaatgctcatttctttcaaaaaaggaagagttaaactctcatctacagctaaaggaaacgaaatggtagaaaaatttaggttacaacgacattgtagataatacataagcacatacacaaaaaagaaaaagaataggaaaaaagggttccagaaaagtgagataaaatccatcacctcaataacccaataatactgatatatgtcatcaacatagtctgcaacttctagctgatttctctcatcatctaggtctggtagcctttcttgcttaagaacatcatgttgctcttctattagctgattgcagttcaaacttaaacatgttatttgaaatgatgaaaagaaaataaataaaaaaagccaatataaagcaataatctcaacctttgatccttccattaacgaagatgtgtaggattttcttcgacgtggaactttctttgtatagtaacatctgatgtacttggtttgctatcgacatcagatggaagctgtacatgggtgggttcttgtgttatattttttgaaggagaagaagctacactctccatgttctttgatgcagctgtagcgatagttacaactttttctagattccttgtgatgttgggtcttgtattccttttgtcatcagaagtctttagagcacccttcacacttggctggatcataacagtgaagcaattgatatggttaaacatacttgtaacgaatcactctttcccaaaatgatactctaacttgacacttaagagccgcaacacagaaaaaagtttaagataatacaggacccaaatttaaattgatttatttattagaagcatgctcaaatcaactaatatacagtctacaagacagctaactggaaagggaaagcagcctagtccctatgagcatagcaatggggagtttatgtagcaacagcaatgagcattctgttgcaatttgaagtagcccatccatttacacaataaacatgttaagccatgaatttataataataataataataatatcaagatatgctgcaagtatcaaaataagaaaagaaacttatccatttgtgaaatgaacaacttattctataactagatactaatattgttctcttttaacaataattggtgatctgcaaacatttgagaaagcagctccacaagtcaaacgaaacaatgtagacaaagtgactaaaaaacacattgattggagttagtttgtcgtccaatttaaaaactgcaaaatctacacaaactggaacacaaaaggatagatggtaattgagaagaaaagatatataaactgtaaaaagaacccataccctaatagattttcttgacaatgtacgagaatccacagtactttgacccctgtgatcataaataataatcacactatttagatataacattcatgattgcatggttcctgataatacattttagagttgataaatttgatataataaatagatgacctcttacagacttccttaataatccattcaagaatttgctacaacgagatagatctctagtatacattgttaaaaattactcagcacaaaactttgctgcattaagcggcaaccaaataatcttttagatgaaaaagtcattaatacttacattattacaaagttgtcactcactcgattcttccaatgatgggtccttccattgcttactcggggcactactttcccaccaactttgaccttaactgaaaccaacaataaattcaaaatttcatcatggaaaggtctatcctaagcaatacacttgtgagaatcttccaaagcacaatgcatattggtttataatcaagacactcactttcgtttatttttccagaacttccaggatttccctacaaaaggatgaagataaaatataaaagttctgaagaaaaaatcaagcaggctcgacaatttcaacagatgattacaaaagataatggaaaaaaaatattttaatctatgatgtaatgtgagaataaccttgaggatatttgttgggtcctccctctttaaaacaggaaaagacttccttcaagaaaaaaattcacggcaacgaagtacatgaataactgatgtatattttattcaatcttcccccctaataataataataatataaaatcaaattgcaaaccttgttggtatgagtgaagtccttgttgttctcctgaaacattaaacataatccgttaacatgtttgaactgcccaaatattcttacatactagtctttgatttgaggaaactttaacagacctgccatttaaatcaacaag

SEQ ID NO: 185663 - DNA, 4148 bp, Cannabis indica
tatgtgatctgattattgttttctcgtctatgcagccttaaaagcttgtttgatagccctcagttcagggagaacataacatcctttcagcaactgcttgcagaaggggtctttgatatgtccttctctggggcaaaacccgaagattgtaaagttttgaaaaagcttgtgttaactaatttgtcaaagtctaaatgggttgaacacttgcagctgcttaaggtttgcagttcatttgaatccttgttatctcaaataacaatcgatatggaaaacgaacctataattaattatcactcattagcatctgtctctttcttggcagaatcctaaaaatagctctagagggtcttcttctatatctggacccaatgttgcagcatcaactaataagagaccacaagacaaccaaaataaaaaatttccaggtgaggctaaaaataatttcttgtggtatattgtttgcttaatgacacaagttattcgttgttctataacacaaaccgccttggttatctccaattgcatgtttgaagggaaaccaaagagaagcaaacaaattggaagtaattgaatacatctaagtagaaatttgaatattattttatttaacaatagaaaaatggagtatgtgcaaatccttttgacatgcaaatttcaatcaacacttacaaatgggaagatatatttaggaatttcatatcattcacaccctttgatcctatccaattttgacaatgttatagaataaacaaatggaaatttgttagtgttttttagaactaaaatgcatgtatggtattctaagcatatctttaatctttcagaagtaaagatagtgatgaagagccccaaaagggtgataatgaagggtggctatgataagaaagaagtcatcgacaacaatgacggctcttgctttagcccaagaagcttatttgctgcatcacccgatggtggctcgttcttgcttgactcaatcaattttgttgaagaaagttctgatcaggacttgctgctggatgtgccatccaatggctcttttgcgcaagcagaacttcttctcccaacaataagttttggttcccaacaagcaagcactagtagtagctccatttccccacatcaccatgcccatccctgagaagaccatcatcgaatgcagcattgatccgtagaagaactatataggtatgccttatgccaggaacatcatgactgcgtttcgcctattttgtttggtagacacagaaaaacataaaaaaacgaaaagaaaaagtctgaatgaggtttgatggttgctcttcttttcccttgacctttttgaacttggaattcaaggggatgaatttgggtgggttttgttgtataggttgacaacaggttgtaatatatagttcataatgcacaagtggtaaattttaggtttttgtatgaaatggcatactcttagtcttgtcaagaaaggggggctttgttttcatgttccttaacattgtttataaaatagatgggggacaaaactaggcaaattactttgtgggggagaaaaaaggaagtgcccctctctaggaacaaagagagaatattatttggtttgtaaggtaggctccttgttgaatggtttgatcaatgcatcggtttgtaatggtgaaatgaattagtattagttccaattaatagaaaattttaagttatagtttactaaaaaattgatttaatataaaccatagatgttcatacaaccttatgagatgccttgttcaataagtaaacctttaatggatagcaagtgaagagagattatgaataaagatgcacttaaactataggcttctttaaacaatataaaggttgcctttgatatctatttcaaataccttaggtgatccaaatagtagaagggaagttatacaatttaatatagaattctacatattttaattcttcaataagaatatgatttggggtggcaaaacgcttcttgtgttcgtgtcatattttatgtgacttgcttttatattttgtgtcaagtgtgtcgatctgttttttgactagtgtctaattctctcaattctaacttggcccgtaaaaatcgtgtgtcgactcactgtgacttgtttcgctattattgaagctggagttgtagagaaaaatgatagatttaggttctattagaaaatttatgtatatatagtttgttatatataataataattaatttttaattttatgttaaaaaagttaaatttaaaattttaacttaattttgaatcactaaatatatattttactataattatattattattaataatttttattttattatatttaaataaatcgtgtcaaattcgtgttaagtgagttatgtcgtatttgacctgtttttatttcatgtcaaatcgtgtcgactagcgtttaattttcttgaccttaacccgtaaaattcgtatcgtgttcgtgtgccgtgctgaaacccgttttgctactcttaaatatgatttgagtgttgggcatcataaattatcccttggcaattctcggttgtataatagctaatgtgttttcactttaaactaaaatgattaaagactaacaatgcataataaatctatactattccatagagtgaacatgaccaataacaggatgagggcaacacatgatgagtaacactaggaaaatacctaaagaaaatgcttgtcttgacagagaaagctttaactaaagtgaatgatccttgtccacatacttttataccaagtctaatgtaacacttttttgttgaagcaaacatgcacacacacaccttcaatagtgcaataataggagaatcacaataatgacttccaaaaccttaatgtatcatcattttgcccccttttttgttgaaagtagaatttgttatcacaattatgttttttcccctttctcccttcaatacttaaatggcaaaaatctcttttgaagacaccattacaaaactaaaagaaacttattgttttggggtgtccacaattagttaagagcatcgttttaagataccttataatatgtaaccttctaatatattaacatattgttattaatacaatttatttgtgagttctatgtatttcaatttgaaattaatgcaaatataaatgtgtggaactatagatatgttgaactcttgagcatttatcattagttaattgaaggtgaactattttctcaaaaaattctattcaatatataaacaaaataatatatgttggaaaatatggtgatgaatgaaaacatatcataaacaaataggattctcttcctttttcttgcaccgcaattatgatcattgtagagttttgtttttttaatttttttataaaaaaaaatccctaaactataaaaattgttacaaatgtcatcttccaattacattgtttatatttcaaataataatattataaacgttaatttattgcagttcaaaaattcaaataaaacaaatacttaaataaatagcaatttaacataatatggcatgccaactttgtaaaatgtttacttactaactagtacatgtgctttaattcttaacataatttttgttgaaaggaaacagagaaattccattaaaaggtaccaagcctaaaaagatttgagatacaaaagataagtaaatttagacagttaaattcataagtaagtctaatcaccacacacgggtctcatctaaatctagagctcatttaggtaaacaatgaacaacatgatttttagaccgattacaaagtcaggaatatgctattaaaagatttccaaacataattaatattattaacgacaataccaaactcattgagaaaaggagtcctgttattgacagcaaaaattacccgctgacaatcagagaatacaataaccgacgtatgtacatgtgcaggtaacaagaaaacccatgaagcaattgaatatttaattcttaacataattaagagtacatttgcttggaaataatgaaaccaacgaacataaattgaatattgtgtaattgaaaaatttgataagaaatagaaattgaatattatgtcatttttgtttggttctttagtgtgtgattgtatatttctgttagtttctttaaattctatcatttttttttt

SEQ ID NO: 185664 - DNA, 2072 bp, Cannabis indica
caattgtgaattttagtagtattcatcatctaacaaatgcccacactcgttaaaaataagcctaaaacttccctcaatacacagtcaaacatgattaaatttacaatcatcatctttgatacttgaccttttaataaaaaaagaacatatcatgtggtcaatcaattgttcggtttggtgtagttaaacatatcaagaaaaaagaaattatatcaattatcattttattattgaaaaagtttattaaacatatcttatcaattatcattatgtttcaatggaatttcatctggggaagcatccatggcggcattggagtggtgttgttggaggaaggctgctcatgagattgtctttcattattttcttctgtaagtactctttcctggaaagtctcactgcaccatttatatattcatgtacaatatatatccaatgcctgtattagttttagctcaagctaaccaaagttaataaaaatttaagtaaacatgttgtgttagtttggaggcttttcctgcctcaagggtgttttttttctcaataggaaatcattattgggcactagagattatatttcagtatacttttaaaatcttccaatcaagattatatctttatctatatataaatacttatggtattgagaaatagtacccaatagtcaaagaaggaagtgagcttggtcttggaggtggagccagaagcaataaagtggaggagtttggagagttattggcttgctgatccaagtttctgctctcaactaatatcttcccgtcctccttaatctgttaaatgcagatatttttagtgagatgttaaaatacaacaaatgatttacacaataaggccccaaatactaaaaattaagcacatattcttacaacaaaaatgatataatacctgatttgttatccagttgttgcgatcttgtattgcctttgcctgtcagaagtttacaatgtgagctcatcacttacttaatatccccacttttagccatttatttatacacaatcaatttcaaagtgaaaactaaaaagaaggggtcgttttattattcatgatgttttacaaatatttgttgaaggatccaacaaaggtgtgagtgtttttatacttctcattattgcatatactaggagttttttggtaacactacttttgtattgaaactcaaattaatgatgaaattctatttacttttaaaaaactcatgaaagctacccctcaatggctcttttttttattatttttttttttttgttgagaatcatataccaatctaaaccgtaaacccaatttctaaactctattacaaagaaaatcaaaccaatctctatcttctacctttatgctttttaagcttaacacaaaaatctgcatttaacatcagaaataattttctgaaaagtatgagcaagttgccacacttgagaccaaaaaatatcattcttcaccctccacaaatgataaactatagctgccaaaacagcattaaaatgacttatctctttggctttacgaatccaacaaataaaatcattcaatgtatatcactataaacaactatttttacaaatttttagttatatataacataaattttttgtaactaaacgtgacttttagtcacaacaaagagttatttgtaactaatacaaattattactaatttagttttagtcacaacaagtattgtgactaaaaacacatttagtcacaacaaattgtaatttttgtgattaatacttttagccaacgactttttagtcataacaagaattatgattattaataattaggcacaactttatcacttttaatcataaatttatgagtatgtgcatcctttgtactatacccctcaatgcttactatatcaatacaatattataaatgcatattttttcttatttaggcagtactggaccccccataatcatgtaatgtacgtaccttcttctgcaaatctgaaagggtttcatgcatgatttggttctgcaaatttaaaaccaattgattggattacatcaccaaagcaaagatcatgtataaatatatatata

SEQ ID NO: 185665 - DNA, 2005 bp, Cannabis indica
taactttttatgaaaactaaagagaaatactcttccaaagttatctttttgtgtttgtgacataagttatattgtttctcagttcaaagtgctggtttttattccagatacgagatcgatatttgatcagaaagctttaatgcattttcgtggcgagctgaattttgatgggcattagctctttttcaggttagtgtaatttatttctcttctgggatttctgaagacttttttgttgactatttggtttttcatcgcttcatctttctccggtgtttttattgcgtttaaatgtcgggtgggaaaccatttttttcctttttgtttgttgcaatttgagcttcaagttgaagttgaaattttgattttgtttcttcatgggtatatacctagaaacacccatgtgaatttgttgaatttgagtttgaggaatgggcatgtaaagctctccaattgctaaaggattatgattcaagtgcacactcctcaaaactcaaatgatttttcttttttaacagcaaagaaacagtggaactgctaatctagggtttgcagcttaggaataagtagtgaaacttggcagaaaaatcctaactgacaagcttaaagaagacatttttcatttgaacctgatatggatacaaaaactgttgtgggtcagaaagttgaagctgttttgctgctaccaagttgtgcaattgttggtcagtcaaacagtctaaggggaaaacaccatctcttttcatagctttgttgggtttaaggaagatggcactggatgtggtctctagcgcttcggctattccggcttcagaaatcctttctcaaacaatagaaatcattcttgagatttttgttactgctaatgatgtcctcgttaataaggaaagttttaaggaactgacaggttacttggaaagagtagtgcctgttttaaaagagttgggcaagaaaaatattgatcattctgagagcttgaagaatgctgttgagattctcaaccgtgaaacaaaggcggctaagcaattaatgctggattgcaccaagaaaagcaaagtgtatctcttcatgaattgcagagggattacaaagcgtctcgagtctatgtcgaaagagattagccgggctttaagtcttcttcctttgaccacacttgatatttcatcagcaattgttgcagatattgaaaagcttagtgaaagtatgctgaagtctgagtttcgagtggcgattacagaagaagagatcatggagaaaattgagtccggcatacaggaaaggaatgttgatcgtttgtatgcaaataatttgctggctctcattgcagaggctgttggaatctcaaccagcagatcagagttaaagaaggagtttgaagaatttaaaaatgagatagagaatgctcggttgaggaaagatcaggctgaagctatacagatggaccagattattgctttgttagaaagggctgatgcaacttcatcatcaaaggagaaagaaatgaggtactttagtaagagaaagtccttaggtaaccaaccattggaaccacttcaatcattttactgccccatcacaagggatgttatgatggatccagttgaaacttcttcaggacaaacatttgagagaagtgctatagaaaaatggttagcagatggtcataaatgctgtcccctaaccatgactttattagacacatcaatattacggccaaataaaactctgaggcaatcaatcgaagaatggaagggcagaaataccatgattatgattgcttccatgaaacaaaaacttgagtctggacaggaagaagaagaagaaattcttaatatcctgggagagctacatgctctctgtgaagaaacagaccagcaccgcgaatgggtaatcctagagaattacattccaattctcatccaacttctggtgcgaaaaatcgcgagataagaaaacgggttcttatcatcctttgtattctggcaaaggatagtgatgatgctaa

SEQ ID NO: 185666 - DNA, 7218 bp, Cannabis indica
tatatatatatacattttacgaatattatatatagtaaaatttgaatattaatacacctgaaaatatatgctatattgattcaattttcgtattaaactcttttatatcatataggactacatgtaatttattacaaggctttcatgaaggatcagtcattaatttactttattatattgattaattatgtaatgtgcatttgtaattgtacatatatatatatatatactttgttcaaattctttgatagctagaaatgagctagcttggttcttgtttgaaggcatcactcgcttcttccgtagggttgcccccgatctgagctcgttgaggtaattaaagtttgggaggcgctaagttagatcaaacaaaaaagatagtagttactagtttgtgacccttgaaactgactgtttggtcgtggtacgtacaagcgatataaagcctcattaatatgatttctttattttgtcaaattattaaagtgtaaatccttgcttgtttggaaaatgtttccatttcttttattaaacattagtatactcattcatttacaaaagtttttaatttgtatccataccgtatgtttagtacgagagatgttccaattaaattacacttttctgtttagtagcaaaatttgaaagttaataaaaattaattatctgtaaaaaaaaaaaatacttcgggctttgaaaatttcatctatttattattattattattattattattattattattattattattatagaataaggtataataatgtttacaatttggttcttatttattaatttggatatagtattaatttttcatattgactatgcaaaaacaattttttctctccaaaagtgcattgcatgcatatatatctcttttgaaaatataaagaaaccattaaaactaaaaaattgaagaagagaatatataaagaaaaagtttggtatttaatatttcatattattattattattttatataattacactacacatgtatacccaaagattcattattatcacattttaaatttagtagtatgaatcaattggtcgaaatataaaatattcaaattaatttaaactttaataatattcaaattaaattctcttaattaacatgaatcaaacaaacaaagacaatattaattggtacgtatactctttgcaaattaatagagaaagaaaatatatttaataaatatacaaaataacactcataattaataatatcaatcatcataatatagctctaattaatcattaaatcaattaattaataattaaccattattcattactacccaccaaacttgttgacattaaaaatatcatcacaagtactggttataattataattaattagtggtagtaataatattcatcatacattgtacatcttaattataacttttttttgtgttattattatatataattattattattattattatgaaatgcaacatgcattaggattctcatcactaaacaactgaggagctgggattctttcaataacatatagaggttgataatagtgaatcattctcttcatattctcttcatcaacacttccatacccaccattattatggttcatcatcatcatcatatcttcaccattattattttccttattttcttctttacttgcttgatcttgatcttcttgtggtttttcctcctctttctttacttcttcttccggcggtggtggtggtggtttattttcttcttctttcgatggtggtggtttttcagcctcttcttctttcttttcaggttcaggttcaggttcgggttcaggctgaggctgtgggataatagtggcttgtttctttgtgcgtcggtaaacatattccactaatttggttgcgtccattgttcctgttactatgactttcccactactcagctcagttacagctgtttgaactcctacattattataattaaaaaattatatcgttatacataaaatatgcactaaaacattacacacttgcaattttaaaaaatcactatcacaatatactcttaatttttttattaaaaaaaacaataaactttgttgttgttgtttttacctctcattttgagtatcttgctcttaagttggtttgcacaagcctcacagtgcatatttacactaagttcaacagtaactggtccatcaacctgtagtaataattaatattgtaaattaataaattaatttccataaaattaatatataaatatatacaagctcggttttagacatatacaggttaggcctgtatctaaaatctacttaatccaaaaataaaattaaaacgacccattaattttaccctaaataagagctagtatttttttttcaatgatccatttaatttcaaggtcggccctattatatatatttatatacctgtgaagtgacaacttgaggcataggttcaccctcagcagttggtaatggggacaacactttagctcttcttttagtctttttcatgattttgttgcacactgcttgaggctccactattccctttatactcacttcatttttaccaaaatctataccaactgcctccactcctaatatagccaaaatatattataaataataattatatcaaaaattaattaactaaaaaaattatgttaattttaattaattaattaattacctctaattttcattaaagacctttcaattttcttagcacaacctacacaatgtaagtcaaaaacaaaataaaaggagatggtggtggtggtggttgtggttgtggtttagcctcttcttcttctactttcttttcttctttatcttctttcttctcttcaattacttcaattggcttagcttcttctttagcttgttcctgaaaatatattcaaaattaaagaaattataattttggtattagtaaaaagaaaatgctaaataaatgcaaaaaaaaaaaaaacaactaacttgttgcttagcttcttcacccattatttttttcttcaataataatgtaataaccttttataactgatcaaacttgaacacaaaaaatgtatgagagaattatatatgtaatgatatggatatatatatatatggagtgtactatactactagagaggtttttctcttcacatgaaaaggaaaactatgtgaaattattcctcttcttgatcacatgtgttgccactaataagcatacaaaagaaaagtttattattttattattactatattttttttgaggatattatttcaagttccaaaaagctgaattagctagtaaaaaaagagagggagaaagaaatggagttaggggtggcaaatttatagaaagagagagagagagagattgaaaaggggtttggagagtgttcacacatgtgtaagatcctctcctatgtggacaacctggatacctttagttccaaggaaagaaaaaagggagaaagtaaaaattatgactaatttttaatcaattcattaattagtaatttgtttatattggtaagtagttgttgttttgccacatatagatgacattgaatatatatatggaagaatattgtcattaggtattagtagtgcctaatatttttttataagtaatgtcttatgattagttaacaattttcttaaaaattattttcttaaattatataaaactcgatacttaattacaccaatatggcatgacactgaagatggtgctagacagtaaacactaattctcatatgagaaatgctataatgcatgcatggtatttaatactcttttcagtgtcatactgctattggtgtaattaagtatcgagtctatatatataatttaagaaaatagcttttaggaaatataactagctaatcgtaagacgtcattgaatgtgctttgttgggtactaatagtgccttttagtaattctaaaatgagaaatgctataatacatgcatggtttttaacaaattatatcgctattggtgtaattaagtatcgggtctatataatttaaaaaaatagcttttaaaaaatataactaactaattaattgtaggacgcccctgaaggtgttgggcactattagtattcgatagcaaatgctataaggtaccgattatctaacaccttttagaaatggcattttgctattgataattagcgatattttctaaaagttattatattaaattatatgaaactcaatacttaattatacaaatagtgatatgataacgaggaaagtactaaatagcatttctcatatataagttgttcaaagtttacttgttattcaagttaccttgagttctatcctcaattttgagaattcccaagtaccaatttaattttcttcattgtatatagaatgaggattatatatatattttttttatatatatatatatggccaaattaattactatatgtatatgtacgattaattttcaataaataatattataaatgtattttgtttttaaacaaactattcaagaagtagttttaataagtaaaatcgttaattaagcaaagtagttcacattgcaaaaccaaccaagttttgggatagatgaaaggtggagatccacacatttacaaaagatactcacatgggtttgcaaccacatatttacaaagcttaataataataatctctctcttcttttttcttttcccttcaataattttcttttcaattattatagctatgtcttttctttatacagtcattttaaaaagaaaatctatcaagtaacttcttgaatatgcaaaatagtgacaaaatattttaaatatagaatgatttttctctttcctttttgaggtgtagtcacatttttagtgggaacaaaaaaaaaattattaaaaagatattaatgagatataaaaataaaattatataagataataataaaaaatataattttatagagatgaaaaaaattattaagatcaaaataaaactatgtagaataataataaaatatataaaatttatgggaacaaaaaataaaaatattaagttatgggggcaaaaaataattttttttaaaaagtttgcataagccccctaacatgcaatttttgtgattaaaaaaatattattacttttagttataacgaaaatttatttcagatcaaaatatagtattttgatatatattggcattaattaatttattttaatcacaataattgtacatactgtaattaaaaatatatttagtgataataaattataatttttataaataataaatttaagctaactttctaattataacatacaaataatgatatacttttagtcacaatgtttttacttaaaaataagaatttttataattattttcaaatttactaaaaatcctcacttgtggtggataaaaagatgatatagttaacatgacatttagaatttacaagttgtaaaaaagaagaaagagaaaaacccaaaatataaatacaataacaaatcttccctctcatcaatcaattgtgaaataatctttgaacatgtcaaaacaaaagttaattttagaaaggttaaacatgctaaaaacctttcctttgttgttttttagggcatcataaaagcttcaaatggtctttttctatttttattctttattttttcttgaatatgttacttatccaacttaacaataagataatatacaagtatatatatctcatttctttctgtcaattcaatctcaaagcctaactatagtcccaataaagaaaactaaagaagataaatcatcctttattaggtttttgcttttcccaagttttgatattatataataaactaattttgaactaaaaagatttatcctttagtgtaaatttggaaaaaggaggagaggcagatggcccaatttactatggtcattacacgtgagaatgactcagcttgaagggacattattaaatgaaaagtattagaataaaatatatatatatatacatatggatattagtggcatcaatacaattagttcaattaaaaatgaagtttcatttattttaatttgataaatattataagagtagtgttattaaatattagtggtgctcaatattttcataagtattttacgattagttagtgatattttttaaaagctattttcttaagttatatgaaatctgatactaaattacactaataatagtatgacaccgagaaaggtactaagcacagtgatacttttgaagacatattataaagacatattgaaggtaccagttgtgtctaacattcttcaatatatcatatcgctattgatgtaattaagtattgaatctcatataatttactataataatttttatgaaatattactaattaattgtaatgtatcatatttaagtgatgataggtactactagtatctaataacaatatcgctaattcttcacgagatgtcacctcgtaatagtatcgagcatctcaggcccaatcttgggcatagacatgctaggtctttgcctaaggtaaaaatttccttctaaaattacatattttttttattacttttaataagtaccacacttttttttaaataaaaatttaaaaatatttttttctagacccattatatttcagggccggctctgtggcacccggtaacaccaccaatggtgctcattgctctaaaagttttggtccaaaatatatataatctcaaactcaattctcaaccactatttttgatctcttttttcttttcagacaaacaattttcaccaactcaacaattattatttactatatacccttgtatatttgcaaaggttaaaaccaaagtctagccaaaaagtaacaatacaactcaaacacaccacaagagaatatcactatgcatacatataggttgactattagtatatattggttatatatatctttctatcttttgaggattaatagtagtaattaattattttctttctcaaaaaggtagttaagcttactaatagagattctaatcaaagaatgaggtccctactattgttagtatgggcggttaagagactaatgagaatctagatcatgattacttggctttgttatataagttaagtaatcatactcaaccacccattactttattattggccttttttttcttccctaatactaaagaatatcatgaatgatatttgaaattaaaagaaatgtattattatgtcata

SEQ ID NO: 185667 - DNA, 1031 bp, Cannabis indica
acgtaggaaatttttgggtagaggaggtatcacttttgctactattggagcatttaatatttttgatatttaaagaaattataatctttttatttaactgcgaacatgatggttatagtattagtatgcatcttgcttctttttgaaattttatgaatgatctactaggtcgtagcgagaatatgattcaaactgtcacttatgcaactagctattttagaacttaatcgtgaattattcagaatttttcgaaaactgacgatacgtttgttataactacaatatatgtcattataaaaaaaattgtgatataatttctctaggtaccggaaataggaacaccctaagaagttccctatatatatacgtacatatcttatgttccatacgcactgatcacccacaattttaatacataacattactagagtttttgctaagttgtcttgtatgatttattcagaactttcaaacgtcataaacaaaatatagttttgttgtgtaattgaactattaatatagatagttgggaaacatcattgatatgccttctgtgaaataacatttcattgtgacacctatcacaataatcaagtaattaattaggtgttgaatgcagtgaagtgcatgaacaagcgctactttcatgtgatggcattcatcgtgaaaggagaattttactgaagcaagagattgggagaatggtgcttttcttcactgatcagcctagtttattggctcctaatatacaggtaaaccgatcaagcttctcttgtctattttaagttaaaattttaaaatccaaggttagttgaaaaaattctcaagatatatcatttatgtaaaatatcgtacagatggtgttctctgccttggcttttgctcagtatgaggttatctggtttttccaacatgtgggaattgcgtcatcaaaatctaaaactggtcgaatgacaccagttgagatcgtaagtatgcttttataccttaagttcttagtttctgtgttctaggaatatatatatatatat

SEQ ID NO: 185668 - DNA, 1345 bp, Cannabis indica
tatatattggttgtctgtctggttgcttgttttgatggtttattgttgggtgtaagtatttcgtacttccattcctcttgtattatttttaataataataggctctggtgttttgatttaagaaaaaaaatagctaccattcccataatggccagatctgtcaatcagctttctcagaattttcttaacgcttttttggtttgttttgattttcttgaatttactcaatctgagcctgacaaacactgctatggtaatggttgcaggaattaagtgatccaactattgggtttttattagatggaatggaccggctatgctgtttagtgcgcaaatatattgcaggtttgttttttgcggatgttacttttactgactactcatgctatcttgaatgtatttcctgcataaaagattctttgggtcattttgttttgttttgttttgccttgcccttttttttttttaaaaaaaaattgttttcctaattatatgcagcaattcgaggttatgcattatcatatctttcttcatgtgcgggtagaattcggtttttgctcggtactccaggaatggtggctcttgatttggatgcaagcttgaaaggactatttcagaggatcgttcatcaccttgaaaatattccaaaattacagggtgaacatatatctgcaatcacatgtgacttatctgtaagaaatctgtgctcactaaattctatttttgtgaatacaactttcttgttttgtcccaaaaaaaaaaatagctttcttctagctttagcatttctcaccattccagttcacaagatgcacaaataatgcttctttattgaataggatttccgaaaagactggttatcaatattgatgatagtcacatcctcgcggtcatcaattaacataagacatttggagaaagctacagtctccacagggaaggaaggattatgtcggagggaaattctgcatacaattggtctaggtactatttgctcttaagtataaaaatgtaatatacacagatatacctaaagaggggtagctcaaatgatcaggcatgtggtttgttcccacaaggtcagaggttgagtccctctgagtccctacatatcaattgctatagtgttttggtccccaaatattgtaggagtaggtggggatcctagtttcaaaaaaaaaaaaaaaaaacttaataaatacaggtattcattttcatatacacactcagtcacataaatatttatctagtaatttcatgcaaactataacaaaccctaaattatgttagcaccatcaaaacccaatcttatagtttctcatcttatgtcatcacaaacccaatc

SEQ ID NO: 185669 - DNA, 1259 bp, Cannabis indica
tttttctcattaccggtgaggcaaggagaagtactgacagccattgttgttctctggttaagctttttatttttttttcttcttcttcttcctttggctccccggaaaatcaactatctaaagtcttcaacatcaaatccctaatctctatctctctctccaaatcacggacatttatttctgtagaaataaatagagagaactatatagaagaagagagaaaatgggggatagggggagagaaatgttggtttggcttttctttttctaataagaatctaattagatagattttcaaagtgtgtaaataagaggaaaaggtggtgaggagaacaatgtttaaaattaaataaaaataggaaataatgaaattgccagctttgacctcagagaaagctttgatccttcaacttcatagctggcaccataccatagtagattctctctctctctctccacccttaattttctctctctattttaagctataatgttagcctatcggactaaaaggtcaagacagcctctaaagtcatacgttgacctgttgcagccggtgagttcattgcattgaccggttatagccagtgaatcatcacgggttgttggtcgggttgtcaacataacccggtttcattatctgaacatttttactaataaaaactgattattacagattctttttgttacaatgaaagaaaaattattgaccccaggggcccataatatgatcatggtaaataactaaaaaaaaagagaaactttttattatgattgatttatcctaattagtggcttaaatatcggttcaccacaaccctagcattctcataattatgattattgatttggtattcattcatatatattcacgggatgaacttgctttgttttatgtcaattcatatgtaaagataaagattttacattgcttagattaattttctttaggtcttgattaaaaatagatatatttatggttgacattagtgattacattaatgggaaaaaacacacgggaaattaattttcatttttggttgtagctggcatacaaaaatcatttaagggcatgagatattaatttccataaatttattatggtcattaaatacaatatttatttacatgtatatcttctttaagattattttatagtcacttcctaatgaatataatttgatggggttttattgttttacattatgtacgtttacaaaccacgagaggaaacaaaatattctttttctttctttttt

SEQ ID NO: 185670 - DNA, 4481 bp, Cannabis indica
caatatttcgagacattagagaaggagagagctagtgaggctggcttctttggattctaaaattaaaccaagatgtaaaaatcatgagaaattttacttaacaccgtagactatagttttgtaggctagttttaataaacgatgctttgcttagaattttgttctattggaaaattctattatttacttttaagtgtactaatgcacccatttgtgtttttcacatctaaatagttataatattaattttttgatatgacagtgtacattataaatatttagagaattctgtaatttttttgagagattcaaaataatttaacgtgtcgaaaataatattcaaacaattacaagtgtttcttttattttatacgagagtaaaataaactcaaaccctacaatctctattataaattatttcaaaatttttaaatctttgtagcatgtcttaaatgactacaatatatactatcaaataaaaaaagattaaaattacaactattcaaatatcaaaactacgagtgcacccaattgaaagaaactccttattatattaattaatattttaggatataaaggtttagtacttaaccttaaaaatacctttgtagtcaccattacaaacaccatcataactattttctcttggttgctttagttatgttataccacaaaattttgtgtgtaatataatgagttaaattagtgaaacactcaatatagcatctactttaacaaaagtataatcaaattgctatccataatagtgtcattaatattataatgtaaattttagataatgggtatgtattgtaaagcaatttacttagattgagaaagagagagctctccctttattaatctcagcctcattcatgagtcatgaccaataaaaactgttataatggacacttccaaatccaatactccactattcacagtaatctcactttcaacaatgacttccataccaataaaggaaaatattcctatatataaatattgatgatattgattaaaaccgacattagttgtcttaaagttgaagtttttgccaagctaataaagaacatccaaaaaacacattatagttgtgaaacagcaacaaattcccaatctgtatatgcataaatctagctgtgtgtgggtccaatctaatttataacataaaagaagaagaaaatggcacaaaacaatacacaaacatatgctcaatcaacagtaagcagtggagccaagccagctcaatttggtgaccaatgacaatgattgaaactttgaaagtaaaatcaatcaaataaaaaccattggttaactttgtcatgggctgccccatccataccttcaatcagagtccccatcttcagttattcttgttacattataatctaatgtcaaagtgtgtcccattagccattagaaatttcagtaaatgccatttttaatcatctaatttcacctattttagatataatcatatatacttaacagacatagtgtactattaggctgtgctcttgtctccaatttattctaaatacaattgtataattgtattagatgtgattaattgaattggtattagatgacagttttaaaatttaattaaaaatataatatattagaaaatattatatttatttatacataataaaacaatatttaaatttcattttcacttgttgttttcttaaaaactctactacacttaattaaagaattatatatatattttaatggtttgttagttaatcttaaaaatcaaattttgaattaaaattcacttgaaaaaccgatccaataatccaattactaatcatattagattggattttgaagtctaattgaattacatcaaataattatttttcaaaaaaaaaatgaattggatcgaatagaactgtctatacaactcaaattttttgctagaagaatctgtactctgtactgtgtcaaaattgaaaaggaaagttaaagatgcaaatatgtagcaatgccatagaaagtcccaaaagcttaaaccttaagaaaaggtaaaacttgaacacattattatattaataatttatttgtctagaaaactagagcaaagagaaattgaattggataacaagaaagaaagaaactgtattgactattaaagtgatctaaatttcattggatgctaaaaattgttacagcaaagaaattttaatgaccaagttgggtaaataaggtgaaggaagaaaagaaagaaagaattttatataaaaaaagataaaacagaatgttgtaatcaagtgtaaggtaagtagtaactgttaccaatcaccaccattgatgaacaagaaccccacttcgtcttagctctgtaaacagttccaagcattgaccatatgttttctcatatttttcactcctctgaccaggacaacacctctgccatctattgtaatggcattccaagaaaatctcatcaatcaaacaaattgccccagtttcaaataacctcgggataagatcgaattcagtcccttcaacatccattttcattaccacgaaatctttctcagtaacagtgttcttcaaccagttagcaaaatcaaacccctgaatcttatccacttctccatcatatctacccatggtattcacctgctgaattttacccttcacaggctgaatcctacccattcctctgcctttatcagtgactttatcaccagcgtctcgattgatttcgaatgacaatgtctcattcttaacccaagctgcataaggcaacaaagttacagcctttttcttcttatactcttcatggaatgttttatcagcctcaatagcataaacttcaaaagtcttgttctgcttaggatactgttttctaaaccaactaccaatactagaaccatagctccttgctccaacatcaacataaacatatctactcttaaagcttatatcagccattgatggcagatacttaacattctgtatgttccttttcaaagtaagccatggctttaagggttcttccataatcaatggctcagctttcctaaccaaatcttgtttgtacccaggaactaaacacttatcaccattctcatcatcatgggagtttttcttaatcccatggctaagaaaaacacattcttttttcaaaatcatttcacgtataaaaggcatggaagaatcataaccatctatatcacgtattgttaataaattgcagcaattgaataaagcaagaaatgaattgaaactatacgtatcttttgccccaatatgaacaacagcatacccttcgggtttcagtgtccgtacgatctctgaagcaaaatccaacggccgtggagatttctccagccgaccgccgcctgagaagacgaaatcaaatgtgttatcaccgaacggaatccgatgcgcttctccatttataaccaacggcttcgatgctttcttaaaaatccctacggaatccgatacgccgatctccttcaaagcaaacacgtcttgccccttcggggtttcaacgcaaagagacttcgattccggcgaaaggtaaccgtgagaaatcagatcttgaaaaacagaagagtagaaattcgcagccttaatccaatccttactcgtatacaagtcacgtcggagaacggatcccgtcgccgccgcagtagtcgacggaacagagtcggcgtcgctcgagaatatagcagaagaaccaacgccggtgccggacataacaaagttcaaattctccggcaaagagaagaaacagaagtctccgacgttacaagactcgccggtaacggtaacgacgtaagcaaaacgaacaccgattactaaaaccccaaacaaaagcaatctcaccagaaagttcttcaacaaattaggttttccactctccatagctattaacccaaacaataaaaaattcacagaaaccaaatcaaaagaagaagggattgatggtttgaatttagcgagaacagaaacgagcagaggtgtggttagctccgatcaaggatggtctgtgggagagagaagggcaaatatggaaatgttgtagaaattgaggggcaaaacgggaaagcatggtgaaaaataatttgtactaaaaagccattagaagtaagtgagtgtttgtttggattggatttttttagagaagagaattagggaaagaagaagaaggtgaagcgttatatatgaagagtgaccaaacgcggtccccggaggagtgaggtgacctttaaccggaagaaccggttccacgcggatagaagaaaatagagtcagatagcgaaacaaacacgtatttggattttggggatttttggaaataaaaaaaagtacacacaatttagtccatatttgtttgaccaccaccggatatagtaaattttattattggaaagttttattggacgtctaatttatttcttctatttttgttaagtaaaagaaaaatatttttttgataaaaaaaattaaaaata

SEQ ID NO: 185671 - DNA, 2637 bp, Cannabis indica
agactctgaagagttacttgagacttcccactcgtcgaagctcaaagtcgatgaattatcactcagagatgctaaagctgcacagagtctaggctggtctttgtagagcaattggagcagatcattatctatctaatgcttacctccccaaaattcatctacaaaagaaggagagaggtaagaacctgacaaatggacatgatttttataagggaaaaacatttctgatgctcttaccaaatggattcaaatgttcgaaaaaggaaatgtcatcctaataataaattcacaaagtcaaaggttcaagaacatggaaagaacccagaaaatgtacaaaaataccgaacaagcatttttaagtagttttttttagcaaaagtaatttaagatcaattttgaaatcaagaattgcgaaccgcacatgtgtactgaattcaaaattaaaaaccctaatttctagtttcaaagaacagtttgaagaaaaaaataaaatgcataaactgaaagaaaaaatgttcaggtgagaaaactgactcactatttatgatttcatgagaaatgcccaaagtttgtctctgaaaatggcttcgacagaatagaatttcgacaagaactcttcgagattttgaaaaaaaaagaagaagtttgttttgctctgatattctaataagcaaaatgggtgaaaaagtgtaaaggaagtataaatcccttgttataggcaattgtgtaattcagtaattttgaatttaaattttaggttttttcccaaaaagagaaaattattatttattgaagagcacaagcattaggcacgcgatacccaataaccactattgcgcctatcaaggtctattttttaaggtagggcattaaatgcccaagataccgaaaggtcagctatatcttcgtatgctgcaatcagatcacatcaaatcaagacggagtatgaaagccaaacacgtgtcactcatcccactaactcagtagccgagtaagtccacgtatgagcaaatagttcccacacagacttgggggcaaatattatcctaatttttgcacagggtgatgtggcgtttaatggaagtgacacgtggagaacatttcaaggtccagatgggtggtctccccacaatacttcgcccagagagatttcgtgactgtccgagcaggccttcaccatttaatgatgtcgaatcctcagagcaggatatataacacgtaaaaaagagaactcttcaaggatattttccataaatatgactgcatatatatctcaattaaatctgtattatcacggggttgacacgcattaatagggagtacaagaaattaacttagtttccctttttattcctaattgtattgggaaacctaattcgtgtattattttttcttacaaatagtggattcatttcattatttgggaggaaaaatcatatgttcttgagagctactatgctgtcaaaataattgtaaatttttcctaagaattattggaaaactcacttgctcagctccttgtgatctcgataattctttgaagcaatataagtaaaagggggtaggctattaccattatcgcgggcttaaacttctataaattttggtgctcttattgcttaattatattaattattatctgttatcttatcgctttaaagactcagcgtcgttagttaaaaacgagattattattattattattattattattttggtttgttagaatttagtaaggtgtacggggttttatctcaaaactaattgaccatgaaaagagtaacttatgcatcttatatatggtgttatatttgttgaacgactcgataacaaatatcactttttgattcacaacagattacaaataattttttttgattcgtctttttagaccagttattaaatttggatcgttaaaagttttgtttgattttggtattatgttagaatttaataaggtacatagagttttattttaaaattaattgataatgaaatgagtatgggatgagtagttgcattttaaagtaatatatatatatttacaatttagtaacgtgagactataacatggttcgagtcgggatattaaaattatgatgtctcatctcacaaaatttggccctttttgtaattgaaattgttgtcttatataaggtgaatactctttgcttacatagacaagccaaattctcttaaaaacatttctgtcatcatcactgcatcaaacgttattttcatttattggaatatgtgaggagtgagagacgctcccgccagcaccaatttacccacccgaatgaccttcatttcaatcaaaaagtgaaaaaaagaagaagcaaaaataagtgaaatacactaacacactgtatatttttaatattctttattattattattatttattattattattacctttatttggattcaatttcattttttttactcccaccatgattccttaagttttttttttttttttttttattggtcctttaatgtttatcaccaaattttgatttttcattatctttatcactcaaaacgattatatgttcaatatatattttatctaaatagcattgctattagacactaatagtgttataggacctgatacttagtcggaccaat

SEQ ID NO: 185672 - DNA, 10303 bp, Cannabis indica
aagcagaagagcgtgaatatcttatcttgtatcagtaattactcgcttattttaacctttactgctaaaggtattcgcttattttatataaaagatacaaaagagtctaagcttatgtaatactttttgctcatcttcattgtcttcttatttcgcagagcaagctggagaagaagcgtgctaaagcattacagaacttccaaaagaaaatgaacatagcaaaggctgaggcaaataaaatgacaacaaaggcaaggaaagaaaccattgagaaaatatcagacatttcaaagatctctgacacagcattagccacgaagaatttaaaatgtgtcaagctacggttctcttagtccaaaaaaaaaacaattataacttttagtaattagataaatgagatgtttggcattaaattccaatgtgcatcaacgattctattcagcaattattaatcataagaatccgtagtatctccaagctttttgacgttatgctagtccttgtaagagagttagtggtcatgttggtcatatatttttttagacatttcagacatgtatcggtgggttcacttaattttgaccgattaatatttttcatatttccctgtaaaaaaggaaaaaacaaccaagccgaagaaacaattaaagaaacatggctctttctcaagtttgttttagaagtaaaaattgcattgaacttgaagaatgatatacaactgtgcagggatatttaactgtctaaatgatataattcaaatgcaatgattaatgaccgcactacaaaacagaaagaatatttacatgccattagcagttttgagctactctgcaactaaagcagtgaatactagcaaataaaaacgcatgccgtgcgccgtaaatatccacatggaaaagttacaagttagtgtgcgttctcagatacccaattggacaccatactctcatccacaggtttcgggcccccacaagatcttgacactgattcaaaaagcttttcaatttctggtgcgcacctaatgaaacctcggttccaaaagttgtaccttggattctggaaggagaaaggagggaaaaaaaacacaatcaacacaaggacttgcacaaaacaaaattctgcaaccatggaagaagagactcaccttaataagctcaataaatgtaataagaagaccccatggatgaggcctgttaacaatcaaacgttccaacaagactcttgtaatttgctcctggataatttcctgtaaatagcacactttgataagcaattgaatactactaataagttagctgcaaaattaaatgagcaataatgacattaaaatgttcacacctgattggattcggcaaacaagtaaagaaggataaaagaaaagtaatgtgtatgagtgtttggatagcggagttggttagccaccgcattaaggaatagatagcgtccctcagtatctaggtccactattagagcctggaatatatctaaggcagcacccaccaagaatacagcaagtggaacattttggctactttgggaatgagaagttctagcctgaagctgctggatggcctgacaggaacccaaaaagcaggtatggtgaacattcattgtttaataagcagaagacaaattaaatagatctttgtaatctcttgtttttggcaactgaacagtatcttatttacatattgaactagaaaccacgcacaatgaaatgagcatattttcaattttacaaggcaactgaaaatgtgtgaaatttattcccgtgatgcattctgatgtgacaataagggagaaattggcatagaaacaagtacctgcatgccaacataaagcacaagggagtttatcaagggtacattataattggtgccagccgcagcaacttcactgggtggaagaagcagcttctgtttcagatcagtcaaaaatgaggagccttgccttgtctgttgagaaaaattaaataggcattacattgggtaaaagttcaggcaaatggcagataagacataaaaggagagacacatggagagtaccatcttttttaactcaaattaaataaacaaataacaaaaatgaaaaatggaggaaaaaattgcaataaagagaggtacccatggcataaactacggtaggaataatttctctcaccagaataatgtaaaaaatagaatgcaaaacaaaataccttgagatactcatccacatcattcttcatttgttttgcctttagagctgcatcaacctccgaaagaatgcgaggagattggctgatttctgcaagcaaatcaatctgcagacataatagaaaagaaatactcttcttaagaatctgcatcagtagataaaagaaaattgtaaaagtacataaaaccaccactactaccaccaccttcaagttaggagtagatggatctggcagcctcatattgcggggaaatgcacttagaataatatttctcatttgaatgcagcttggaggaataacatcacagaaggtaaaatgataatcacacaaaaactcggggaaatcatgaagcagcactaacaacaccctaagtgtgcctttatacagaaaatgaacctgtacaacagattaaatttaaattatattaacaaaggtagccatatgacaaagcataattaaaatggtatatcaagacagaccggaactccaagctcagcatttctcaagaatggttccataaattggaacaagtctaccagcaatcgttgaatatagggccaacccttctgaccattccccgtcagcatttttggcatgaaactcctgtggctcaccaactcgagccatgcaaagctgataaagcatttcaattagaccagagaatacttctttctttcttttttccccttttaatgtagtacgaaagaccacaatatgaaaacaaaatagggaccttcaagaacaagttttatacataaaaacatactatcccagattcccagccccggactaaattggagaacaggactcattcacagattaaacttacaaagaatactgaaataaaatgcgaccaagtcctcctaaataccaaaatttgatgatcatgctacattctagatatattaatctatattacccaacaacatttaaacaagaatcatgaaataacctgaatgcaggaactttgagaggctgcaaagcatgaaatgcatttgcaaatgctgtcaaaatctgcagcagaaaaaagaaggttaaaatataaaaaacaaaatgtaatcatttgtagtgcaagtgatatctgatgagagaaccatatagacctgaaagtttgcgccatctacaagggggtctatggagccaagatcctgaagccaattgataaacaatctaaaatatggtcttggattaaaagataatttcttctcttcagcatctttttgaatgaatctgacagtaactgctagaatctgccaaacactatacatgtcaaacaaccaaaacataataaattagtcaatactctgaacttaataatcaatttttctcaccttagacaagagaaatggtttattggttccctgctgcaagaggaaattatttatttagaattcagatcttattgcaaaagaattgaaaaaacactggaaatgtgcttgctgagtgggatgcctactaaccttgagaattgaaaagacgatttttgcataaatatcaattgcaagaaatgacaaactctgcccttgaagaggtgcttgcaatgtgcctgaattaatcacctcagaagataggcaatgcgcaacagaaagttcctaaaacagaaaaaagatgaggccatggctcttgtcaaatcataactagcctttccaaagaaagagatctcactgtgaggaggcggaaaaatctctctgtcacgtcatcccctttcagcagtccattttgatgcagctgtaaaatgtaatgtgcacacgctgcatcattagcaccaggaagttcacaaatcctgtaccactctgcaaacagcctcgaaacctaacaaaaagaaaagcattagagatgagtttcatgagcataaatgccgtacaactcttttcatattaatttccatgggtatcgagttactctgctctaccaagtcagaaaaacaaatcctaaatagctccctccccaccccctaacactaccagaaagagataatgataacatcagaagtatatatctaatatatttataacaataataataaaaagaaaaaacaattaaaaaatcatcttcccataaaagagagaaaagggagtcagctaagtagaatttttctatggtttgcatattgcatattcccatacaacactatcaacttcaaccaccattccgaagtgtaaaagtacatagaagaatattttatcctcattctagtgctattatccatctaagaaataaaaatctagttatcatcaaaggtgaatgttacttaatcaataacataaaattataaggaatatacttggaaactaaatgtcatgatacctgctcacggaaaccagcaggatctggttcaacagactctacactactcaagtcttccttaaccatagagagaccaggagcctgttaacaaaatacaaagttaaataaaagaattgttgaaataggttacacacaaaagaaaatatttgaccaagatgtctttactgactttcttgtctctagattgtcgagccttgtcatccttcccaacattaacaccagaagaaacagccacatttgctgaaggattcttgaccatctcaaccaactgttgcaatgactcgggagacccaggctttgaagcaagctgtgtttcagaatgataagtaaatgagtttatacatcaatatgcaaggacattcactcatgcaagactaaacaagtacaaacctttgctaatgcatctacaagattatgaagttccgaaattactgtagattcttctactgccaatatttgaagaagcgaaatagcaaactccgttgcagcctctgcatgtttaatgcacttagtaatatttttaaatgcaagaaataaaaggaaatcaaaacaaaatcttctacatactattccttcctccatcaataagttttgccatatgcacattatactctgcaaggtttaacaattcactacggataaggccaacagtaatatctttgttaaactttcgctcctcgtctgaataaatcacctgcgcaaagttgaaaagtatttgatcaatacaaccagaatgtcacactttataacaacagaaatggataccagctcattaaactaaagaactaggcaaactccagtcctttcaccagcccagaaagctgaagacttcgcaaaaatgattaaaatgaaatagatccataaaacttcttgccaacataatatcatctgagagagtctacgtggtaaacccacaatataaaacatgattcagtgttgaatgagcatacccagctagtgagctccttgacaactagcttgcacacatcccgaatagcagtaaggatcgtgagaagagaaccaacatgaacatggtttgatgcattttcatataaacccttgaaaacctgtaccaaaatttgaaacaatctcaagatattgacatgttggggccaaacaaatgacatatcatcatcacttgggaatgagttagctaatttcgttaatcacttgtatagtttttaaagtagaaagaaagaaaaaaaattgcaataagtactacgaaccttttgagcaacagctaaggcagcttcatcacggcttacacatctaagtatgatctctggaacttcagtaacaattccctgtaaacatgtcccccaaaaaaaggatttaaataacaccctaatgcaaagttgataaatgtacaaagtcaaacaaaaagcataattacacataaaataataatataaaaaattaatgataaaaaggatgccatcacagaatcaaaacatgatattgaaagatcataacacattgaatggaaccttcaaattaacattctttaccatatctgattaaaaaaattaaaatacctgaatttctgcttctctagcttcattagttatcaaagattcaagctgaaacaatcaaaaaggaagtcagctactatgttatataaaatcctccgtggcagaatagaatccatttgcaagaaaaacaggttcatctttgcaccaggacccaagaatattgaaatgcaatgggtaaggccagaatgttacaaaagatcataacctttctcacagaaacgaaaataaaaattgaaaagttgtggcaaattagaaaacacaatcccacatttcagaagaaaaacaagaaaaaaaatttcttatgtccaaagaccaacataaacattggcttgaatgtgaagcaaactaaacaaccttagataagtaatgggaccataaaataaaaaatagatggggacaaaaaagcatgcagaaccttttgtgaaacaatctggtatttatccaacgcgtccctcgtactaagtgaagggtctgataagctacttccaagacgctcaccagcagcaggtgaaggcaatggctgcgaagaagttccagattcctggtaataaatttaaagcttgaagtttaattttcagaaccataaacaagctcattttcaacatcaatatgtgagcatccaaccttagcagcatcagtgtactccactgaatgtaactcaggcagagaagaaacagtagcaaatgaaccaacgacaggatcactttcagaactatgttgggtaacagcttcagccacaccaacatgcaatgaggaagcactgaaaatcccaaaaaggtaagcaattaataagttgaaaaagaaacaaattctgctgaaataagaacagagtcaatcctcagtacagcctcctgatcttgtttcgcgcacaaagtctagtttgttcaaaaaaaaaattgaagatggtgaatattacaaacctaagatgcagagctgaattagtagaatcaatagcctcgtccactggacgggagacagcgtcaaaacccaagcttccagatgcagaagaatatgctggactaagttgtgttgaagctgtaccataagcaccagctagaccagcatttgcagttgaagcagaggcaccagcaggcacagcatgcgaactctgactagattgattttgcaaaggaagccggacaaagtcctaaaaacaataacagaatacaagatctgagtacattaaaaacaatttcctattaaaaggaatgcactaagtacaccaatcgacaagcactaacctcatatactctctgttgagaaagcgacaaatgaccaggtttaggacgaagagactctggcacaacacccattgatccttgagtgtacacgttagcatcaaaaaagttggcgccaacaccgtctctatggttcctcctcaatgaaagttgttgatttatttctccatcaatgctttgtatggcctacacatgcaggcacaatcagcataaagactacaaagccaccagtgggtgacattcaagttataaataaagagttatatgcttcttcataaatcaccaattactcagccaaaatatatatatatatatatatataatagagagacacaaatggatgtttttggtcataggcatagcttgatgctatcacctcctctttaggtcctaagttcggatcccctcccccaatatcaaaaaaaaaacacaaaaaagcataggcttttaatttaaagtgaagttcagatactgcttcaactcagtgcaatggtaataagttggtttcaatgtagagcagcaggcacctacacatgagaaatgacaatgacaagatttgggatggattttatagttgaatgataaagatgctcatctatgatcaccagcttcacaagtgaatctctaatgtccagaaaataatgatcaccagcatctatcagcatcatttgtacacaaacgtaaggagctaaactgtcctcacattctcttcaacttattaaaataaatcttctgttgagtttttttttcttttttgtcaaatcatttttctttaagcaagagctgagcaaaatgttcccaaaggcaaatcgtcctatagtatcacatattggaacagaaaattgtctttagatatcttatatgatattacctaaatttattttatttccaatgtaatagcaataatagttccctaaggtggtgtttagttggaggtaatgaattggattagaatggaaaacgaaacaatttttattccattcctttgtttagttgaattttaaagtattggaatatcatttcaatggaatgactttcccatcattttggtggaataactattccatttcgaagtggaaggaaagaccattctaatgcaagatgagaaaaaatttaataatttttttatgaattttttatgcgatttaaatatgattcccttcaattcctattcccactcctattcctattcctatgttttcattccttccaaccaaacgccacctaaatgtccaaatggcacatgaatcttcatcaaaagtatacaatttgatactcggctctaaactctaaactcatgcaaacaaattaatatatttgtttagcaaaacaaaccttatcggttgcagcctgctcaatgactgcacagccaagatccaaattgtcattggtaacaatttgaactgcttgttccagaagttcactagcaagattcaaaccctgaagtgaattcctcagttgactcagtatagaagttcgcaagggttcctgcccatcaaacaacaaacatattactaaacacacgattaaggaagaagaagttgggaagaacaaacaaagaaagaacttcttggttaaaaaaatatacaaaaagaaacaagtatgtcccccacctagaaacaataaacattgaattggggtaaaaaaaaccaaatatctaaaaagaaacaagtattttccaaaatgcacaataagattaaaaaaaaccttgcacgtcacatgcgctagacttcctgccagacttgcaaccatcaagtgtgctgcattgaatatacgtgtttcatccgattccatggcataatcctacaaatgcaatcaattaattatagtgaaatataaaacgtggaaatcagaaggctacctaactgagaaacatatctaagatgatgtagctccattattatacagaagatggcattaggctaagcatctctagaaccgtcagacgtgagagaaaactcatttgaacaatgtttgccacaaactaaaaaaaacatagaataagccagtaaacaaagatgaaaccattcaacattgaaggtaccaaactacagaacaagtctgggctgtacccatttcttaattaatcatgtatgtcatcatataaagaagaatgaaccaacctttaaaacaagttccttagttgtctgggtagctatagaaacactacgttgaacaatactaggcactatctctttaatagctctatccattgcgatcggaacaactctacaaaatacaagagagattagtgttaacaacacccaagcagtttttacaccaaaaagaaaaaggaggggggggggggggggaggaaggaggtattcatagcacctctgaaaatgcatgtgcaagcccaacgcactaagcttctggttgatgatgacatgagtaccaatgttaggtactggtgtgggaagctacaaacagaagaaaaagagacgtgaaagttctcatcaatgattcaatctaattgctcttcacataataaaggaaagtaaaagagaggaaagaaggatacctgactaacagagaatggtgactgaggagtagcttgtagcagtccttgtgcagatggaagctgatcagacaatcctaaagctgccaacttatcatcctccattaatgtaccagacgaaagatgtagaggagcagcatactaggccaaaaaacaaataataaaacattagaatatcaaaccaaagagaacccagaaaaagttattgctggcaaaaccaacctgagataataaatgaggatgtcctgcagaattagatgaaggagcaacctcaagtggtagctcaacttgatttagtggagacattagggttgatttaacttcagcaaccatttgaggttgcgatgctcccacatctttattagaaaaatcaggatttccttcaacttctctcttgcgatccttcagaagggcagttggtgttatctccttcaaatccacatttaggtttttgaatagaacctgagacaaaaaattagcaaagtttgattaaaacacacacacacacaca

SEQ ID NO: 185673 - DNA, 2395 bp, Cannabis indica
atgataattgaattggtttggttcaattatctattggatctgatgtctcatccaacaaccgattcgatctggttgaattttcaaaatttacatccaatccgatccaattataataagatatccaattctattgaatcggctaaaattaaatcggtcggttataattgaattgaataactttctcacactaaaaaaaataaaataaataagcaaaaagtgcgacatttgtttttttagaaaatacaaagaatactccaaaggctttcctttataatattctttatataattttcttttaaacaaaaaagaatgagaaaaataaagcacaaccacaagtttaagtcaaatatagcagacaacaaaatgaatcaacaagggtggtggatggtgcatgtagaaagatattccactcagtctatcaccaattattttgttatattattaaacagtcactagagcccaccatagtgctattttaacattcaagtcttaattgtatgatataacatgttcatttacttacaactcaaatgttatttagtcaagacaaaactcatggtagtaggagatataaaaatctgtaagcaatacaaagatataaaaaaataaacaatagcgtttttcaacctcaaaaaattagcatttaactatgctacttatacttttcacaagttaacaacaaagatcactatggagtaaattatatgagcaatgcatttttctttttcttgttttgctgaacacacaacttgcttacttacaatttgttttgtgctcaatttttttattacctcaaagacaaacaatatgtgtaaagggaaagactgctgtgaatttttgactgtaccaagcagcaaagatagcacttttgtacccaaacagaatccagtcacagcttcagcaagagatgactccagttggttgaagctctttgaattcgctaccgggatgagataacttgttctttttcttcgtttttttttctgtgattaggaaataaaaatggaagaataggtattgaaagtattcatctttgtttgctatgaaaaatcttcatagttggggtagaagccagaaattgaacaagaaggaaccaagggaaagaaaccaagacaagaatgccatagctgcagataactgaaatctactacataactttacagagcagaaactgatatcaatcaatagatctgtgacactagcagttgagcaggctgcagatagtaacagaagtgacaaagcctgtatatacatacaagacaagacaaacacatcaaattagagtgaaatcataatgattatctaaagttagattaggaaaaaatgaacttacccaatcgcctaaaatgattatcaatatggttcttggttgacgaggtaagcatttaacaaagacagagtatgcatcaaccactaccaatgtcatgctccaaggaactactaaccccatgactgtcaccaagtagctgcaaaatcaacatacaagattttgagatgaacaagagacaaaaggcaaatgcagctactgaattaaaccaaaagaaaaacctacaaaaacactaagtctgattctaaatcgaaaattcccaaaagctttgaagttgcttagccttaccttgctttgcttaccttaacccccacattacaaagttttcaaagaatcttatgctaggccaatatattcaatggcaaattattaaggctaaattagttcattagtttgttattctagtaacttaatgaatttcttttgtaacagacactatatatatagacacaaacgaaaggccattttatgaagtgcctattgtgttgagaaggggaccaaagcaagaaagtgtataaatttatgctatctattcttctagcacaattatgttggagataattattttgttcccaaaagaccctatatagctaaataagctccttccttctataataaattaccataagaattaagaaatacatacaataattttaaggtccaaaactttaatgggatctctctaatactaataccctttgtcttctaaatcaaaaaaggaacaagtacaatcaacaaagtaaaaacaaaaaaagaaaaaagaaaacaacaaactaataattgttagcaaaaatccagaaagaaaggggaaaagccattaaagtggaaaagtaagatatgggtattattgatagacaacaaagttagaatcccaatccgaaaatcataccagaaagcggtgtagctgtagaactgtacttcgaagcacataaagagaagagaagcgaaagagaatatggtctgtcccaaacgcaaagctaaactagcacttgtgccaaatgatccaggcaaatcgtccatggttgatggttgcatcagtgtcatgaattcataatcctccgctttctt

SEQ ID NO: 185674 - DNA, 3663 bp, Cannabis indica
ggctattgtgatagtgattggagtgttaagattcaagagacaatgaaaagaatgaaatctctgttattgaattgaattgagtaatgtacagtatttatacaagagctctacagagcaatgacagctaacaacataacagaaactaaccaacttaactaactgaaaataactgtctaactgtacaactaacagacataacaaactcattctttaacagcccccctcaaactcagatttgaagagctttcaactctgagtttgtctcgcaaagtagggaatctagaactcgaaatggccttagtgagacaatcagctatttggtcaatagcaggcacatgacgcacatcgatttctttgttaagcaccttttcacgaacaaagtagagatcgagttcaatgtgtttggttcgagcgtgtaaaactggattagctgttagaagaatggtgctgagattatcacaccagatcacaggtcgagatggcagagtgatttgcagctcagagagaagtgattttatccatgtaatttcagctgtaatggttgccaagctcctgaattcagcctctgttgatgaacgtgagacagtctgctgctttttggattgccaagccactaaatttgaaccaaaataaatgcagaacccacttgttgatctcctgtcatcaggatcagcaccccaatctgcatcacaaaatcccactaaatcgagttgagttggctttgttaaatgcaaaccatgatcgagagttcctgacaaatacttgagaattctcttaactgcagaccaatgagattgaaggggattgtgcatgaattgacaaactttattaacacagtaagaaatttcaggtcttgtaacagtgatgtattgtaatccaccaactattgacctgtagaactgtgcattttctactggatcacttccatatgcagataaccttaaaccagaagtcataggagtggcatttggtttagcaaactgcatttttgctcgagcaagtaaatccttgatatacttggtttgggacaagtgaaggccatttgttgtgtgagtcacttctataccaaggaagtacttgatttcccctaggtttttgagagcaaaaatcttgtttaattctgcaataagagccgagatataagtggaagagctgcctgtgattaaaatatcatccacatagactagaataaatgtggtgtgccctccattgtgtttgtaaaacagtgattgatctgcctttgagaaaagaaaaccaagagagagaaggacagcagtaagcttatcaaaccaagctcttggagcttgttttaggccataaatggctttgttgagcttgcacacagcattaggttgagagggatcttcaaaccctggtggttgtgtcatgtacacctcctcttgtaattctccattgaggaaagcgttgttaacatctaattgatgaacagcccattgtcgagaaagagcaatagtgagaactatgcgaatagtgtggggttttacaactggactaaacgtctcagaaaaatcaaaacctggaagttgatggtatccttttgccacaagccgtgctttgtatctctctgtggaaccatcaggattttcctttatcctatagacccatttacacccaacaggtgttctgccagctgggagagggactaatatgtatgtcttatttttaacaagggcacgaatctcttcattcatggctgcattccattttggatcctttaaagcttcataaatgctggatgggataaggactgtgatgtaaactttgggtttgtggatcccatttttggatctggtgcacataggatgctgattatttgatgttgatgtggctgtagctggaacagtaggaccacaaggtgctggagcagagacagctggagttggtgctgatggtactgaaactgcaggatcagaagtagcagggacaaaacttggaccagcagctgtacctgtatcattaaaacctgtactgaaacatgggttagctggtgtaacattggcagaggaagaagtggtgtctatcatagcaccaaattggtcatttgaaatggtagtgggtgagggatagtgtggggaaactgaagtggttattttgggtggtgtggcagagacaggattgggaaagagagtagatgaagagcttgctgcagtgttggaaaaaaaaggaaaataatgttcattaaatgtaacatctcgagagagatatattctcccttcagaactgagacatttataccccttttgatttaaactataaccaacaaatgtgcattgagtagatcgaaattgcagcttgtttttgttgtatggccttaaatttggataacatgcacaaccaaagactctaagagatgtgtagttaggctctttgtgatataaaagctgaaatggagattgattgtgtaattttggggaaggaagcctattaataagatagacagcagttcgaaatgcttcatcccaatattggagaggcatgtgagcatgtgcaagaagagagagaccactctcaactatgtgtctatgttttctctcaacaaccccattttgttcatgggtgtgtggacaagattgtgtgtgtacaatgccacattgatcaaaaaatttgtcaaatggcttaaactcacccccacagtcactttgaagagctttaatgggaagattaaattgaagttcaacttgtttcttgaatatctgaaaggtgggaaaagcttcagatttttgtttaagcaaataaagccatgtatatctagtgcaagcatctacaaaacttatgtaataagtatatccatttgatgatttttgaggtgagggaccccaaagatctgtgtaaatcatttgtaggggttgagtgtacactgtgagagagttggaaaaaggtaatttatgagatttccccaaacaacaagcatgacaaaaatcaaagacacttttattgaatgaagagatattacaattggacattattttttgtacagtttttgcagtgggatgtcccaacctgctgtgccacaattgaaaaagggaaggagcttgatttagagacaagaaggcagctggcttgagaggtggtgaaatagctggtttgcaagattgcaggccattgatttgtgtactgtcaaacacatataagcctcgatcaagtttgccaacaagaagagtcttcttggttgcctggtctttgacaaaacaaagattagggtgaaattcaaaaaacacagagttatcattagcaaattgagagacactaagcaagtttttggttatagtaggtacatggagtaaatttttaaggataagagtttttgaagataaaggggatttaaaggatgaatgaccaatatgatgtatgttcaaacctgtgccattgcccaccatgatctgctcttgtccattgtattcagtactggtcataagattttcagcatctggtgttaggtgatttgttgcaccggaatcaggataccaattcgagtctcctacagtatctggtgtggctatcatcgcgtgcatgttggagttggattgaggaggagctgtgccaggtccttgaaaggttttatcaaagcgataaaagcattggagagccatgtgacctggtttttggcatagttgacagatgggtttaggtggccattgtgaa

SEQ ID NO: 185675 - DNA, 4204 bp, Cannabis indica
cttaaatggattaattgatactgcctatatcaacaaaagaactccacatttaagcttgcttgacctaggatatacaagattggtgacctcctgcaaaattttcccataaaatgtgcgagtgaggaaaaagcacgctgaaaatacttgtctgtagggccagtttttacttcaaaaagcagtcagaattatgtactcgtgtataagagtcattagtctgtgagggaaagcctattaatgaaagcttgaaacgggggagtaacaaaatattactttatagttaaaagcaacttttgtgttttactaatatataaaggacttttgatataagaagtattgttttgagaccgaaaaataacttttatattgtgattaaaagattgttataaaagacttaatgagttttttttttttatctcgtactaaaattaggcatagaattattagagttagttcagttcaattatttaaatgtaaggtgcagaaattcttatatgctatatattgtttcatttcatagttattgctttgcatatatattgtaagaattaagtagaatgtcaagaattgtgatatataaatatatatttatatatatatacacgtcagaggtcaaaactgttaatttatggctcacaacaacaaaatcaaccccatatcttactaagaattaggaccacacatgtgaccaattaagtggggcaataactagttatacacttctcttacttcatcacatttctaatttaattatataaacatatatatatatatgttaatatatgtgtgtataaattagtagtagcatacaaaagattatcatttgtaagtaggtatagtaagacactttggtaaaaaagataccccatatacatacattaatatgttccttttcttgacattcctcctcattcactgaaatgagtatataacattaatttttattttttttaaaagaaattttaaatgtagtactagtttattttctggactcttaagaacatttaatcattattaattaataaaaataaaatcacacgaagaaattacaaagttaattacaattattagaaatgaattccaaccaactactctttaggtcccccaagaatcagggtaataactccactaatcaaaaatgtgattattcaaaggtttgctgatatgaacattgctctacttgctaagttattttggatggttttgaaggatgaggataagatatgggttcgagtgtttagagataaatactatcaatatagctctacttggatggtggaaaggaagggaactgactctcggtgttggaagagtatgcttgaagctagaaagatgtgcatggatagagcgggtattctgattgctgatagggatagtgagatgtgggatagaccttggatcccacatagacatgttgatgatttgaaagaaaatttcaagtttaaaagcaatcatgctttctggaaggttaaagatttgttcgtcgggaattctcgggtgtggaatgaagggctggtttgagactgctttaatgacaagattgcgaatgacatcctgaggattaaacctctagctgaaggttctgatattctgttttggaaggcggctaaatctggtattttctcggtaaaaagtgcttattggataagccaacaaaataggtttaaagtgtcttgtgagaaatgggtgaaattatggaaattggagctccacaaccgtttaaaactattctgctggaaagtaatttctgacattttacctactaaggctcatcttggatttggcacaggtgattaactgctgtgcaagttctgtaatatggaggttgaatcttctttttatcttttctgccaatgttcagtcactcgtggtatctagttcagaagtcaatggggtcttaggattgattgttcaaactggtccaacctcagggattttggctcctagtggattgggctaattgattgcgagctagccacgtttactgctcgtgtgtgtgatacaatttgaaagtggaggaatgagatgatcttcaaggaccaagtgtgtgatctggatgcaatctttcttgattgtgtgagaaggttcagagagttttttagcaacctctgctggtttgagcaagaggaaacacctactcctggaaggatggttcatgtgcaacatgaggatggagataaggatggagatatgtggtactgcagggttgatgcatctgtagtgatggaagatgcaaggtttgctgcagtgcacctgaatgaggcatagttggcagactcttaggtggcggtggactttggccctattttaggtgtgttggaaggggaattaaatggcattgctctcgctttacaggtggctagggacaaagggtacaatcaagttagaatcgagacagattctatggctgctgtgcatgcttttgaagcttgtgcggtctgagaattcggttgctgatgctctagtgtgttgggctagagtggcaaaggtcaaaagtaatggtgtgttaagggaagtggccccctctgtggctactagtttggtttagtttcctttcaataaaatatcctacttatataaaaaaaaaaaagaaaaaaagctcaatccatattacaaaaatgaaaaatacccgaaaatcaaatcccttgattatgcacaagatatcttgtgcgattactgaaatcatttcagtaatcaactaacactcatttagttgacgtggacatactaacttactgtgctcagcaaatgaaacaaggaataacacatatgtaactacaaaatatctacttagtcaaaatacagatgaccaatgcacatgccagacacaactctaagacatattttgtcacataaaaataatgattgttacagaaattatatatggtaagtagactactaaattaaaattacagaaatttgtgggtttagtacttgtgtaattttagtttgttgcaatgtaacgcctatgtaaaaaaaaattggttgtaatgcttcctgttacaaatttgtccttggatatttaaggaggtctttctcttattttattttataatttataatcgaagttcattaataccgtccctttcgacttcggttactataaatgctttctctttgtctggataatactaagtgccaagatttgtgaaaattaaagaaaaattagtgaaaaattgaagataaagaacttttttatattagtgataaaggaaatacatttatacttatagaggtgacaatatctttattgctaactttaggagaaatattttccgtggaagtattagcgacatattaaggtaacttgttgtctctaatacactttagaagtgaaacattaggggtgtttaggatcattgataaagatcatctaaatcaatgaacacttttcttatagtgtctataattgttagtgtcaaattttaacagattggggataacttgttgcccctaatacataaggggatttttataggagcatcaatattttaggggtaactttttgcccttaaaattcttacccaaatcgccttaatactttctttttttatagagccgatgattgttagtgatttgttctgtatatctctagcttgcttccatcacttggaaataggattttcttcttatagtgatatttgaaatctctcatttcaagtgtaattgtaatagttgctcatggattataagttattaaggaataaagatagcaaaatgggccgaagacgaaaaaataattcgaaacaaacgaaattggtttgggtttgccttaaatgggatttggtttatttttggattgacttgtctaatccatttaataaatgagtcgtatttggtttgacacgactaacatgaaagtaacatgttaatgacatatttaaaattaatttaggactgttataaataggtcatataatattttatatgtcataaacgtgttaaatagatcagtaatagattaatgagttgacgtgtttaaataatatttatttataaaatgggtttcatgagtcatctcgtcgtgttaatctatttataaacgagtcatgtctcaaatttagcttttaacaaaattaatagaatgaatgcgttcaaattaaacatatacctctcatacataaaacttagcactagacaaacacaaacaactactacccttaaaaaaggaattttaacctttaacttaagagcttgggataagctc

SEQ ID NO: 185676 - DNA, 3211 bp, Cannabis indica
aaaaaaaaaaaaaaattgagtgactggcctgtcatgaaatgaaccctattagtacagaactcttaacggttctttttctttttatctgttcggccaactcgtgaccatcttctctcactctctctccctttctctctgtatttttatactctttttcagtgtatatcaactaagagttatcgtttcccgtattgggtaactttccttaacaagagatattttattctactcttcatccaaaactcactctcatcatcatcatcgtggtctgagcggagtagtatataatctgggctctctgtttttctattttgttttgttttaacagagagaaaaaaaaaagttgaagctgttttctacctaaactataatcaatttaattccttggaaaaaagtctctttattcctgtgtttttttcctctctatagttttatctctataaaataaagaatctctttggctttttctcaccccctgttgttttttctccccttaaaatcgcagttttccttagtgtactttacaagggtttagggttttgtgcaatatttctttctttagtcacttgaaaaacaaggttgtaataaaaattcaatctctctcaagatgttctaaattgtctcaatgtttgaatttttgtaataataattattatttcccacatgtttgtaccacaaaacagtactaatctacaaatgtcttcgtgtctaaccggaggagggggtagaacttatgcattcgaattagaaatcgtgaaatcggcatcatctacatcaactcgaaattcgaatgcgagttcatcatctccaccatcttcaactctatcagaatcaagcaattctggtcttgcaatcactacaagaaagcccagaacccctcggaaacgacccaaccagacctacaatgaggctgcagcattgctctccacagcttacccaaacctcttctcaaatcccattcaattctcaaaattccctcctcacttcaacaaaacccacgcatactcgcccacctcattcgatgactccgccgatttgctcctaccgtttcaactcatcgacaacgacgatgaagatggctcgggcttcttgctccaccatcgaaaacacacctctcgagtcgaattgaagctgcctggtaattcttccacgtcgtgtcagagcccgggcgagttcgattctccgccaaattccaattgcgattctgaattgatggatttgggagagactactactaattcttctacgggatacgcttaccagcaagatgatgattttgatgcggaatcgattctcgacgaggaatttgatgagggaggaattgatagcattatggggaatctgacggtggattcctcctccaccgccgctgaatctagcgtcgtagggggattttgttacggatatccgatggggttggggttgggattggaagggagatttgaattagggttggggattatgagaagaggaggtggaggaattagtgctctgagaaatgttgatgaggggaactggtggagctttcccacagtcgatgtaatggagctttcgcccaagtttacgaaagctccgtctccggcgccggcacctgataaaaagaagaaaaagaaggcggttgcagcggcgccggcgaaggaaaagctaaaggagaaatcggcgcttgttgcagatttgatgaagactaataataagaacaacgaaggattgtcacttaagctcaattacgacgacgttttgaatgcttggtccaataaaggttcaccgttctctgacgatgctcctccgggatcagacctacctgaaaatgacgtcaccgtaggtttctcaactcccgcacggaaatcaaagtctcgcaaagcttaatttatttttttcttttttttttctttcaaaagacaaataataaaagttttgtgttggaacttttgattagttttaaacttttagtaaaatgagttgatgctttggcgcgtgtgtttcacgttccataaaatataccttttctcttttcagttcacttaaatcacttattattagttcgaaactcgacattggaactgacttttttttaatgtgccttttcagatttcttttttaattagttaatgctgttttatttaattattttcccaatgtgattttattgtgttccgatgttttagaaggggaacagtagtggagctagtaatattctatgaagaaaataaaagaattagaagaagaatattcatctagtatagtaataaataattaaaaaatcgaacttgaatatacttaaattaaacccctagcctatgtaagaattttaaaaagagatactgtaatgtaacctttcttttaataatagtaagaggcagaatgtgtcgttttctgtttgtttaaaatttgctggcatattagttagtgtgagtagaatgtgaaagaaaacgacacttgtcatattttgttggcttcaattataatttttatgatgtggtgccaaccagtgaatcacaggtctgtggtttttttgattttaattttattgaaattaatatgggcaggccagattggcgcagattgatttgttcccggaggcaggcggagtaagagaagctagcgtattgcgatacaaggaaaaacggcgtacgcgcctcttctctaagaagatcagataccaagttagaaaagtcaacgcagatcgacggcccagaatgaaggtttattttattttttaaatcaaagttgagactttcaaaagattttatgaaacataggaaggagacgtcatcatgtattcattcattatttcacttactaacttaatttggtaaatttcagtttggaaaggtgtcacactaaaaaacaaaattaaagaaatttacaacttttctttaatttttgccaaacttaaggtaacaccaattttttttttacttcgtcgtccattaaatgaaaatttattgttccaatttaaaaccaaagccactatttagattagaggtaagtttaaaatatttattatcgacgttttaaatacaccacctgtgtctttctcttttcgcccaagtttttctttatttttttggttttgtttttaaaacaagataacttttacactcatactcttaaagattaaaattaaattgtattctacttagttattttttagtaaggatataaatagtgaaatttagagaaaattatattaattattaattttttaaaa

SEQ ID NO: 185677 - DNA, 2051 bp, Cannabis indica
tccaactcccgatgaatttttctataataaattatttttttggtgtataaacagtgtaagaatgttccttttagtacaatgcatcagctcccaatttattgggaagcttcatcttctgtaatcagtaatctatatgaaattacatgtgttaaatgcaagtaaaagaatcggaacacacttgcacacaagtatgcatataattatatacgtgtgtgttttggtgaagaattattataaagaaatggatttgatttgcgtggtgactggtgagtgatcatatcatatcatcttctcgaatttatcaagtttcttcaccctttgcatggacctaccaaacaatgccagaaagactcctgcacaatggaaaagaataaaaaaaataaacaataggtttaagaatgaattcttctttctctttaagtgaaactactatgaaagtggttaaagggttaacatggtcacctgcaccaatgaatgatccatttgcaaaaacttgactgccttgactgctcaaagtcatcccaaggtttagcaaggtacctccaatgactgtatacattgttgccatttgtagtattgttgctttcctcgctgctctttccgactgccaattgcacgatttctttgttatttcttagaaacatgtttgattttaactattgctataaatttaaaagactgaaatgaatgattatatattaaagaaagaaagaaagaaaatacctcaagcacccgcactcgaagtttcaaatctcccgagtctagttggtcaacaaactcttcaatgcgttgaactctgtatggcatggacatggtgtagcttctagcctgaaagcattataagtgaatgttgttaatactaattcggattcatcaatctgaaggaaactaaagcaatgaagagtcaaggtagattcatttacatcatcggcttgcttccttatttcctgtacaagttgtgtccctgatggccgcttctgtttcaaatctaagagctcctgttgattgagtatagtaatagttattgcagaggattttttttttaaaaagattataagttaatcattgtttagaaaaattagaacctgtgcataaggtgccgcaatctttacgaaggaaaaatctggatcaaggatgtagcctatgcctataaaaaccacaacaattactcagttaagataagaatggtatgctgtcacatcttttttacatgatcactgcagatactaccacatttggtgatattaatttttttaaggcaagaatgagagtgagaaagagcaaccttccagtgtagaaaatgccctgataacgaatgtaaacgtggatggaaatctaaaaggttgatcttgtgcaattgcaaataaatcctgccataagagaatcaacacttcatattatagaacatgtatatggttgtttagagtgaagaaaaacagtgtgatacacaattgtattaacaggtcaagagatgaattcattgataaaatgatggcaggttcgtgtgcagttccattctagaatcacagtatctaccttattttggttgtgaatttttgtactattttattttttaatattgggagagagggcgttcgaactcatgacctcctctttgagaggagaggtgtactattactacgctatgctaatgacttttgtacttaaaatttaagtgtttttattttcatacctcgccaattgcgcccaaagtttgttgctgatctggtgtttgactcaacaagttgtccaaaaaatattgcacagatcttcttacctgaaatagagtatagaataactttaaggatgtaccgaacaactttgcatatctaaagatgataccatacagtaaaagctcctttcggtcaaaaaaagttgatgcgaacaggcaaaatacatactggtgacagatctccggttgcctggagtgctccaagatctattagacttgccataacctggtaggtgacattagtcaggttaagttcaatgcaaagaaaaaactggatagttcaacattttagtcaatagtgataaccaatgaacagatg

SEQ ID NO: 185678 - DNA, 9980 bp, Cannabis indica
  modified_base (79)..(79): a, c, t, g, unknown or other
gactttagcgccaaaactcaaaaataataaaaataaaatacggctaaaacggtatgggttcagataaggcgcgaaaacngagtaaccattggaaatggataacgaaaccgattcccaatgctcttcaactcactgagtcaactcgttcctccgatgcaactccttaacctccgattccgattccgatcaccaccacctccatttcacctcttctccagacccctcaaaccttcctcgttctcctccgttgctgccaccgccactctctcacagactctccaatcggaaaccctagagcttctcgaatggggatcgctctgcaaacagctctcggtgtttacatcgacatcaatgggcttctcaaccgcacagaacgccagaattccctttggccggtctcgggaggagagccagaagcttctggatcaaaccgtggccgctaccaaggtcgtggaggttatgggttctaaaccgtctgatttctcggcgattgaggatgtttccgagattttgaattcggcaagttctggagaattgcttacgattaaggagatttgtgagattaggaggacgcttatggctgctagggctttgtatgagaaattggatgaattggcttcgattgatgattgcaatgagaggtaatattggattatgaattatgatgataactttctaagcttatgaaatcgaaaataattatgagtttggtgatattttcagtttaatctgagtgtaatgttccacccaaacatttagatagctgctagtaattaattgtagaccttactatttcgaacttttggataaaatttaaagttcaacttaatgatctttgaactgcataatcaaatatttctctacttctatcaattcgcattcgcaagatctttaacaacttacattaaaaactcatgaaatttttaaattttttcaaatttctttgcataaggtaaataactagagttattgtttaagaatttaacgagatgtttgaatactataactgaaaattacactatgtgatcattttgcaaccataaatttacatcctgtagtgtgaattcaatgtggcaattttgctaatttaacatttttcatgttgttagtttgacaaatatttggtttgattttgtggaagatactaagaactgaaatgctttcatttccgatttatgattgggagatttgcggcataagtatttaatgttttgggattgtaaccaattggaaccattgatttttattagcggtaaaactacccgatgttactaaaagtgtaattttatccaatttcgttccaagagattcagtttgagagtttgcacgtgtttggacatgattaatacatatttgttaatacatgattaaatgggtattaatcgtgtccttatatatgctcatacaaactcacaaatggaacctgttgggacgaaattatacgaaattatgtcgctgctaaaaagaatcaatgggtttctgccggttacaaagccaaaactttgagtagttattgctgcaaatatgataagagctgaatttctctttcgacttagtggtttagcttttgaatatgataggcaaaaaaacagagaattttgaaattttgattagaattgaattctaaatttttgtctaatttgattataaataggtacttgcctcttcttgaactgctccagaattgcaatttacatgtggagttggttagaaagataggattttgtatagaatgcaatctttcgatcatacttgatagagctagtgatgatttagagattattagatcagagagaaagagaaacatggaaaagttagaagctttgttaaaggaagtgtcatctaagatttttcaggctggtggcattgacagtccattagttacaaaacgtcggagtaggatgtgtgtcggggttagggcttcccataggcatttggttccaggtgctgtagttctagatgctagtagttctggtgcaacatattttgtggagcctggggatatagtcgacttgaataacatggaggtgaagctttcgagtgctgagaaagctgaggagatagccatcttgagtatgctaacatccgagatagcaaactcgacaagagacatcgagtatcttttggataaggttttagaaattgatcttgcttttgctagagccggtcatgctctgtggatcaatggggtatgccctactttttcagaatttagtaaggacatagatgattctgtttctgtggatattgatcaaatacaacatccgttgctcctcgagtctatgaggaaacaaagttctttagatgttgtatttgatactcctgtaccgatagatgtcaaagtcggatatggcaccagagtggttgtgatttcggggccaaatactggagggaaaactgcttcaatgaagactttgggtttggcttctcttatgtcaaaagctggaatgtttcttccagctaaaaaccatccgaagcttccatggtttaatcttgttttagcagatattggagatcaccaggtaggagtttacctcaattatggcagataagttattggtactttttaagttttccattatagtctgacattaattttccacttgaagtctctagaacaaaatctctcaacttttagtggacacatatcgcgaattcgtaacatcttagaagtgacctcagaagaatcacttgtcctgttggatgaaatcggaggtggaactgatccttcagaaggtttggctctttcggccagcattttgcagtatctcaaagatcgtgttaaattagctgttgtgactactcattttgcggacttaagccgtctcaaagaaaaggatgaccggtttgagaatgcagccatggaattttccctggaaacattacgaccaacttatcagatcctttggggaagtagtggcgattcaaatgcattaaatattgctaaaactatcggttttgatcaacgtgtcattgaaaatgcccgtaaatggatggagaagttagttccagagcagcagcagaagcggaaaggattgctgtatcaatcattgattggagagaggggccgactcgaagcacaggctaaaagagctgcatctctacattcgaaagtcattcaaatttatagcgaggtactatttctggttcatgaattttctgcttctgcattgttttttcatttgatttcattatcaaagactcttacactatgattctcattagattgtagagctgattagttgatataattaattacttttaaggcatgtttacttaagggtaatgagaatcaattgtatagtattgattcctgtataattgttgactaaatttcgaaaatggagaaactggtgtggcccacaaaaattagggaaaaaataaagaaaaatattcttctttcatctttataaggaatatctttctctttcttaacttacattattttgttttatttttattaactaaaaataaaaaaacaaatataccctgcaaaaatctataaataaaaaataagtacatggtctaataataacaatttagtcaaattaaagcattatgattatctttactagttatacaaacaaaataaaataattctgaattccttttcaaatagtttagtaaataattatattttaaaccaattaatttcttccattgattattcccgattccaattaaatcgattctcatgggccaatttcttgcataaagctgttgcaaggattttatttggttgtttttcttgtttatttatgcactcttttccccatatttatctgaagatccaagatgaggctgaagatcttgataggagggaaaaagctttgatggtcaaggagaccttacaggttcaaaaagatgttgaaactgcaaaatcacaaatggaaactgtgctgcaagaattcgaaaatcaactcagaacagccagtcctgaccaattcaataatctgatcaagaaatcagaatcttccatttcatctattcttcaagttcactgtcctagttatggtgaggataaagaaaacaccgatttttatacaccagaagttggagagcaagtttatttgacaggactcagagataacataggcactgtagttgaagctccagttgatgatgaaacaatcctagttcaatatggtaaaattaaggttcgggtaaagaaaagtgacattagagctatgcctaatcgtaacaagaaagccactaccagttccaccccacgagtaaagaagcaggtaataaactggtgaacttttcattgtttatggcttttaaatgtctggaaagggattcaaatcgaaatctgaatacattgctttaaaattattgtagcttcaacagagcagagaattccaaactccaagtgataacagcaaagaaggagaggtttcttatggtgcagcagtgcagacatcaaagaacacagttgatctacgtggcatgcgggtagaggaagcttctttccatttggatatggaaatctcagctcgagaaccaggttctgttctctttatcatacatggtatgggcaccggagctatcaaggagaatgccattgagattttaagaaaccatcctcgagttgttgattatgaacaggaaagctccatgaactatggctgtacaattgcatacataaattaaaatctctgtttctatgtgttctgtcttcatgcatatcaatccgaaaacccttttcaatatcgtctttctgtatattatgaaaaattcgtttgattttcacaaatttgttagttataacagtaaacaacttcaaaatctttttgtaaagtagtcataaaaaaattgtttttaacttgttgagttaagcattcatttgttgttcactgttgctttagtaaaactcagatgaatcttatcaccttcttctattttcctctgttttttttcttgtatattgtgtataaatctaatggtcactatcaaactgccagtttttctatctctaatttcaatgactcatacataagatttcttgtaactgatattcatcatggttgtttaactttagtcatagcctgcatactctctctctcatatatatatatatataaaatgtatatatctttcttgaaaagcataatttgactgaataagactaaagggagattgaactagaagccaaaattggtttttgcttctttggcactatgcctgcatcttttccttaccttctttctatcaaggtacacgtttctctcctaaccaaagcaatttgctttactttttacttctttatttaacattttcatacacacttgtcttgagatcatcttgaattgtttctgaaaaaacaagaaaaatgttagctgtttttgaaaaatcaatctctaacccacctgaagagctgagcttgccttcattgggtttagagaactccatgaacagagaagagatcttgcagacttttcggtcatcttcaacagaggtcaccgtttacaatcttacaaatgggaatttcatggctttgtctcatgatgacactagctattctcacccaaggtactgactaagttgtatattgtttgttattctttcatttttatagaattaaatagctgattatcttgtttttatgtcaggtctatcgttgttttggacgatgtattttgcattttcattggaactttggtgaacacttcagatctcagacgccattatgggctcccgagacaagcaacagaagccatagttgtggttgaagcttataaggtcttgagagacagagctccatacccgattgatcaagtcatcaaagatctccaaggaaactttgctttcgttctctttgatgcaaattccggtacccttttcatatccagggttagttctaacttcaaccatgtgaactttcattaattattttcattcatattttctgcgaaacaagatgcaggatatcaaatgtatcgggaatgttgctttgcaaagaagaaactaaaaaaagtttatttttcttgacaccctttgttaataactacaaacactaattaatgaatgtgattaggatcgtaatggaagtgttgaacttcattggggattggcaggtgatgggtctttagtcttctccaaccattccaatatcatcaaagaagcttgtagcaaatcttatgggccctttcctccaggtaatttcaaccaaatctaaaattctatgtatataatcaataaggttaaaataaaaatatcattttgcaccttatgttttttaagagataatgatcgaaccctctgttttgttgaacgatatttcgaaccaataattttagaaatgataaaacattatatcctattttcaaaaaatacaaaattcaaattgtcatttcacaaaatatagagttcaatcagtaaattttgctaaacatagaatccaaatcaggaaggtgtatgtatagtgttatacaatatattttacttactaatattatatatatatatatatgaatgaatggcaattcagggtgtatattcagaaatggaagtggactgttaagctttgatcatccattgaataaggtaagagcaataacacacaaagatgatgactttgaaaacatctgtggagtgagttttcaggtggacttgtacactcgaatcccaagcattccacgttccggcagtgcttctaactgggccgatcaggaatcaccaccaccgcatgatcaccacgatcacgatgatcagatcgaattagacttcatttcttaatcttcttttctattattatgtattatctagtcttctgctcagtactagctagtgctgattttatgaagatttgcactaatattgaaataacaccaaaatattattggcataattaagcttttgaatcttaaaatacaaagtagtaataagtttttaataaaacattattttttcattcataaagttaaccgataaagattaagataacaatcgtaatgtatttatttagtatgaaaaattacatataaagcaacaactgaaacaaagtaacaaaacaaaccacatttattcttgattgtatatagtttcttcttcacctcaactagttgaacttaattattatcattgtttcttccatcttcatttttcatcttcttatctttgtcaaacgacttgtcgttagatgagctagtattactatcactagttggtttcttagtgttagttaggtcaccaaaggaattaagattttttcccaaatcgcacttttctagattagctttgcattcagctagtaatggcacacatatttgaggagaggcatagctattaccgccctctatgatggtgccaccctgagaaggagcatagccattaccgccccatatagtggcaccaccttaaggaggagcatagccgttaccgccccatatggtagcgccaccttgaggaggagcatagccattaccgctaccgccccatatggtgacaccaccctgaggaggaacatagccgttaccaccctgaggaggagcatagtcattaccgccctctatggtggcaccaccctcaatggtggtaccatcgaaaccaattctggttccaataacaattggtgattgcggcaatgacatcaccggaggtattggtgggattgctggaatcggtgggatcggaggcataggtggtataggcggcataggcggcataggtggttgaaatggcataggtggcagtatatttgagatttctcctgcgatgtttacatcattcggctttattagagctgtttgatcactgtcatcatcaccaccaccattgtggtgatgatggtggtggtgatgatgagtcgagatagtaatagtagttgttgcggggtgattattacacgagccgagcaaagaataagtgattgaaaggctattgtggttgtgatgagtaacaaggcaaagaaggctaaagaagtagtaccacattttgctgcatccatagttttatgtactatgttttatagtttatgaaatgtatatgtaatgattgatgataagcttactatagatatgtatatatgtgtgtatagagtgatgatgatcatgaatatgagaaggaggagtttgttttggaaggttaaaacaagaagagggtttcatgcattttctcatatcatcttatttatgtgatgattattaaacaatacataatacttaagtacaaaattaataatattaattattatttactttgaaaatttttaggaaattatataagggagaaaaagaaaaattcttatatttgaggaattttgaaaagtagtacaaaattttaaacaacagtaattgtgtacttatgttattattagtactgcctaaaaatatttctcttagggctcgtttagtacgttgtattgtattgtattgtgttagattgtattagtattattcaatacaatattatgtttggtattgacttgttttaatagattgtattatattgtattgtattatattaatattatttaatctgggtctgggtttcgggtcaggttcgggtttaggtcctgagttcgagttcaggtttgggtccgagtccggtccgagttcgggtccgagtttgggtttgggttcgggtcaaggtcggggtcagggtacaggttggggtcgggatacgggtcggggtccgggtccaagtcggggtccaggtccgggtttggggtcctgggtccgagtctgggtctcgggtctgtctggggtcgaggtctaggtctcgagtccgggtccgggtccaggtacgagtcggggtcagggttcaggtctgggtcagagtccaaggtccggggtttggggtccaggttcggggcccgggactgggttcgagtcccgatccaggtctgggtcccaggtccagattggagattggtattgaccccgaatcctttgtaaatattataatacaagctaatacggatcatttgttatgtattaaataatacaacatacattgtataaaacatttggtcgtaataattaatataatacattattttatccaaacatggtgttatttattattcaatacaataaacccttatacgacgtaccaaacgagctcttagagtagttcttcatacgaataacaaaaaatgttataattatttatgcacattttatatactttacagataaaataatacataaagttaaataaagtaaaataagaaattgaaatattttgttgaaattgtttgtttggaaattttaaataatagtatatccttgattatgaaatatcgattgctcattgatcctgtaaatttaaattgtgtgaaaatgacgtaattgaagataaataaaatataaattttcctatgagattaattgagaatataatgtgtataatctatttttaatcataaaatatgaaataaaaacattgtaactaactcatcttaaacacatgatatgaatattattatgttgaataataaaatggttatagcatatatgaaatattgtcatttactctaaattatctctcatttatatggaaaataactaataaattttcacataaagtattttgcacttttttttttttttttttaactgacacacggtattttaattttattatatatttttttttacaaaatctcataaagcaacataaaataacgtaaaatcaatataatataaatgtaaaaacaacatggaattaacatagatataattttttttgtgtaaaacaacagattcatacttcctttaagaaaacttttaatttgtaaaaatgtttttgtaatatatctattttttttattaattataaaaaaaaaaatcttataaaataaaattcttacacaaatattaaaattacatttttatatatatttttacgaatttcttttacaaattttttacttgtattttttcagtaaacattgttattttcatatcttttaatacataatgtgaaatacataaattaccatatcagtatgaaaattacatataaagctaataccc

SEQ ID NO: 185679 - DNA, 4837 bp, Cannabis indica
caatacataaaattttaaataccaatgacaataataattaatataaacaattctttaatttagtaaacctaattaagaattctgaataaatataatattatccaaaaattgcattgtaccttaaaaaaggttcgagtctttctacttctgtgatgctcttttctcaaaactgcatgttttggtacaaaaatgtaagtagccatggtgaactccaatctaaattagcattttaaatcaagtgtttttcttctttttgtgtttgttgttatcactgccattcctctctctcttcatcccacctttctgaccttttttgtgtccctggtatcaaatcgatgggagtcctttagcaacaaattacatggaatttaatgccaaaaggctaggatgtgcatgtatatatatatatataaatatatataaatgacaatgtacagatacctcagcagagaaagtcttgagaggatccttatttcttctgaaccttttcttggatccattttggcgaggaacattggtatttcccatggcagctcgagcaagcttaacaaccttacttgcttctcgagttgttgcatccaccaagtattcaggaacatcgcgtaggtgaggagcagggggcttcttgcttaagaccttatcgtgcttcagcaaatctattcaagaacaattaaataaaagagatcatttcttgcaacttcatgctgaagtaaaactaaaatatatgaaaaagcaaaatttgatgtattcaaatctgccagtctcattttgatgtctcgccttctgtccttaaataatgactcacgtaaactcttttactttatttgtataataaataaataaaaattgctaaggaattgtcacattggagggacataggagacaccaaaatggccagcactcccaacatgctcaagacttaatttcatttacctaaatctcctggattagcttcgaaatgagccttcaacctaaatacagaaaacacaatcagaaatcagtccaaaaacataagaaaaaatcagatcagggaatgaggtgcaagaggttgcttgggtgaaagagaaaaggcactcgattaagaaatcacaaaaataaataaacaatgggggaaaaagttataagattaagaagtgccagtattcttgggaatattatataaggaaagcatagaaaacataagtaatctcacttttcagagttaagaatttcatttcttaaatcttgagctcgtgattctcggacagcaattttggtcacactctttccaacatcctgtaaagggtcattgctttgaatcagttattttctttgaagtcatttcaccataaaagacaaaacaaggtgaattacaagaaatgtaactattgaagtataagaaggaacaagaaattcaacactaaaagatttatgaccaagacccatacacaactaacaataaatccaagtaaataagtgcatctattatacaacaaagtaataagttttaaaaacataggctagaatagattttgttttaggagctctacatactacatagatgcatcctacctattcaaccaaagagaagtgtagtacgtttcatttttctctctctctagaaaatactggtatattaagaaataaaataaggttgtgcagtttcatccattttaaaggcaaattaaactactgaaagaagcattggggatatataattaaacatataaacctattttttgaaccaaaaaaaaaattactcttatatgtaaattctccactgcacactaaaaaaggttttgttatgagcaacagactcacctccgctctgtaccgtaaagactccacagcattttctgttaataaaggaaatggaacaattaaattttcctccttgtctccttcatcccctaaaaaggattttatttcctcgaagacttccatatcctcaggacaaacctgattaaaaaacgaaaaagaaaattaaaaattgccaagagttttaataattgcatggccatacaacatgccaaaaactcaattaatggaaacagttctgttttacaacaccagtacaatcatatttaaaagaagctagcatccttgtcttacacccaaaacttaaactacctaatgcacacaatatcatatttgatttgaaggttgaatccaacactacaataccagcattttaacctggcattataattgagcacagccacacagttgtacgaacaagcattatttgaaattattggactatgcctttaggtccaattttgaagcctggaggtagatctaacctgggtgaattcaggtgtaccaaccagcttcagtataattttagggcatatagggagtggcattatagagaaggcagtgcatgaaatagttattataaattaacatttgtgtccagtctaataatcatgtctcctgcacatttaagtgaagttcggccattgacactcacaagtgagacagaagcaccggtattaaatgctcttccagtacgtccaatacgatggacatatcctgcagggctttgaggcatttcaaaattaacaacctacagaacaagcaaccagggtgtttttaggagcttatgcatccattataaaagacaatcaataagataagcatgcagtatataatatagctttagaataacaaataattgttgaatccaaaaatccacaatttccatagcatcagcataccgtatatacatttttgaagtcaattccccgaactactccaaactcagagtctaatttttgtttggcattctttctaaactttttctgtttattattactctcaatgttggcttcttccttctctttcgtttcactatcatcagttgcaattaagtaatcaaaaagcccagcattgaattcctgtcaacaagacatcataaaagttctcttttaatactgtgatgatcaaaagtaaacaattaatagaaattgcacggaaagtaaaaggtccttcctgtgatagttaaatggagtgtgcagcaaacctcaagaatatgctgacgcgaattttgtggcaactcggcattgagcacagcagatttaattccaaactgcccaaaaaaattaaacattcaatagaaattgcaagaaaaggctgccagagtacaaatatgttctttccaaatttttacaaggctgtttgttatggggcagaaataaagcaagcattaaacttgatgacagattagaagtttttaatacacggtgaagggaaagctgcagaagtcgataacacacaggaaatatttcccattgaagcgtaatttttaacatagcaataaaaaaaattgaaggaacatgagaaaaatagttttacttacaaataagtaccaaattataatctatatgtaaaaaaataattattttgttgattttgttaatatatataaacagattcctatgcacacaaaaagctcatattcccgcaaatcagggacaagaatctagtacacaaccaaatacagtaatatagctttctagacaatctcaactttccaacaaaagttaaaattttaaactcttgcataccaagccacccctaaatcaatgttcctctctcttcaatccaattactctattcctctcttctcgaatttcataccacaatgttattagagaattaaaaaaatggtaaaggtttaatttacacatgtggatgtactgtgaaaagaatggccataccttttccagaaataatcttaatctaaatcccatgtcgattgtatttgtaaatatcaaaacctttttctgaaccaattccaacttcaagagagagagagtgtaaagtaacttatcccgatagctgcatgatatctaagccacaataaaataaaatatattgttatttcttcttgatagtgagcatacatcacatttgttgtataagtaggaaataaaataaaaaaaggaaagagggaaaaagacttataatagagttatgacctacagaaatttagtaatgaaaaaacatcatacccaaaattgctgaacgttttttgggataatatcatccttgacatctcctacttcaggcagagtcaaaatgaatggattgtgaagtataagcttctttaacttctcgacatcatcactgccaagagcaacatttataaatcaaaatgaattaagcttaaatcccacaaatgaggaagagataggcatgaataacaatagtaccaaatcagttgaaacttgaaatttcccttttaattacaaaagataaggcaaacctaaataaaagattagtaataggaacaacaggccctcttactaactgactaaatcaaggattcaatattacctaggagttacaattatttgcaaataaatcagaattgaactcacaaaacagcatacatatgttgtcagaagaaataatatatagacaatattaatgaataatttccccttagcattatagttaacatcaataacacaccttgacgtagcagacatcaaaagacactgacagtgcttaggaatatgaggtgttaatgcctttatatcttcttcaaagccaaatgacaacagaagatctgcctgaaaattaatataagtcaacaattctacaagagaacactaagcaatcatacaatcatcgataatattcaattataaaaaataaggaaaactctcttttttatcaataatttttgcctcactttcaccccttctagtttatgaatcgaagatagtcacatgtaatgacaaatcagagccatattattagaagcttgtggtataaacaggctctgctctagtgcaagaaaataatattctgtttcattttgaataaggtctgtgggatacggtattac

SEQ ID NO: 185680 - DNA, 7842 bp, Cannabis indica
tcaggtatgacaaaagtctaacattccattcctgaactggttatctgactctagttgttgattggaggggcttaattgtgtgtttgttctttctactcttttaaccataatttatcttcttaggcagttccagagaaaaccaggagggtcctggaggtccttggacattttgtggactgttgcctttgtttgaccctccaagacatgatagtgcagagaccattcgtagagcactaaaccttggagtctgtgtaaagatgattacaggtacatgattgcggcaggttctataatacagggttgtagatgcacatgtactaatttagtcaaaaaatattaagataaaagaccctgagaagaatttttagaaaacaatgatcattagttctggcttgtttacataggtgaccagttggcaatagcaaaggagactgggagaagacttgggatgggaacgaacatgtatccttcttcttcattgctagctcgtgataaaaatgaacatgaagctctcccggtggatgagctcattgaaaaggctgatggttttgcaggcgtatttcctggtatttctattatgtttttatttagtatgatatccaatggccttatacttaatacctactaattcatgtgattattgttgtgcaactttcagaacacaaatatgaaattgtgaaaaatttacaagagaagaaacatgtagtgggaatgactggagatggggtaaatgatgcacctgctttaaagaaagcagatattggaatagcagttgctgattctacagatgctgcaagaagtgctgctgatatagtcttaactgagcctggtttaagtgtgattgtcagtgcagtcttaactagccgagctatattccaacgaatgaaaaattatacagttgagtatcaatcttctcttatttacattcacattattataatattgtatagtcagtagaaattctagtctcatacacttttgttttgagcagtccgaaaatgtaattcccttgcatgacattatcttctgaactttttaaaattcagtcactgattaatcttgaacaatattgcagatatatgcagtctctataacgattaggattgtggtaagttgtgatatttaatttttgaagtgcttagtttcacttagtgaacttgagaacaaggttttagacattgatgctgctacttttaacattatcatttatgtttacacttgctgttacctgttgtagcttggcttcgtgctccttgcattgatttgggagtatgacttcccaccattcatggttttgattatagcaatactcaatgatggtaatgttcttggtcttctcttacaatacaacccttttcttttcttaataagctctttatattatttgatataaactgaaaaatagacctatctaattcgtgaaagaatgaaatttactcttatcatctagtacatgacaatttgatcatgtagtagaaagtaataatgtgtaaaattgacaataacttcataattctgtttcaaaaaatgaattatgtaaaggctagaaagctatacttaattctgtgacagaatacatcaatggattcaaaagtagatataagaaggtttttacattggccttttactggatatgccttagaactttatgaaagatcttactataatagagaaaaagctgttctatattaacaactcagaatcaaataagaactggatgacttttgtaataggaaccatcatgacaatctccaaagatcgagtaaggccctctccaaggcctgacagttggaagctcaaagagattttcgcaacaggcgttgtcattggcacatatcttgcactggtgactgtattattttactggctcataattgacaccaccttctttgaggtacattactaaacacacttaaaattcatatatttcatgagacatgatcaaaattgaatcctaatgttgaactgttttattttggctgcagacacatttccatgtaagatcattgtccagcaacagtgaagaagtctcatctgctgtgtatctgcaagtcagcataaatcagccaggctcttatattcgttactcgtagtcaaaagtttggctttcctagagagaccaggagctcttctgatgtgtgcttttgttattgcccaactggtacattgtcttccaaatacttataattttgtctatactgaacatatgaaattaagcttaaataatactgaatggaacttaattttgaaacttttaaaccaagcaaagttactaaacttttgtgcaatgttttaggtggctaccttaattgctgtctatgcacatatcagctttgcttacattagaggcattggatggggatggggtggagtcatatggctatatagcctcatcttttacataccccttgacattatcaagtttgcagttcggtatgctttgagtggagaagcctggaatctattatttgataaaaaggtcaggagatgtacttttattacctctgttatatacaaaattatttagttctttacgatgactttgttcttattattacttgattattttttgggggtgtatttcaatagactgcctttactactaaaaaagactatggaaaggaagaccgtgcagctaagtgggtactttctcagagaagtctccaagggttgatgtctttagatttggaaaacacaggaaggcgtaagtcttcgatgattgcagaacaggccaagcgccgagctgaaatagccaggttcttttacaaattgattcttactgcttaatgtttggatcagtctagtttgaatcttaatttttctgatacactatagcttagttttttgatcatatatgcaagtgaaaattcatttaacttctagtaaaagtataccatagttttatcatgacatcatgtcatttacctttcacagattgggagagttgcacaatctaaggggacacgtagaatcaatgatgaggcttaaaaatttggataacagtgtaatccaatcagctcatacagtatgaaacgtggagaagtttaccaatgatacaatctctaatataaagcaaggaatgctgcaagaactcatgatttttcatttttgaattctgagggaagaacccatatttagtccttttttttccctttcaattccaatttttagtcctctttcaaatttttatcataagcttcggaaatgttgtatacagaattattgttgagaaactcgcacaagaataagctttccaagagcctaggagctgaataacatagcccaaaataactcccttgtctgccttattaaaattttagtattcccctgtataaaaatattgcagtacaatgaaatatggacacatcccatctataggctatcagaaatagtaaatggtcctagagccaaccggtagccctagtataaccacgagatattatactgttatcatattatattctacctattttaatttaataattataatttaaaacaattaattactcgcaaaaacggcacctcgtggtaatgttaagcattattgtgattaatagcaaacaatggactgataaatcaaggcactgactgaacagcacaggtagaggccacatttgtgctgaacaaacatatgaatttagcatcagacattccattaagaaaccgtgatataggtacacatgtaagttatattggggtgttgtgttgtacaaaagcaaataaaacttggaattttcttatattcacccacaaaatgcatatgcaaaaccgaaaaggaaacaaaacaaggacattacccgtaacacaagcaaaatacctaaaagtgacttttgttcctcgtgacttttctttattaaggaccactggaccattctgcacatgcgagctgcaaaacagaaacctcaaagagacgacatatgaaggctgtgttcacgtcccagcctcacggagttaacataatctgttggaccatgtgctgagattccaggaagtgcaagtccgattttcctcaccactatctcaaaccacccttcgacgtagtctttcccgtacacgtatttcataatataacttcttatacaactcccatatggcattaacatacactgcaaaagcatttctcagctgaaagaaatttttgttcggttcctctttcaccttctgcacaaagaaccataaattacattaaataaaatagcccaaattaaatgaaaacatcgaagttaacatgaatgcatgaatatttacttgctcaacatagaagctgtcgtagtaaaggcagaccccaaaatggtgatacaagaacgttttgtcatcatagggcaaccgaggtacaagatcgttgcagtagaccaccctgatgtaccttgggactggactattcaaatgggattccatgattttccccagctccctgttaccaattctaggttgtccaaatgtgtagacacccaagagcttctgcattagctccatttctttgtgaagcaccagcactgtggggaacaatatggccaatgccccacctaaactgtggccggtgactacaaatttcgcgttcttgtgctcgtctagtaagcttttgagcttccttctcacagcgtagtatgctgacatttccagcatttctggttggagttgcccttcactcgtagaagatccaccttgtcctatgtcagatggttgagtgcgttttgaaacatcactgtcgtttgactctctgtgattcattagaagcttactttgaaatgttgtgacatcagttctgtttcctagacctaaagcttctatgaatcccatatgaacctttccgaaatttggtatctcataccatgaataatcaaaatcagtaatccaatcatcagcatcaaaaggttctgtgccccggaagctaatcaatatcaaatttgcatctttaggcttgtcgcagagtatgaatacttgagtggacggctccttttggaaatctatcacatgacggtgaaaattcaaaaatcaaaataaggaggaacaaatgatgcctaagccatggaatgtttgcgttaaatgattctttaatatcttcgactgtagaaaagcatattatttgttatggagatggttgtaaatcgtcttctctagtatgttgtaacttttacttgcctagttgtctcagtactctgtttttccaataaaaactaacatgaaaaggtgagggggaaagcatataaacaaggaaatactctttctaattgaatttggatggaaaaccacccacaatgaaataaataatatatttgaattttaggaagaaaacatgggtgaaagaaaaagttgagttcacaaaagaggctctaattattttatatatctactaaaataagctattctaaaagacaatatatacatgtgacaaaataagctacaacaaatcacctagccagtatatacacgtgccaacataagctattctaaaagacaaaatagaagaataaaggggattacaaaagatcatttatttacaggtaatatttggctttaacaaatacttacaattccagccgttgtaaaagtccacgaaatgcatctgttgtgaagttcagattaaccaagttagtgtctctagaaaacctcgtatagattcacttggtggccccctaaaatataaataaataaaattgaagagtgattgacaatctaacagctgaccttccagtgatggactacgacattattaaccacttgggcattctcatatgctaacttcgatgccataatgcagaggtccataagagcccgggttcctatttccacctccccatcaatttctctggctaagctttcccccttgtgaaggtctatccgcccatctaattgtccaattgtactaataaaagtctctgtgcccctcctcggcaccactacccttcctgcctcccaacacaaacgtaatcaaagaaaaaaaatcaatccaatattttccataacccttttgcctcaaatagtaagtagctctttccagaacttgggcagaataaattcttcccctaaaacaaaaatctaacataccatatagtttaatcagcattgacattgcactttccatataaaatagtgcatagaaataaagtttctttatcagaaaatgaacatcttgcaatgaattgctctaaaattataaattttccaaattttgggttccggaatattaacaaacacatgatatgcacacatacatataaagaaataagtaagcaaatcaattaaaacggcgaggggagaagagtattaaagttaccacagacaatgttgcagaacaagccaatgaggttaccgttctgggaaaggagattaagaatgaaatcgagcagatatccagtccactccaagggtttcccaaataaagctatgattttcctagcaattatggaaacaacaataacccacctgttatctatgacctcgttacccaaaatgtcgtcatctgagctctccaagaacattagcccactaacaatgttacccatcaccgcgtagcgaaacaagtcaccaagtccacccttctccgggcgtacaaccacgtacctgaacccatcttcataaccgttgttttgttgtgacgtggaagccataactgctaacaactcaacccaactccctcctctggtttgactctatctctattattttattacagcgttgttcttccttttcatttttggttgatatgggaaagaaaccatttttatagataccataattctccccaaaagaaaaagaaaagagaaaagggctaacgattacgtgtaagcaggagaagccgaagtgtgcgtgcgtaagtgcgttgcagattttgattgaagtgccatatatatcattatggctttgctttggctcctattgcagatttggctttgatagtgtgaaatgacctgcatgaccttacttgcaaaaattaagactatgtttggtaggaagatacagagtacgaaggacagagatattagtagtagatgttgagaattataggtttaatctcaaaattaattagtgatgaatatgttattatatatatggctgaatactttttaattaaggttggataatgttctctaatatttctctcaaaatggtgactatttttgctcattaatttaaaatcaccttatcacatgtcgtgcaattttatttgttttatttttattcggatctcagacacctttagactatttgaatctcatgcggctaattaactatctggatatataggtgtagattgctaaggatatgactctaataacatgttaagaatcgtagagttctatctcaaaattaattgatgatgagtagagtaactatcatttcttatatatgactcaataattcttaatccatatgggacaagagtactgcttagtacgtactatctctttgtggcgttttgtaaatttagtaatatttattaaattaaattaagtgaaatttaatatttaatcaagatatatttagttggtgttaggtattatatatgccttttattttcatattaaaaagatagtaactctcctttattcttatttaatattactcaacagaaaaaatatatagaaatattacaggtgatagcatcagttttgcatggtagcatcagttttgcatggtacctctccttttattttgttgaatatttgatattaggtataaagttgtaagaatagaaaaatattaataagtgaaattacaattttatctttttgatcataaatattgattactttttttttcgcttaacaatattaattacttttctctctctctcttactataaacaatagatatgtgtggaaatggttagccattgat

SEQ ID NO: 185681 - DNA, 2886 bp, Cannabis indica
gtactaaacttgtatttagataaaacgcaaggtactaaatgattacacaccctaatatttaacgatcaaaaacaaggaatcgattactagtatatgcaatgattcaagagaatttactcacgtttgccaacattttcggatgatatccgcaatagcaggatccatatcatctggaatatcgagacggcgatgttgaaatccaactgcaccaacaacttgcattggattcattccgccccacggctgttgcattgtagaaagttcccataatattaccccgaagctataaacatcacacctacacatcaaatcacatatttttttagttcaaaacatataaatgaaagcacgcggtgtaaagtaagaaacaacgaagcatacttctcatcggaaggttcgtttcgtaacacttcgggagccatccattcagcctgacataaaaggaagaattaagtgtcattaggctcttttcgccaacatttgatcctcatcaagaaaattaatgaataaaatgtttacgggtcgattcaagaattcaagtttcgtcacaagaattccattcatccaatgggaaacataaatgtcaactacgatttttgctttccaaactattaacattaccaaatcatgccctctaaattattttgcctattaaaaattcacccgaactagtgttgaaatataaaacttttgttaagctttatcacacgtggctaacaaaattctgatacggttgatgtgcctattataaattcacccgagctttatcatcattttaaattgcccattttagcactgtgaatagttcggaaagaatttttatttggtaatagtaatacttcggggacaaaaatcttaaatggcctaaattaaataattgaaaatatattatcccggttcccaacgagaaagagcgggagcaaattggtcgcatggcttaggcttaccgttcctgcagtggacctcgaagagagaaatgtgctatgcttaattttagacagtccgaaatcacagacctaatggcaggtacaaaagttacatcaaaatcgggtaattgaaaacataacatgttaaattatcttgcaaaagaaatcagaaaactaccttaactacccaattcttatcgacgagaagattcggggacttcaaatcgcgatgtacaatcactggcgagcacgtgtgcaaataattcattccccgagcctgacaagttagttggttacaccaacgacaaattagtgaatacaaagtttagtataagaaacagattttgattgaaattagaatacaagaaaagaacaacataaccatacagcatcaagagccattctcaaacgccgtcgttcatctaattgattgttaggccgatgaagtaacctatataaactacctctgcgaaatacaattatgtttcagattttggcatgacatgatcagtaacaatctcaaagactaacagaaacagacttattgtaagctatcagcacgaggggtcgcaggacacgacattgagatcaaaacagaaaccataaaacaagcataaaattatcttgtgttgtattggtatcatacaaagttgattatacgtccaaaagcggggaaagcgcgcatacaatatacaagattgatacaaaattcaaaacgagtgtatcgatgcatctccttcatttttttgacatctagatagttttaagcgtaatttttttatatgacagcctaaattatagttatttaaaacatcgaaattttcgataaattcaaaatagtttaacgtaccgaaaataaaacttaagcagtctgttacaagcgtgatttttttattctgtacaatgcgaaataaacaattcgaaccttactttttatattgtaaattcttctaaatttctcaaaatcttacagtatgccttcaataattataatatactcaattatataaaaattgaaattataactattcaaacatcaaaaacacaaagggatgcatcggtacaccaattttcagaggatctaataacatttagtcaacaacaataacaaagaattcatctgacaatgcttcataacaagagaggaatatataataactagattgagctaagacagacaaagtgcaaacaaaccttggaagaaactccgtaacaatcgaaagatttggagttcgtgtcacagcgcccatgaacaggacaacattgggatgtctgagtcttttcattattcgaacctttttcatttaacgaagaaaaaaagatcatttcaataagtaatccaatcatagcatggtcgtatgatgattcaaaacgataaatgttttatgcactatcgaaatgcaaggcgacattcttttagatattatcgacacgaacactatcataccacaaattcttacaaaacatgcaattaatgatgaagaaaggcttaatttactaaggaaaatgaagtaggctctacctctttcatgaactcgacgagtgattcgcctgaaatatcttgaaggaacctcttcacagcaacgtcctgtaaccccgcatacgaaaaaacatttgaagcagcattaaataacaactcagaaaggaagacaagacaccaagatcatagataccatctacaagtcaaagctacaattacttttcttttgttatgtattgttacctaactttcgggggaaaatggtagaaaacggagaatcacaaaagagcgagaacggagtttaaaatgagcataacattagacactatttacaacatatgacaagcttccaaactcggttttgcatcaaagctatttactagcacaaaattttgaataaattatctattttcgtctaagattgttgaagaataacttgtccacatgcatacgtagttatttggtcaaattcttagaaag

SEQ ID NO: 185682 - DNA, 3955 bp, Cannabis indica
aattaatatttaatgcaaaattatgtattaattttaagcgcactaaatttttgggttaaataccattagtaaactatgacctacaattttcaaagccttctttcttacctttccagtctttcctttgtataagagtgttttctttatattataagagagagagtatgtcgggtcttaagccaaaaaacaattagaccttttgtagtagtagtgaaaattttgaatgtgctattttgaaaggaagaaaaattgggtcttttctcttaataaaatctaaaatatagcatttctaaaaaataagttgtgcattttttagaaatatagtgtgtttttagtaaatagtgataaaaaaaattaaatatagtattttgaaaaataaattaagtttttttggataaggagggaccataaataatggcccagctcgctccaccattgggctgggcctagttagagtaggagtgtcctctttctactattataagagaatgagtcatttgtaattttccaattttagtgaaagttgtagtacttttactatagtgaaatccttctaccaattaaccaattgtttcatctcaattttatttgaagttcttgttttcaatattatgacttttgttgccagcacactaaacttcgtttgggatcagtagcagtagagaaagcaagctatgacatatcaagctatcaacctattaatctcataagtataaagcctgggatgatgagagagggagatttctttacttggatttcattatcagatttagacagactgactcttaatttagaataaagaaatcagagaaatgggattgtggttgtatagtgcagagacaaagctattattcccttgtcttctattcaacaaaagaagcgttgttctagtaactctctctttctctctcactcactcagatatctcgtgtttatttacagtgttactttattataaacaactactcacattaatccttcattaattatgatatgcttttgtttgaacctcttttccttttctctgtctttaaacacttgtcatttggttactggaaacaagggcaaccaatctgtttggtttggctcttcaaaaaatacgatgccaattcaattctttattgcatgtcattgtcaaccatgattttgccttttaaacattcagtcatgtttattaaattaggttttacagttacagtttctcttttatgacaagaatctgaagggcacaaaatcataattccctctcttccctaataaattcgtgatttttactgcagtttcttgcccatactgaatctccatagtttgtaaatgtcaaatgtacatcattatgtattagattctacatttcaaactactaataagtatccatagaaaattctttttctccagggaattggcaattatctcttacttgattactaggcactaggcagagctacatcatttaatctaataataacaaagacaaaacacttaccaatatagtaaagttctttaactgtctcttacacaaatctcaattgagacggggtaaagatgatgaaacttaaactacacacaaagaaatattatccatttatattcatatatgtgcatatgtatgtgagtgtatttgtgtctataaaaacgtgcaaatatagactgggccttcataattttgttttcctgatgaagcaaagcaatgatatttcaacctaaagacttgggattgcagactttaaaagtttattctattattagcaaaacgcagttctcagtcaattctcaatcaatccaattccctcatttttttcatatgacaaaatgacagtactgaccaattgaccaattgataagataaagaaaacttctcagggaaagcaacataaaggaatgctctgatactcatcaactctagcaagcaaaccaaaaaagtaagctggaatagattctgaagttaagcgtgtaactaacagattaaactggtttgagaagaaatgaatgtgagagagactagaaagtggaatttgaatataaaaacatacaaaattgcagctaaagtaatggaagacacatatgtaatacaacattccataattccatttatgatgaataaattagccattacataaaaatctataacagtagttcgttcagttaatctaatagtaaaacagagaaaacaaactactgtgtgctattttattgaattgcatggcaatgatacatgtccaccaatcagcatatgctctatcagtcgtgaattctacaaaaaaaaaaaggaaaaaagaagaaaaagagaaagaacaaaagctacaacaattacattccaaaggattaaaaaaactgtcctcaaatttcttttaatacagctagggagggagctccccgcaaacaatgtccaccaaccacaaaacttgcttcagtctaggacacaaagggtccttatatgtcatcatcattacgatatattgaaagatgataatcgagtaatcatatggcaacgaacagagaaatgttttaaaaacaaatcatataagaattgtaatgaacgaaattcgaaggatcataccgtaaccacacaacagaaagaattatgttagccagcggccttcttcccacctgaatagtaactaagataccatctaacaaatttcttcaaaccagtctgcagatcagtagtaggcttataaccaagttccctctgagccaagctaatattagcatgagtgaactgaacatccccattccgtggcaacttcattatatttctctttgccttcactttcaagagcctctccaatatgctgaccagatcagagaccggcacaggtgaagtattccctaaattaaaaacccgcaactgagctggtcccttcttcttccccccacttccagtgctcttctcagcagtatccaatgcagccaagcaacctttcacaatatcatcaatgtaggtgaaatctcttgcaaccgtgccatggttagcagcttcaaatattgaaatcgacttgccctttaatatatcccttgtgaaaaagaaataggccatatctggtcttccccaaggaccataaaccgtaaagaaccttaacccagtaagggaaagaccatatatatgattataagtgtgtgcaatttcctcaccagccttcttagtggcggcatacagactagcaggctggtcagttcggtctttttcagaaaagggtaccttagaattaagaccataaacagaactagaggaagcccaaacaattgcaggttgtgggttcaccgatttacagacttcaagaagattaactagaccagcaatattactatgaacataagaaccaggattttccatggcgtacctcacaccagcttgagctgccaagtgcatcacatgggtgaaagccacaacctcgaaaagcttcttcaacagggccgagtcattaatatctccttccacgataaacaccccggttcgctccaaaagcgcttgccgagctcgtttcaacgaaggatcatagtaatcgttaaagctatcgagtccaagcactccgtctccacggcgtttcagagccgaggacacgtgagtcccgacaaatccagctgctcccgtgaccaataccgaaatcccattccgggaccgaacccgagccgatgaccggacccgtttttcccaggcggctccgccccaactgtacgtcctaagagagcggcgagagggatcagacggtaaaggattagaaggcgatcggaaaaagaagagaaagatcagacccaagaaaaccaaggaccaaaatgtgagcttagcgagggaggaatgccaccgaagtctgtgaatgtaaggggatttctccatcttgaacttccccggagttgaaggaatattgtcaagatgagacatttgcttcatctgtaaatgtgggaaagttttcgactttgaacagaacccaggtccctaaatttccaatcctcactt

SEQ ID NO: 185683 - DNA, 5865 bp, Cannabis indica
tgaccttattttggcatttgcctctcaattgttgaattcggtaacaagaattaaagtaaatagaggagatattttttccttccagtttagccatctttttttctttttcaacttaagcttacaactctggttctgattaaattgctatttcctgcttgttattcttggaaaatttaccttggacttatgtttgtattgctgctgtacgtgtgtaggattcttggaagactaccctactgttgagggtgaaggaaaagctgaaagccaaggaactcgaggaggacgatcttacctaaatttgatttgaaattattgtgtgtttttgggtcctgttcttgatgattgcattgtattatgagtttgttcctatttacattcacaaaatatgctgattctgaattctacttgatttgatatttagtcagagtggtattgcaagacttgtaactcctttttaaccttttcttttgcatgttttctgattatatttggctttgtctgaaaataacatggttaaaatttataatgcccaactccaatggacaaatcagaaatcattggaactactggcacaacatttacggctactagataggttaacttatatacatttatgataatgtttatcgtaattataatgaataatgaatttttagcagattttttaaaaatttaacaaaatttaatgtgttgaaaatagttggtttcttgccgtagcaatatgactttattaagtttattatattattgtatttcattttgaacttaatgagctatgtagattgttcatgaatcatgtgtatgaaatgaaaccatgaaagtgtcatgcggtacccaacattctattgtaagtactgttaacttgttagttagaagttggtataatatctgattttatttcttgtaatttaaatttaattatgtaaaatatgatatttaattgtataaattataatatatattatgctataaagtaatgagtaatgaccaacttaaggaatcttaaagagaacttcaattgaaaatattacaacaaaattgcaaaattagaaatgcattcgaacataaaaaattcagaattatctattggccacacggaaagtgcgaagaagtgatgagacaattattctgtggtttgggtttgggatataaaaccaaatattagcgcactcccatcagctcctgatgtttaaattattgaagataatcttttgcaactcttcgttcaacatgaagtttagaataattagttgaacaacaacatttactattttatttgttgatattaaatcttgttatattatttttgtcccattgattgttaggtacacttaaactactattttatattttagacacaacttctagactcacaacaagtcattataactacttgtcgtatccgctaacagggaaaattaaatgtgttattaagagttattaaacacttcgtcagccagcccttttgtcaaaataaaatatatagtgaggcctaactatttccccgcgcgtgagccgaataagagttaacaagagccttttgagacacgtggccgcggtacatccaaactgaaagcgacgacgtttccagactgtacgattatgaatcacttcaaaaccaccacattttgttctattcttcctctactcacacacactttgacaaaagcttattttatccaaaaaggaaaattggcaaaaagaacaagcgcgtaagcgtaacccaccatcgacgagacaacacacagcgaccaataccgagtcgagtgataatacaccctttatctttatttctggattctcgtttatcgttttatagcttaccaatccaccctaattccccccaataaaattagttactttagtcttgagtacgaggcttcaatactccgttgaattcaaatcaaaggtttctttaacttcctgtgtttcttggttattcttcaggtatgttttcataatctgttcttatttgttcttgtttcgaccctaacagtaaaaattacggcttttcttttactgctaaatggggtttcctgctgtatgtattgatttattgttattatttatttaaatgttttatatttttggttaatgtttctttaacaaaagaattgatgagggttttcatcacgaacatttttctccactcaagacttggattgttgtttagattatcaactagtttagtttctatatttaacagcttccagttttggttctgtgattatgttctttagagtctttggtttaattttgcttgggtatagatttctttttgtttacgagaacaattatcatttctttattacagaaatatttggcaaaacaaccatgcattacttggctttgaaccttagtggaaccattggagaaaagttattcactgagtcctttaggtgacaattttgatcttgatttgagagtattgtagcttggtgagaagatgtcattggttgataatggaactcgcaaagaggaaattgagctaagtggaggtaataaagacaagggtcaagctcctcttgacatttcagcgtctcgaaggacactgcttagtggtgataaacctcaaaaaaagctcaacaatacgtccactgctattcctcaaaagagaaatttccttaaatttggttctgcatctgctaaattcaggcggatggcgaacgagaaagatgagatttccaggtcagtaaattcttcaagtagtcatgattttaaagaacgtataagtggagtattttctcggaaaattgattgggtttcggttaagaaaatgtgcaaagaatggtttaaagatccaatgaacatggctttgttcttatggatcttcattgttgctgtttcgggtgcaattttgttccttgttatgactggaatgttaaacaaggtgataactaaaaagtctcagagagatgtatggtttgaagtcaataaccaaattctaaatgctctgtttacacttatgtgtttgtaccaacatccgaaaagaatttaccaccttgttctgctatctagatggaaaccaaaagacattaccaagcttagaaaactttactgtaagaatgggacttataagcctcatgaatgggctcacatgatggttgttgttctgttactccatttgaattgttttgctcaatatgctctttgtagtctgaactggggttacaaaagatctgaacgaccacccttaggagttggagtatgtatttctgttgcaattgctgctcctgccattgctggtttatacttaattgttagcccacttggtaaagattatgattccggaatggatgaggaagcacaggtacagagtagtgctgctgaaaggccggaaaagttgaggttgaaatcatttgagaggagattttcatttgcaccagttgaagacgaacagaatgttgagagcaaactgaattggagtgggggaatacttgatttttggaatgatatatctgtagcttatctctctctcttctgtacttgctgtgtttttggatggaatatggagagacttggatttggaaacatgtatgttcatattgcaacattccttctgttttgcattgctccattctttattttcaacttggctgctgttaatattgacaatgaggctgttagggaggtccttggggttaccgggttagttctatgtgtatttggtttgctctatggtggcttttggaggatccaaatgaggaagagattcaatctgcctagttatgacttctgttttggtcattcggcattagccgactgcacattgtggctttgctgttgttggtgtactctagctcaggaagttcggactgggaattcttatgacattgtggaagacaagttatgcataaaacacacagataatgatagcgagccaccgatttcacctttgccccgcgaagatggagtggttgagttcagatctgccaacagttctccactaggaaacagttctagcccaaccaagactaatttagctgtttcttcaagttccaacatagtttcaaagacttattatagtccagagaggccagtgtctgtagtgaatggagaattctgtgaaaaaagtaacgatgaaactatgataccacctgatccaccattaattcaaagggaagccacatagtctaagggggaaaagaaagatctctgtagcattattttagtatcatgtatgttcttatatttttttcccctaaaaattgttgcatcatgtatgtgaaacctgtgtgtttcgagtgtaatcggatacttacattttctttctttctgaaaattttactcccatacccactttaaggcaacatatttcattcgattgatttaaatttcattagtatagaaagcaggaataaggtgtcgttttaaaaaaataataatatcaagagtaaggtatctttttgattattgacatggacagactcaaaaggaacaaagtcttaataggtgttccttccattttaatagaggaatcaaatttgattaaagccaggaagtagaacgtggttatgtttcttacttgcaagtaccaattcatattataaaataattctaggatcattgctatttcatattttaagatgtttaatactacgttagtaattttttttatatcatttattaaattataatgtatgagacttaatattaaaatacactcagtaatggtataacacattgcttggctctttaaggtgcctttcagcacatgctttttaagtttgctatcatatgaatatatgcctataactttagggagttcctactaatgaagggcttttcttttctaaaagagctggtaagggccattttttaaagatgatatttcttcatgtgaaagggaagtatcttaggtagtgaaatatccagcaagaaatgtgtctctgggttcatatttttttaagagtacaactgcttttgaatttgttttttttttttttttgacatgcatgttacttaattatgaccatttactgtagaaatggatgacatttttttttatttggaataatttgcattttctattttacaccatcactaatggttgcattattttgttatatattttttttttacaatttagtgtaaaatttagaatatttttatttttacactttaaagtatattttttttacagaaattcacgtagcaatccacgtagcaacactaatagagtaacttaaattgtaactaaaatttacataacaacccatataaaaactagcgtagcaactaccgaagcaaccaaaccataaatttttttaaaaaaaattaaaaatgtatataagataatttcttaaaatttattacttttagtataacaaatctaattattcaacactaaatattacatcaaaatataacacccaataaatatattattgcttaaaaattttacattttctattatttacattcatagtcattaataattaatttataatataattttacatattgtcaacaaataattaatgattatattttaaaacaaaaaaaaaaagagttgggatgaaaaaaaaagttataaattaatttggtgtagattctaaatctaacactattaattgtaagaaatttagtacaaattgcataattttttgacgcaatgattaaaattacacacgattaatgatgtagcaatctataatcggtggtggaaccttctcgaaccagaataacacatcgtctaaccgaaaggcacgctttgccaaaccatgaactgtaaaattcttatcacgagccacatgagacaaaactactcctatcctcaaatagcatcctaattcattaaagaacatctttcctttattaatagttgctaccaaaattaactaatctaaaaaaatatttctaatt

SEQ ID NO: 185684 - DNA, 1129 bp, Cannabis indica
ctgacggctctgataccaaaaatgttaacgccttaatacgtaggggcgctatagtgatttttctaactatagtgccacctttgctaatcaaaggattttccttgaaaattatgccaaattaaatttttgataaaactttaatctttataaacatatatatatatttacataaaccgggatcgcgtgtttaaacttttacaatcaaagtcaaaatgtttttacggacatgtcgcattgcgactacaaaatacagcccaagtcgtctcgagaccgaacactccaggtcgcgccgtctcgacatatacaatcatcacttaagctcacaactcactcctattcagcctttgctttccttttacctactcataataatatctgtgagtcaacaaacttaataagaaaagtaaataacatattatatattaccgacttgtatttatgcgctcatacacctctccacaaggcttatcaaataagtaagaacgttctttactaagatacgaccactataccacatgcactacgtaccgctactgtatgagtgttggtagggtttaccccatacctcgagtacctctaagtgttataccacttagacgtgcctcttggaattcctctttgggtgtgtaccagtgttcatctggaaggtttggcttattccgtcattcagaaggctcggagccttccaaattcggctaagtcttgtccttggaggcgaggcttctgggccttagatgtgctcgaacccatctcttgtgacagagccttcttacgtggaagggctttggcccaggtgattctgcttgatcattaactataaatgccacgtgtcatccttccaaaaatatggataacattaactaaatgtgggaattggtaattttgctaccaaaatttggatttggggaattaattgctagcgaagtataagtttttttgggttttgctgcaatttatttcatttttatgtattaacttttaagtttagccctcttgcttcttatttttagtaacaaatattctttcaatgctgaaaatatacaatgaaaatttcattttttcaattactattatttattttttaatagatcccaataataatagtaattgaaaaaagggattttttttt

SEQ ID NO: 185685 - DNA, 7196 bp, Cannabis indica
tatgagtcagtccgttagttaatatgttagttaaagtcggtttaggtgtttagtctatatcggctactgatacatatatataccagtcttagtttgtaacttgtatcgattcaattcaattttcttttcaataagattttctttcctctttctgcaatatggtatcagagcagagaaagagaaactttctctgaccgatcttggttcttgtcggctttccgtgttcttctccggtgaaagtgtcgtgtttcctttcttctctccgacactatcttcatcgcgttcttaaattccttcatcaaacatgtctaatgacgatcaaaccccagttcaatcaggaactgaaggtaatcaagctccgaacattcatggctatcaaagttttcagacctctaatctgaaaaaccctcttgaggatcctgccaatccctactaccttcatcatggagacaatctaggtaatatccttgtctcacaacttcttactggccaagaaaattatgtttcttggagtagagctatggttctttcaatttctgttaagaataaacttgggttccttgatggttccattcttaagccccttactaccgatcttgcattatacaatgcttggatcaggaataacaatattgttatttcctggatcctaaactctgtttctaaagagatctcgtcaagcattctctatgatgagtctgctgctatgatttggacagacttaaaggtcagatttcatcaaagaaatgggccacatatatacaaccttatgaagagtttaatgaatcttaaacaagactcccaatctatcagcatgtattttaccagattaaagactatctgggaggaattatctaactacagaccatcttgtacttgtaatggctgtacatgtggtggtgtaaaaaaacttcaagaacaccatcatatggaatacataatgtcattccttatggggctttctgatcacttctctcaagttcgcagcagcattctcttgatggaacccctccctgaagttaatcgggtatttcatcttgttacacgagaagaaaaccaaagaggaagtcttggagccaccattgatactaataaaaacatggcttttggctttcaaggagataaaactgtagggaacaaatctgattctcaaaaccagaaaacacatccacccaagaagggaaggcctttttgcacccattgcaacattcatgggcacacaattgaaagatgctataaaatacatggatacccaccaggctacaataaacaaaacaaagccaaggatgctgtcactaatcaggtacaaaccgataaggaaaccagcactgtcaacgaagaaccacacactcttctccctcagttaagtgcaaaccaatatcagcaacttcttaatttgctagccagccaacaaaataacattccttcttcagatccttccacatccacaagtaatgcaggtattattctaacttgtagttcagcaaatattcttgatcaatcttggattattgactctggtgccactaggcacataagcaataacatcaagctttttcaatttgtttgttccgttgttgctacaagacttattctaccaaataatgaaatcattgttgttcactatagtggtacagttattatttcaaaagacccctctcttaaaaatgttatttatgtacctaattttaagtttaatctaatctctgttagttgcctaacccatgatgacttctttgctgtaaaattcgacactaacaatttttctatccaggaaacactcaccaagagagtgattggaaaaggtaaagctaataatggtctctatgtgttggagcagcctcctacctctgcctacacactcactgttcctgttaatgtgtggcactcaaggcttgggcatccataaaaaaaagattagctttgctcactgaggatattcgttgtaatgctaatgatttacataaaaactctacttgttacatttgtcctatggcaaaacagaggaaattaccatttccaaagaataataactttgctaagagaattttttatttgattcattgtgatatttggggaccttatcacatcccatctaattctaatcataaattttttcttactttggttgatgataaatctagattcacttggatttacctattacaacataaatctgatgttgctcgtatcatactacagtttctctcatatatccaaactcaatttaatactgtgattaaatgtttcagatccgataatgctcctgaattagtgttcaaagatttgtttgctaagtttggcattttgcatgagtttacttgtgttgagacacccaaacaatacgctgttgctgaaaggaagcaccagcaccttttaaatgtagctagagctcttttttttcaagcaaaactgccaatacatttttggacagattgtatcatgacagctgtataccttataaatcgcacaccaactcccaatttagcaaataagacaccttatgaacttctttttgacaaggttcctcactatgagcatttaagaaattttggatgcttagcttttgcttcgactctcgccgctcatagaactaagtttgctcctagagcacgaacatgtgtttttatgggatatcctcaaggtataaaagggtatagactatatgatatcaacactaaacaattttttgtatctagaaatgttatttttcatgaacatatatatccttttcataaacttaatgacactaatgagcttattgatcctttttctaatattgtcatgccttctcgaaaaatttcacacacacctgttgatgattttccttcatcacctcctagccatagcaatactgacaattgtttacaggatgacattttcttaccaagaaacagtgaggctgctaccgaccctgtacaagaacaaacagatgctcatgacaatccttctggccagcacaacaaacctactaccgcccttcggcgcaccagtagaatcagaagagaacctgcatatcttcgagattttgaatgtcactcaatcattcaagacaattgctcaactcctcactctatttcaaaatttatttcttatgataatttgtctgcttctcacaaagctttcattcttgctattacagccttgtttgaaccaacaaactacaaccaagctgctcagcataaaatatggaatcaagcaatgcaacaagaattgtttgctcttctcaaaaataaaacttggacttaagggccaaccccccaaaaaaaaaaaaacaataggttgtagatgggtctacaaaattaaatacaacagtgatcgaagtgttgaaagatgcaaagctcgtctagtggctcaagggtacactcaacaagaaggattggatttctttgatactttctcccccgtggccaagatggtcaccttcaaactccttcttgccatctccactataaagcaatggcacactctccaactcgacgttaacaatgctttcctaaatggcgatcttcatgaagaagtctatatgacactccccaaaggtctcactttaccttcctcggttcctacagatggtgaaatagtttgcaaactacacaaatcaatctatggccttaagcagtcatctcgacaatggtaccgcaaactctccaactcattgctccaagaaggattctctcaatctcaggccgattacactcttttcaccaaaggcaacaacgattccttcattgctcttcttgtgtatgttgacgacatcatcataactggtccaaatttatccttgttgcaccaacttcaggacaatctcaacagcaagttctcactcaaagctcttgggacactaaagtacttcctaggttttgaaattgcacgagctaaagaaggtctctttttatcccagcgaaagtatacactacaattgctcaatgacagcggttacactggcagtaagccagcaaaaacacctatggatcctagagttaaatttgatgatcaacaaggagaactcctcgaagacccttcccaatatcgtcaactcattgggaagctcctttacctcactctatccagacccgatatcacctacgctgtcaacaacctcagccaattcatggcctctccccggactcctcacctacaagctgcacatcatctattacgttatttaaaaggtagccccggacaaggtctgttgtactcagccacatcctctttacacctccgtggtttctcagattcggattgggcctcttgccccacaacaagacgatctaccacaggcttttgtgtctttattggagactgtttaatctcctggcgcacaaagaaacaacctacaatttcacgcagtttcgctgaagcagaatatcgcgcccttgctgccacaagcagcgaaataacttggattcaatatcttctacaagaccttcacattgctcaaacctcgccagccttcatatattgcgacaaccagtccgctattcacattgccaacaatccaacatttcacgagcgtactaaacacatcgaactggactgtcattttataagggacaaaatcaagaattctactatcagactaattcctgtcaacagtacaatgcaacttgctgatgcattcactaaacccctctcttctactattcttaattcccacatttgcaaaatgtctgtatatgatatatacagtccatcttgagggggggtaacaaagttatatcaacaactctgctgctactactctgctgcactgttacatctgtttatattcagttagtgagtagtgttgtttttaatctgttagtatacatatgagtcagtccgttagttaatctgttagttaaagtcgtttaggtgtttagtctatgtcggctactggtacatatatataccaatcttagtttgtaacttgtatcgattcaattcaattttcttttcaataagattttctttcctctttccgcaatagttttattgtttaaaaaaacaattaaaaaaaaatgggctcataatttaaatattttgccaccttatgtaaattaattgtgtgaaattttacagagtatcaatttatctttatcagtaaaaacatctatattttaatacaatattatgactcaattttttttatataattttgtacattgtaattatagcaagaaaacattctacacatagaaataagattcaacattcaattacacatatgtttatattatatgattgaatatttttaattttatttttaagataataaatgttatatattttctaaacaacaccctagaaacaaaaataacactcttactgtactgctcaataattataatacataatcaggtaggtctctaggtcggctgcacactaaaattaaaataggatttttacatgaaatttttaattttttacttttttattatagtgtagaatttaaaaaaaaaaaaataatgtgtaaattttatactgtgtactatattaagtttttacgattattttttagttgttttattattattttaattgttctattttgttattttacggttgttttataaaaagacgtgttatttttgtaaaaaattctgtgtgacagtaaaattgtaaacttttatccaaaatataatatttttataagaaccccaattaaaatttatgaaaatattattgtaattttaaaataaataattggtggcatgcaaaagttccttatattttaatttttatacattgaatccccttattttgtttttttttctttttttctctggcaaaacccctttaaatttatttttctttgcaaatttgggacattagttaaatatcaccgttaaataccaattaaatgaccaccgtgtacacttgtatatatatgaaagtaaaacttcgaaatcaatacagtaacaatccaattagtatttaacagtgatatacagctaataattaaaatttgtaataaaaaaaataaatataatgacgttttgtcaaaaaaataaataacataattaaatatataaaaatcaaaacataaaaaagtttcgccaaaaataattattttaaaaaataaccaaaaattagtcaatatctttgtgcataaataattaaaaaaaaaatgagattctcgatcttaaaagaatcgaatatacataacataaaaaaaatagatatatataaggtgtatttcagaagaatgatacgtttgctaattaatttttttaatgtatacccaatgtaaaatatttttgcttagtatgaacgattaacaaattgtgatttgccattaccatttacatataaatattacttttttagcatttatattaacttaattatatttatagagatatgattttgtcctgttattgtactttcacggattgtaatccgtgatgtacggtagccgtcaaatgaggaaattatttgatctgacggctgagattgatctaggggtaattaggattaaaaagtagaaacatacattgacactcatttaatgtaccctgagacataccacggaatatattctgtaaaagtacaataaggaacaaaatcatatccctatttatatatgtacactttgtatattatatatattatatatacttctaaaaccttattagagacagagagtgtcttatttaagctacatcatagttaaggtatgaatcactgataagttgacaaatgaaataatataatgataatataatttaattattatattacaataatattattatatggtatataatctttttcactatctaatatatttttaatttaatcaaaacttgaatttggattgattcccttattgcatctgcaaatgttgactctctacaggttgtaagtgtagactttttttagcccttgagctaattttaaatcaagaaaaaaagaatacatataattattaaagcactaagacccattatttcttacctactatatacttaccataccacaaagtcctcattatagcttagctataagatttgagtgtgctaactatttaaattcaaaacttttatataattgttagcaaagagtaaaaaattaataattaagataatctcaaataaaggacaaaataatgaaaaagaagaacctatttggtaccttagtcccaccatgcaatagatgaagatgattaaggctgaagaatgtctagaaaaggcacttaagtgggccccact

SEQ ID NO: 185686 - DNA, 6023 bp, Cannabis indica
tatgataatggttcaattcaaatgactaggagctagcttggtaggtgagcatgtgggtttgaaatttttctatgtaggtgttgattgttgcttttagtgcttcatactaccatctattcaaacacagtttatcaaaatgctgatactatttattaatgttggttttcataccaccatctattcaaacacagtttatcaaaatgctgatactatttattaatgttggtttcaacatgaagttcttcttggaaagcattattgcatttacttcgatcatgccaatctttactttacctctacttttggcgggtctatttagtatattgtactggaggcaagcactttactttttcatttcaactatttgaacttataaatctattttcttggaaaattattttcagtgaagaacttggagaaaaaggacttaaggctgtttagttaggcaaaatatgaaatatgaagagctatgtgaatgatggttggagtatggaatcatgtttattttccgcagacactactaaaagctagaattgtggtagtatcaaaacttgccatgcaagcctgtttttctccttacttgcgtaccagcaatgaattgttacttggagaaaagaggtatttccaatgagaatggcattcggggtgttcgaagaggaaaaagatttggccgggttacctttcccaggcacaaattatcaacatggacttttttgtttggaacaatatttctgctttattttgtagttttcggcctaaagatgccctttcatggtaagatcctattaccctattgataggaaacgagatatatgtacccacttaagtactttccttgagtatacctatttattttcttatttttgatgttcttttaattccgaataaatttatgatgcaccgtgttaaagtttgatattagtatttaggtgaatatataagtttcgtaaatgtcacatgatttaaattttagaatatttacttcaaccaacggcaagaaatgggcattgcaatgaggtattatataagcgatatgtttgtttttcaatgacatttctacatcaatattaatcatcccttgcagaaaaattagaagatagtcctttaatacaacaacgaactcaccgagacctttgggcatctgaggctggtagaccaccactaacaccaccgccgccgccgccgccaacaccatcaacaccgccaccacctccaccactaccaccaccaccaccacccccactcccatcatcaccaccgagaggcaaacgtcatagacagcgtaagaatagtgtgttatctgttttcttgtaccatctacactatgttgtatgaatttacatctatatttttattatttgttatgtttgtttttcagcacaatgaatataatatggtagtttttaatttctatgcagggccttgtagttactagctaaaatatatttacaaaagacgtggccctcttattgattcactaggctgagtagtccttgagaaactgctctagatagcttgttatgtaaaaattttgcgaagtttcctttatgctagttcaatattgcttcaattagaggtgaaaactaggaagtgaaatatcattgaaactaaaagatgcttttctcatcatgccaaatgtggattcactgataataactccttagttaaattccataacttgctaatggattgtttgtatgacatttatatacatgtttgctttatgacttttctatacatgttttccacactataactatcaatggaggaagactatttaaaatttcttttggtagtactttctgtgcccaattgtacacttgtctacatgctttttacactatcatggcttaagaatttcactgattcttttggttgtacttttgttgtctaactgcactgttgtgttcctaattataactgcttttcagatattccttgcgaaattggatttgctaaatcagttgattatattgttgaacccagccacctcacaaactttacacagttttcgctaaaatacattgaccgagaagaaaaagcttcttggaacaataattttgatctgagatttggaggacaccaaactcttattgaaagacaacaatccttctatgcaaagaatcaaactcttcattgtggctttgtcaaaggaccaccagggtacccgagcactggatttgagataaatgaaaaggataaggcctacatgaagtcatgtaagattgttgtttcatcgtgcatttttggcaactccgactttttgaggaggcctactagcaagcaagtaaatcttctctttcctagtttcgttttgtttccacaattatcattagtgatggcaagaatatatggttcatatcaatatgatggagtcattattcttttgacttttgtggccatattataatcaatgacagaaacataattgttacccagaacacttaatttggtttgagtgttgtgggattatgtgtttatgttaatttctagtccgaacatggttgatgtgtattagcacaataaattttgtacaacttcctttaattttagtgatgacaaatttgtgcttgttccacagataagtggatattccaagaacaatgtttgttttgttatgtttgtggatgaacaaactttgtcaaaattgtcgttggaaggaaatgtccctgatgatggaggaaagattggcttatggagattagttgttgtcagaaatttaccatacaaggacatgcgaagaactggaaaagttcccaagcttttgtcgcacagactcttcccttctgcaaggtaatttactacacctagttccagaatttcgttacagtaagaacatttgttgttatgaaaaaaattcattggaccttcaattgagtctctccccctttttctctttaaacattgtcctttcaaggtattcaatatggctcgacagtaagatgcgacttcacactgatccaatgcttattcttgagcgcttcttatggcgaacaaagtcagaatatgccatttcaaaccattatgatcgacattgtgtatgggaagaagtactccaaaataagcgtttaaataagtacaatcatacagccatagatgaacagtttaagttttaccagtctgatggcctgacaaagtttgacccttctgacccaaataaacttcttccaagttgtaagtgtcttttaacctatccctggatatttctaattcatttatctaattatcttagtttgtgttaacttcaaattcctaattttgtgtgctgtatattttacagatgttcctgaaggttcattcatagttcgagcacatacaccaatgtcaaatctgttttcttgcctttggtttaatgaagttgatcgattcacctctcgtgatcaattaagttttgcgtatacttacctgaaattgaagggaatgaatcctgataaatcattctaccttaatatgttcaaggtatctcattttcctgaatatataaatgtatacatacaatgaaacaatattgtgtaatttgtattgataaaagatgacagtaatcatctgtataatacatcctcggcagtagcaaaggtgctccttcatctaaaacatagtgaaagacaaacaaaaatacttcccataagcctgtaagattacaaacacaaataccaatcacaaggaagagtggagaaagagaatgccttaaactttttgcagttgaagatcaatatagcaactcaatactttactttctcccatattactcccatttcctcttctttgtcattaaaaattctgttatttctttccagtcatactgccttgagaattggaaagacagccatgttccataaagtttctttctctgactttgacttctctttgtggcacttaagagcctttatatgttgtggaatatcatgagatgaattgaaccaaaggatacattataattctgtactatgcagcatgtagtttgtaaactagtaactagtaacaggatgggttgggatatttctggtcggctttgagaggtattagggaatgtgaggaattttttgtatgttcaaatgatgataatatccattctgatcattcttgctgccaaaacaaatgataattctaatgtcatctttctccattaattttcaggactgtgagcgcagaacactagctaagctgttccgccacagggtactggtactgccatctcctcgacctgcttcttgatccattataacactccttacaatacctggtaagatttagcttatttctattttttttcttatgtactaatttctctttcccactgtttttttttgggggtgcttttagcgttacttaaatgttctataagaaaataattagaggattaaacaaatgaaagaaaggatgtacagtatgttggtaaagaaaaggcacaagacaaatgacttcatcttttcaagaagcttgtgattgttggtgtcttgacatcattattatagaaaacaatctgtacccatatgaaaaatgtcgcacatgtcattgtcgcaaacacagaaaagcccccttgattttccaccctgacagagcttatgttagatgcagaaatgtaaattgaatgaagaaccagtaaaatataaagaaaaacagaaagaactcatctattgcggaatgaatatcctgggatcggaacatcagttgccactgtaaagatggtctggtggattgctttggttgggtatgtagcatgtaacataacaagagagctatgcagtaaattatttatacattttgagtacatgtttaatcagcaagtgttggtctcttcttgaaatcataattataggacaagaaaccaaatctgttatgcattattttcccaacaattaagttacttgtgggtttggtgattagttttcagggatacaccaattttggcaaacagaccctttcgtatttttatgattcttgatcagtaatcaccaaaaataggttcatagtatgttataatttctaatattcttatggaccatgtcactctctttgaacttgtttattattcttaatattacattttgttggataattgtactttcattatgtattttgagaaattgtttttgggatacttggctttcaactattgatgacggatatattattataaagggaccgatttcctcatatcattgatgtggctgtatcatccttaaatgatttttactatatttgttcacgagaaaatgaccaaaataatttggttgaagagataatttggttgatgacaattggctttgatcaaaccacataaaatcatcgttacatacggttcttgtgtgtgaagcaatgggtttttcttgttacaaacacacattgtatgaattatgaatgttttttgttattagtcatgttgctatggtaaccaacaccacggtatagtctcacatctttcatcttttttttttctttttcttttggaattattcgtacactcatgttgcgtttgtaaatttatatttttggaatattttaaatatgaaaattaatgtgcattttattttttgattttttactttagaaaaatgtgattagtaattattaaacaaatattaaattacctttggtgatttttttgggtttttttcaattttaacaaaaaaaaaaacaacaatattacaaaaatactttcagctggctaaatgataaatatacaacccaaataaaaaataattactcaaatatcacttacactttcaactaaagatccatgcttcctgggtagctattgcacaaccgcgcagcaacctaacgcaatcgaaacgaaattccaaccagaaagagaaccaccactaattctggcaacttcacctgagaagatgactagaatcaatcaaaataggggctgtttcgaattcatgaagaaaaaagtgtagaaaaactactacgaaactaaaattcaaccgaaatctagtttaatttgcataaaactaatgttttgacttcaatttttagatccatgaaagacagatctcaaaaagttgaactggagt

SEQ ID NO: 185687 - DNA, 1655 bp, Cannabis indica
atttgtgaaattaacccaattttcaccttacaagcatatatgggctaaataattcattactttagttcgtttcgtttactaaatggttatttcatcatcttgtacatcagcatgcatatatgaacattaaaaatatatattaatcttggaattagtttaatatagactttgacttaatttaattgggtgagaccactaattatattaacattttttgaaaaagtttttcttataaaaaatttgtattatatttaagatattaatttagaagagaaatgtcattttcatgctagacctataaattcaaataatgatcatatatgaaaatttatatgggtaccacaggaataaactatatttcacacaaaatcatcatgaaaagttcatttgagttccattgttatatataaatatattacatgaaactgatcttttacaaatatattttttttttgttttggcaaaaatgctcatatgcaccaagaaaaaagaaaaaaaaaatatatttttgttggcgcatttagtatccgcgccaacatagtgtatttttcccgatttataatgcactgatcaaaaaagcaattgaatatgaatttgagtaatgttattagtatgttgtttgagaacagtgtcggtacgagtatttttcgtcaacaaaaaatatgtcggcaaatataagtagcatctgaaaaaaaacgtcctacactagctagcgccattctaaaatgtgtcggcaaaagtattttttttcccttatcaaaaaaaaaaaaaaaaggaagaaggaggctgtcacatttaaaaagagattttcctgtatggtaaaattgatatgtggttggtgatgacaaaagaacaaatatattggtcaagagagcagacaaaaacttttgttatggtccaaatctataagtatatactatagatctaataaattaatgtaatgactcttccaaacatgtaataaagcttactttaatataatatttaactaattaatctttgcattgatttttttttttgttgccaaaagtatcaattggaatgcttgccaagccaatatcatttggtcaatataattccatgagggagacacataccataacaataataataataaattaaattctatgctttcaatggtttgtaggactaaattccactatgatattggcttattttattcttggattgatgacaacagtgggagcaaaggaatctgtagaagataaataggagtgtaaggaaaatggattagtgacaacagttgctaactttgaagaaaaatatttaatggttgagagggtgaacacacttttgtgggagtcacctttctgagtagaaaggatgtaaaagtagtggtggataaacaaacagcagttggaatgcgcaaacttcataagaaatcagaacaaaaacttttcatttgttcacttagtccaagagcatgacgagataggagaatgttcaaatttagaacatgttttcatgtctgaaactttgtctttccaaaggtttttgtattagtaggtgactcgataataagagcagaaggcggagatgttggagtgacaatggggttgacacgaataggacgcctcgaaccacctcaggtactcttggttttcgtcattgacgactttgtagcttgaaaactt

SEQ ID NO: 185688 - DNA, 3021 bp, Cannabis indica
ggggattgaactggtggaggtggggagaatgaactattggtgtgggtggtggccgacttggatcaattggtgaacgtctagtgggatcagggggtggtggagacgagttgtgtactggtggtggtggtggtgaatgggggttgttaacaggtgatccattatggggctcaggtgatggtggtgatggtgagcgaattggtggtggaggagaggaaatagattgtggcggtgggcttctcggtacgccaattggagatctttttgtgggatcagatggtggtaagggtgtttgtggagggataggaactggcttggaaggtgaaggcccctccacaggtggtgatttcgggttttgtttgggaggatttggagtgggttttggtgattcttttggcgttggaggtgcctgttttggtggttgtggtgttggcttttgaattgggacgggtaatggtttatttggatcgttcgttgatgaagatagtccaccgcactttgccttgctgcaatctattggcttgctcacaatcggttgacattcttttgctgtcttctgctttggcctatctggcaagcaattgcttatgtcttccaacacaatgcctttattcttagttggattgcatttttggtcctcaccattgaagtaattgtaagagaatttcaagctctccaaattgggcaactgacaaatgctatcttgaacaaacccagttagtgtattgtgtgaaagattcatttgttccaccttctggagggacttgaagcttttaggcaaaatcccactcaagaaattggagccaatatcgaaaactgtgagattttccaagttaccaatctcagttggcaaacacccatgaagcttattgtttgacacaataatctcattaagagtgttccccatatttccaatgctactgggaatgcatccatagaagtggttattggcgatgaccaaaaccgaaacaggagagttgcccagagtatcaggaatggtagatgtgaaccggttattattcaagaacaaagcgtccaagtccatattaaagagatctccaggcacaactccctcaaaatcattgtacctgagatcaaggtacttgatgtttggaatggatagaacaacctttgggaaaggacccacaaatctgttgttgctaacatcaagctcgaaaagaagtgtgagcctggagaagctctcaggaatgacaccacagaacctgtttgagttgatgtgaaacaaagctatttcagtcaacaatccaagctccacaggaaggtagccagcaatgtcaccatggttgagatcaataccagccaccacttcctcgctcgggtcatccaaagccggcgaacaaaacactccagtgtacgaacaaacatcttcaccaacccaattacccgtaacattaagtggatcagaatagatagcattcttccatgcttggagtgcaatgtatgcacgtttgagtctagcgtttggaaaagtaacacctatcaaatgaatcgtctcttcaaagtcatcaggtaaatctccgccctctttaagagtcagcaactgtcgacgagctataaaggacgcctcagcatcagtgagagcataggagaaagaaaacaaagtagtaccgaagataagtatgaagaagaaaaagaagcagcctgaggcctgcattttgggaggaaattgcagagcgccgccaccttggataggcccaaggctgcttataggaagtcaaggaaaggaaggtgaatgaggaatgtgttatattgagaagggaaaaggaggtgtttgtggggttatgcaacaaattctctttaaaaaccttttaatgaatggttttggtttttattcttttgcaccacaaagcaaacatttatctcctgtttttggttttcatgtttgttattttttattttttttcttagaaaaagagctctaaatttagggaggattttggtggcttttgtctaaatttgcaatttgatagttggtaaatgattaaccacatactatcaatgcctaattcttctattttttttcagtgcttccaattgttttggttcgtttgatttgttattgtttttgttgttttagtgtgttttattatctcattattttactttcctatttttcacacagaaaaagtcggatcttgttatcaatttgtttttaattttttacaatgaaaatttattttctattattacaatagaaatagataaggttttttttttaagaaaaaaaattatatacaataaatacaaacaaaatgctatatataagctaattataaattattatacaatatatatataattaaataaatatagtgctattatttagcaatattccaagaaaaaacataaattcaaaacaatgacaaatatgatataaactcttttagtgagaaaaaaaaatcatgttaagaaaagaaaaatattaatgttataacattttgcatggaacttctatatggaacctttagtagtagtgttaatgttgtatacatgaatgtttatttatttattatgttatatataaatgaaagttgattcaaacagacatattggaaaataaaaactagtttgtagtggcaacaaaggatgcttcatcccaatgagtgaaaaaatttgtaagtttccaaataagaattcttctagtgctcttattttcagtaacaagagtgaaacaatcagtaaaatgaattaggagttgattgattaatttgttgaaaaccaaaacaatcagtaaaaatcagtacaggagaccctaacttttgaagatgaatgcttggctctttgtcatgcattttccatatgcttgaagttaggttgctcaaagtttgggcttgattgttctaaaatttgaaaataattttatgttttaaaaaatttaacaggtaggatccatgcagagctttctcaaggtacgacacagctcataagttcagtattttcgtgttttgctcggattcgtactatgttttgctcttaccggcccatatttcttaaacagaccaa

SEQ ID NO: 185689 - DNA, 1504 bp, Cannabis indica
tctctctctctctctctgattgcattgtgtatgaaactactgtgttaacttgataatttcccctgttttttttttctctgtctgtttccattgacgcagaacaatgataatcgaagcatggttgatgtgaagcctagaatttctgaggagtcaccagataaatctaggatctggaaagggacagaaattaatgaaccatcacaatgccgctcgttaaggctccatgataatttgacagcaatgagggtatggatttgtactttacatctccttctatatttcatatgctccactttcatgtctttactgtttcatctctctgattagttttagctgagctgatgcccttatagtttgtaagagaatcttttattaactatatagttctcatttgtttatgtttattttcatttagtcaatgaagtaatattggttgagtttgttccagctctaacacaatgataattttcaggtttgtagactaatttatacaaattctggactcgccctattggcattatcttctaatgcagtacacaaactctggaagtggcagagaaatgatcgaaacacaggaaaggtattagaactttatgttagaagatttcacttctcatttgttagctttaaacttgcccttcatataaatttcatcttttgtaggcctctacaagtgttcaaccacaattatggcaaccttcaagtggaatattaatgaccaatgacattggggatacaaatccggaagaagctgttccctgctttgccctttcaaagaatgattcgtatgttatgtctgcttctgggggaaaaatttccttattcaatatgatgacgtttaaggtagtatattgctttcttttttattgtttaactaatctagcttactcggttgtgtatttgtttttagttcttgctaagtaatccccattgtattatggcattatactccgtcatgtaaacagaattggagttgcaattgtccataccgaaaatactaaaagtacccatctatagtgatcaaaacctatcactacttaaacaattatttataaatatatatataaatatatttatatatttgaatatctaaatatgtattttaaacagagttagaagtattggtgttgaatgatttcatggagctttgagattttttaaagtaaataggaagttatgaaggtatcttctgttttacctttatcttgttaaactcacttctgttctgtcttcattgcagacaatgactacttttatgccacctccaccagcagctacatttctggcatttcatcctcaagacaataatataattgccataggcatggaggattccaccatacaaatttataatgttcgcattgatgaggtctgtaactgttaactgagccttataagtatttttttttcttcatgttagataggaaaataatattggattgctaattcttaaaaattttctttttcacaggttaaaaccaagttaaaaggtcatcagaagagg

SEQ ID NO: 185690 - DNA, 5636 bp, Cannabis indica
aactttccaggtaagacttgcacagtaaataaaaatttgctctacacataccccaaatgtcttggttttattaccacaaatagtatggcagaaatctttaattgaacagaactttatatcagggtagattcctttacttggaatgtagtgacatggtcaaaaaagaaaaaaggtagaaagagaagggaaagccctcctcataaattcacttaaagagaagagttactcaaaagtttgaaacaaagccattttgtaaatatgttttggtgtggaaataataagagacaaaaataattaatgaattgagagagggtggggggagaattagatgcatggattggatgataataatgaatgggtgttgggttggggcagcttacacttccttctgttctgcctcaaatattagcaggaagaagaggacagaagttatgattaaagggggccttctgtatcatatgcttcttcattctggtttgcagacaggtaagttttcctgcctctttaaatactactaccaaccctcattatttttcagtcaagccttctcatgccatcttctaaaactcatattagatattttagtaaatgagttactttaagctcacattttgtccttttcaaaaaaacaaaagctacacattttgtaattttaaaaagtttttacttctattttttttgtttgcaccaatctaaggaaaaagttagagcatctgatgtgtcttttttagtttaacggcataatatccaaagtttaaagtagatagaaaagtgtaagattgttatagggtaaatactattttggattatgtgttttgtaaaagttattaattggactctttgttttgtttaataataaaatgaatattatttttctaaaatagtataaataggatcctaaattgatgattttttttatcaaaataaaatttaataataatctgatctaaatgtgttatgataaaactgtttatattttctgaatctgtttgtgttaggaattgtcttcaagttgattatattaaaaaaatagttgtcgaaaattaaactgagcgtcctatttttatcatactgaaagatacagagacggttcaatcagtaacttttgcaaaatacaggatctaaaataatattaacccaaaaatactttaagtatgtgtgtgatttgcataacccatattttttcttgttttttaaaatatgttatgtcgtgtcataaaaaatttgtagtattgtgttgtgatataaaaagagtatcgtgtggtgctttattgggttcgagttatttttgtatatgagcttaaatttgtgtcttacttttttatattttgtttttacaattagtgatataattactaaattatatgtattttattgttttatttattattctatattttgtcaacaacattttataaaaaaacatataaaaattattaaaatttaaatatttactaataaatactaaaattattactatattattaaattattaaatttttttaatgtgtctttctctcgtagttatcaaggatgtctgattagatacatatatttttagtactttttaattaatgcttactattgaaaatgaaaaaatatcaacaaaaaaatattatatcatagcattctttatatattttcttttttatttttattattattttatcataaaataaaaaaaaattatttatttaatatatattaaatgataatataagattgttttaataattttttagagatgtttacgttgaattatttttaaataaaaaaaaaaatattaagaataatataaaagagagataaaataaaataatatattttaaatagtttaaaaaatttaacagtattattatttgaaatactcagcttcttgtagtgtcaatttgtagattgtatgtacttcaaaatattattaattgtttttgtgttggagcaaaattaaattattattttggtcaaaaagaattattagtacattaatatagatacaaagaaaaagaaaaagaaaaatcaaagagggggcatttaagtaatttaggctatcatctttctttctcatctgaggatggatgcaatatgcatcagtagtaatcacagtggtcgtcgttctcaacctcaaagcctcaccattcgcgctcaaaaactgagctccgtactttaatcactacacaagaacaacatcattaatttcgagatggacccttcaccgcccaagagctggagcatccatacccgagcagaaatcatcagaaaatacgagatccttgaacgtgttggatccggagcctactccgacggtttaccgagcccgtcgcctctacgacggtctcatagtcgcgctcaaggaggtccacgattaccagtccgccttccgcgagatcgagaccctccaaatccttcaaagttgccctaacgttcgtcgtttttgcacgagtacttctggagagaggacgaggacgccgtgcttgtcttagagtttctgaagaccgatttgttctctgtcatcagtgaggccaagaaaagagacgatggtggaattggtctcggcgagctaaagaggtggattctgcagattctgtctggagttgatgcgtgtcacaggaatatgatcgtccaccgtgatttgaagcccagcaatttgttgatctctgatgatggagtgctcaaattggccgattttgggcaggtaatcttattttcatgaatgttactactctttcaaggcaaaggaaaccactattttcttttttgttcattgggttatttcttgaattgagtatagtgtgagattggttagcattatcagtcttttgattgtgtagtgaatttaattggccagacatgaaaaatgatggaaatcttgagaattcaaaccattctacctttggaaggagacccttagtttaccaagagaaatgtggttaattgcacacacacatacatacacacatacccacaagattggaatctgtatttggtttaatcttattgtggtcattagttttaggagtgaatgtttggtttgaagttttgactttgcttgcaggctaggatactcatggatcctgaatacgttggtgagagcacactaaaggaggcaggttctatggttcagccaaatgaggtaacccctgaaacaggaatatcatatcaggaacgttatagaagtcaagtgcaagagcatggaacaatgatgagcaaagaagagtttttggaagtgttggatggtataaaagctaaagatttggataaggagacgtatattcctgatggagatacatcttgtctagccacttgcacaacaagcgacattggcgacgatcctttcaagggttcaggttcttatgaggcagaggatgttggagagaacactctaggttgtctcacttcatgtgttggaacgcgctggttcagagctcctgagcttctctttggatccacagactatggcttagaggttgatctatggtcgttagggtgcatttttgcagagcttttctccttgcagccactttttccaggaacttctgatattgatcagctgagtagaatcataaatgttttgggcaacttaactgaagaagtctggccagggtgtgtgaaactccctgatttcaagataatttcgttcaacaaggtagaaaaccccattggtttagaagcctgtcttcctaatcgatcgcctgaggaaatttctattgtcaaaagacttgtttgttatgaccctgctagtagagctacagccatggagttacttcaagacaagtatttcagcgaagaaccaccaccagctcctttatccgaactacgtgttcctttgaccagaaccggagaagatgagtctgctaactggggtaatttcaatggaatggattcggagtctgacgaggactttgactctgtgaatgttaacaccacagatagtggtttttctattcggttctcatgagctcgaagggtgttgaggtgcctatttttgttgttgtatcgtttaattttctttgatattctttggtaaatcatataccagttttctaagataccctatctaaagcgaaagaccctaattattggtttatgattttgtttctttcccttttattggagcgagagtattggggtcttcttaatttcgttttctctcttacaaacataagtagaattcaagttgtaactgccttaattacaaatgactacaaataaagatactagtactactactcgtactgacaactattagttctgataatatcaccgatgatgctgatgataaattcataccaacagtataaataactcaattcattaagaagaacgcatgtaaatgctctttcaaattgtctttccatatagcaatcacttcggataatttaaacccacaattttatactcacgtgacaatgtgagtcatgtaacagggttcactaagattgtccatggacaaagtaatcttgctaatctctaatatatgcaccactctcactatgtgtttgttccatcgaatcaaaaggaactcctgcttcgaccgacgattggtaagtgtatataattttctactaggctaagttgacaacgtttaagagtagttatcacttaggtactccccagcaccacaccaccagttgagccttttccttttctaatctctaatcctgagaaagaagcgctatctcaatctcttgaagtgactttcctttggtttccaccacgtttcttttcacaaacacaaccgccatcatgcaaaaggtagcaaagattgaatacaagagtcccggcccaagttgctcaagcaatcgcaagaaaagcagtccaacaaagaaatttatcacctgaagaatgaaaaataataagttccgaaaatgctattaatccaaagcaacagataataaacgaagaaaagggaaagtatttcttttacccaatgcaccgacatacaaaaggccatagcttttgctcgaattcggtttggaaatatttctgagaggagaagaccaggaactggaccagcgcctagagcaaatgtgaatacaaacctgcaattagttattctatgttaatatgctgacaatgcatcttctggaaaaaatattcactgcctattcaccatggaatgttaggaaatcattatttccatccaaactactattatgatttgctttcattgctactataaacatggtatcatagggatagttatcccaattatccaaattctgttctgagttttcagcattatggctagcttacagatgtcagtgaagtcctagacaaatttgaatgttgcttaatttatttgattccctcctaactaccacataattttcaatttcaaaaaagtttaaaaggcagtactcacatgagcataccaccaacagaaaggtacaaagatccagtctctgacgccaaagttgccgccgcgacttgaactgccattgccattgactaaaatgataaaaacatatgtgtaagccaattcgtagatgcaagttcatttatgcatcaaatataaaaaaaaaatagagttgatagctgctagctgagtgtgttttgggggttagtactgattctttacttttattaagagagggctaattagtaatttttctccccgataccaaatcatgtcccct

SEQ ID NO: 185691 - DNA, 2957 bp, Cannabis indica
caaattctaactgatacctctagttagataggactagtcttttatatagactcaaaacaaccagcatactgaacaacttatgcatacacctggatatgaaagcatatatttgatgcctaacagtttagttgagttcaatgatcggagatctctaagctggattagaaggcttggaaaattactcttattatgatttatagattctatgttatgatacgtatgtttcattttttataggaaaacttgattcaccttttgaaagtgaccaagttcaatctaccgccccacgaaagacgaataatgggattcctagaactataccattggttaatagtgaaaaatatgaagctcttcagaggactagcgattttaaatctgaacacccgtatttcaaggttgtcatgcaaccatactatatccgcaagggacgcctggtaagatctgttttgtaatctaattataataatatttgctgaagagtcataaagtttgtcaaagaataggtgcttccatggagcaaattgtatgtgcaattttctgtgtgttatcacatcagatttgtttccttatttccttttgtgttgctttagcacatagagcaccaatttgcaaagaatcatctgaataagagatattgtgatgtaatcctcaaagttccaaaagagaatgatgcttggcgtgtgaggtacagttttggagagtgtaagaaggcgtcaccaaggctcttacgtggttggtcagcatttgttcgggacaataatttgaaagtaggtgatgtctgtgcgtttgtcttggttgatgcggtaaatatttcatttgaggttgtaagattagatcctgaaagaagctcaaatagtcatatgtccacaggtaagtgatgattgttattcttttggcaactaatctatgttatttccttgattacatacacttcatttttactttttagaaaacttaatgccttgttcatttcttgtgctccattttagctcatcatgaatctgaaacccctagctttcacaatttttctcctgcaatacaagtaaagggatgcaattcgagtcagaattcaaagccaccattgtttggagagcaacatctctcggctttcaatgagagagttaaattttatgaaaatgctgcttttgaaagtggaaatccattcttcaagatagttattgaacgatcaaatacgtggtatgcggtaagtttttctaaaaccttaatctatgtgagctgttatttactctaattgagaagtgttgtgttatttacacaaaatccatttaaaaactaatcagcaaaactcaacaacagtgaaatcgcacaacacattttatactgactccatcgtagatcgatctacttctcgtttaagctctcccacaaaatattttcattataacagaggtgaaaatccgaaagggtagacacaaggtctgaggttcgagtccctcttagttacctacatagtgattgctataatttcctggtcctcaaatgttgtagggttaggcagggatcctagttttgaaaaagaaaaatcaaatttttttgaaagggtatacagaaaaacagattaaaccccacaacacaaacttacttgtaaagacaataatctaaaaatcaaaactttcagtgaaactctattatacactcaggttagatctctctctctctatttcttgaattacattagacaaaaatctaagcaacgccgagcacagcattccaacggtcatttatgtgctaaaaagcaaagtcttctgatttgtgagaattaacctttcatcttcttttcttgcagtgtgtaccattagacatagctgacaaacacattaagaatgattgtgatgtcactctttccattccaaatggtagattttggtctgctcaattcaggaggaggaagtgctatacaactgggaaaactgaagctgtaatatgtactggttggaaagaattcatggcaaaaaacgatttgaaattggacgatgtctgtgttttccagctccgtcataatggaactgagatttcatttcatatttcgattgttcgagttggctctgctgctgttgttgatgatgatgagttaaaatgccaaaagcctcaagttaaatatgattatttttaaaattgatgtaatactcggtttagtttatgtgacccttgtaacttttaggctatgtttggtaggataggaaggagagtaagatggatggagagtgggagagatagagaggatagttgctttcctttctgttgtttggtattaagagtaaaattaggacgaaaaataaaataaatactaaaattataattttattatttttagtatagttatatattattgtttcaaggaacaaaaaacattttatataatgtttttgtatttcttggattctcctatttctggagggattgaaatttgtgtatttagagggaaagcgtctcgctcaatctctcatctccttcgtctctccttaccaagcaatggaaatcatcattcccattatctgtggctctctatcttcatttctctcccctctacttagtattaaatcatagaatttctctgttcatgcaataattccttataagttaagtgaaaattgaaaggtatgaagatgtattgaaaatgtgtacataaaattgtacttgtatgtggcatttttgggaagaaaatgtagaggataaaagttcctcctctaaacttagagggtaaaatgtagagagtaaacttaaagattgtctttcaaaaaaaacttaaagattgtttaagtggcatataaggtaaacttcgccttatatgtcacattcacaattttaatttttttttttaagtagaattagacgactaattctttagcttatttttctaattctattcccgctcacgttttcaacaaaattgcaaactattactaataataaaattgttaaattatcatatagat

SEQ ID NO: 185692 - DNA, 1611 bp, Cannabis indica
ttactgtttttaaatcataattgctttcgatttgccgaatagaatcataataatccaattcccccgtgggatcgacctcacctgtgtgagatttactacttgattgcgtatacttgcgtagcgtttataaatatagcaacacgatttacttgcttcgtttgttattatagggatttctgtgtagaattaagttaaaaaaaaaaaaaaaaaaaaaaaaaaaaaaaaaaaataactttttacaaagtcacttaaaacccctccacacccgttttagttgccagcgagttgactcagttgaaccaatggagaaaacccccaccaagcttgattacttcgaaaacatgtcgaagctcaactcagaggcttcgatcatctcctcttttaaagtaagccacttacttctcttctcttatcattacaaaactttttatcacttcttgggggtttagtagttcagtgggacaacctctgtttggctcccaagaaaatggggaaatctttttattttgtgttttcttacaatatagaatgatatatgtatataaaatcttaccaaaaatgaaaaaactacaaattcgtatgttaatacatttacatttataattttctgaagggcgatgatggtcggctcgccttgatattggatcgtactgtgtttcatccccaaggtggaggtcagcctgcggatacaggattcatcactgttaatggtgattctgaattaaagttcgttgtacaagatgtacggtccaaagatggaatagtaagtcaaatcaaaatgatccaactcaaaatatctcatgccctctaaattttccttattaagtgtgtattttattttgcataggtatttcattatggggttttcgaaaattttgctttggactcagaatctaagcttgagaaagggaaaaaagttgtcttatatgttgatgaatctagacgcaagctaaattccaggttcatgatattcatataacttaaaatggcattttcatttgacaattttgaaatggtgttcttctatatttggaagcttaatcttatactgaattactgatattgtaactttcttattttggtcaggcttcactcagcaggacatttgttggatgtgtgtatgcaaaatgtgggattgggtcatctagagcctggaaaaggttaccatttccctgatgggtatgattttattgcaaattttgagtattttattaatggggtgtttctttaattgattaatgtaggaaataatgaaagatttctgagtttgaaaacctctaatgaatctcagaatatcagagatgaaactaagaacacaattcagcaaaactaattattaaacaataagtaaatcaaacataaaagaaagcataaaacagcacactaattatgctggttcggacacaggataaatgtaatcttgttcttacatccagttttaggaaccattatctctactttattgaatcaatgaaacaattatgaaacttcaatcgaacttcttacaacaattgatcaagtactcaagaattgcctagaataactagaattaacggaatttcaccccgtttctgagtataataactagaattgcctataacggacaatgtt

SEQ ID NO: 185693 - DNA, 4811 bp, Cannabis indica
atgggtacttagttgaaactgtcttcaagggaatgatattggagttgaaccttacagaattcgggtttcggaagatggtgaattgtttgctgttgattctgttaatagcaatgttgtcaagatcactccaccattgtcccaatgtaatgtaactcttacttatgatggtgatgatgttttgttctgaaaaagattgatttcgaaaatgaatgtagtttgcttccttggatttagcttagtgtagattttacttcgtacttatataatctctattcatttatgttagcattagtaagatcttgtagtgatgatgatggttgtgttatgaagacttgttcttataaatttcggaatctgaaaaagctagatttcgaaaatgaatgtagtttgtttctttggatttagcttagtgtagattttacttcatactgttctacttatcgatattttttcggttgcagatagtagggcaagattggttgctgggtcattccaaggttacaaagggcatgtggatggaaaaccgagcgatgctcgttttaatcatcccaaaggtgttacaatggatgataaggggaatgtttatgttgctgacactttaaatctcgccatcagaaagatcagtgatgccggtatgtaaatttcttcttcactttgaacaataactgatgaaagctctttaaaataaccgataacatgatggaaactttggcaggtgttacaacgattgcgggaggaaaatcaaatgttgtgggatacagagatggaccgagtgaagatgccaaattctcgaatgattttgatgtggtatacattcggcctacttgttcgttgttagttatcgatagaggaaatgctgctctgcgtcaaatctctctcaacgaggaggattgtgattatcaatacagttcgatttctcccacaggtttggatctcattcagtgctttagtttatccactgcaatggaattcgtttctttttgttatattttgagcttagtttctcatctctaatggaaatcaacttatcttgtcatcaatttataagtgacattagctaacattcctttagtataatcgaataaaaaattaaccacagagccaaggttttgtagttcttgaaattgagacaatgctggttagaatgtatagctcataagctgtccctcttcttggtgatcccgatacaatggttggtcggtttaaaaccgaaaattctttgttttgctggatttttaggcacacccttctcctttgatattggctgtgctttaacaaacacctcttaaattccgtgcatccacaatttatagcccccaaaaaaatcctctttttaatccaattttagaatgcaaagcacttgatatgttggttcattgctttctttcattgttaggctttattttgattattaagtaggtttggattgaacaccatagaggatcctcggaaggtagtttaaagcaaaattatagttacacgacgatcttaaatactcagaaaagattctgtagaaaagaagaagaaaagactagactagacaagtgagctatgtgcaaagaagatctttgctaatcactatgaggttcatataatggtgactccatgctataaattattgtattttgctagcatattcgctactaagagctaagtttacggtatgttggttcattcctttctttcattgctaggcttaattatgattattaagtcggttttgattgcacactatggaggatctcggaaggaagttcaaagcaaaagaatagtgacgtggcgatcttatactaaagatttcgtaaaaagaagaagaaaacactagactagtgaactatgtgcaaagaagattttcgctaatcactatgaggttcacataatgaattggtgctaaatataattgtactttgctagcatattcgctacgaagagctaaatatatgaatttcagttgtgtgaattgtaagcttagtgtctcattcctatgaaagaacattttccttgtgtttgtttgtctgctggaaaaaagttcaaggtagcaaaaatcagcctaaaagcttttcttgatactaactgtcgagctctatcaatatcggtaatgccttctttggactctatcaatataagcaaaaatgccttctttcattacagctgttttatcgaattatcgtcaatgaagcaacctgctaacagttagatgaatctgtaggcttgtccatttctgtattattctttttaatgacagtttgattgcttagtgaaggggtcttttatctgactatcgattttggtttttgggcagatgttcttatggttatcggtgctgtcttggtaggatacgctacatgcttgcttcagcagggattcggaccatctttcttcccgaaaatggtaccttaaccatcccaccgaactctctttaagtatggttaatttttcgctagcaaataggttcatctaatgcaatttaatgtttcagcagccattagagaatgatattaacgggaaaccaagcgaggagaaactcattcccgtcgtggaaagcacgaaagatgaaccgggatggccatcttttggacaactcatcattgatctatcgaagctcgggcttgaaatgttgggtggattgtttctttactttgttccctctcgtttgagatccattaatggcgctaagaaaggcctcacgccattgaaagatactctcaagatgcccgaagacatagtcaagcctcctcctccatctatgcagagacaaagtgctcctgtgcctattaccgaaactcgccatgtccatgcaccacccaatgtaagtgataataataagtattcagatttgaagcccgctaagattaaatcgagcagttttaaggatccatcattgtcaagcaaacaccgatcctcgaaaagacaggagtatgctgaattttatggttcgggtgaagtggccccgcctcctagtggaaggtctaagagccaaaaggaaagaacaagacatcgtcagcagcgtgagaagagtggcgaggtagtttttggagagccgaaacctgcttctgaggttaagccggtgaattatgacaacccgaaattcgatcattacaacatgagggcaaggtatgcacctgatggttccttccgattttgagtaactctacagctatgttggattggattttcgaaaaatgccattcattttcgagcttttccgaagatcaagttctttaaagtctgtctgtctgtaactaatgatgtatgttttagaaagaaaaagaaaaaaaaaaagaaatactgataggattgaaaaatcaacaacaattaactgatgattttagttgttgagagaagcttttgaccatgttgttgtagaagattgaaagccatttttatgtactaaaagttgttggtaagctcaaaatgtactgaagttcttctcttttgtatgatttttgcttgaatgggttgaattgaaatttcttaaagcaaaagattaaggctgtgtttggtagagagtagagaaagttggagggaaagtaagaagaaagaaaatcacttttcttctgtacttttttggtaaatggaagtttttaggtacataaagatatcgctaaacaaatataaataggaaaatcacttctttttttccatacttgtttggcaagaaatggaaatgaagagaataaagtcatcttttttatttttcatatacatatttagaaaaatttgtaaattttattattggacaagaatagtttgcaaattagtaggaacatgccttctattataattacgatttgaggataaataagtagattgagttaaataattgactgtttacagatcgtttgacaaaaagaaagagttttttgccatcagaataattaaattaaaaagaaaatatataagatgaaaattattacggaaaagattgattaaaacttgacaattaaactcaataacaaagcgtttagttatatatgaatttatttgtaaaataagtatttttctactaattttcttttcttcaattctaattttttatttttctttaccaaaaacattgcaaagatcaaacctttaacaaattagagggtaaagcaaatgttgttagagataagtattaacaaagtgggtggatgattaaaaaatgagtttttgttttagttgatgatgaagtcattttcatttatgattgtaaaaagtagataacaaaaagggcaactttgcttcttcattgtcataattttcttgttctatcatatccatatttgatttttaattttttttgagtttgatatgtcaaaatcatttttgggtaaggataatgatttttggacaaaaaaaagtgaagttcattcatgtttatattaatctttggtggttggtgtttatatatatatatatgatatgtatatgtctctatcacgggtatcttgctctttctctctctctctcacatacattttttttagtttatttttaaaatatgtattttaattttactaatatttttttcttttaataaaaaattgtcgtattattattttttaaacaagtaatttgtgacgtatatatttaaaattatctctcagttgtaaataaatacataagtttaattttggataataactattttggaccctgttataaaatttaccaattagaccctctatttgttaaatgacaaaaaaaaaaaaaagaccatgaacttaattttcaacaattttattttttaatataaccaactttaagattatttcttatatgaacagatacagataatgtaactagttttgtcataacatctttagatt

SEQ ID NO: 185694 - DNA, 2352 bp, Cannabis indica
ttctgaatggctcgatgaattcctatgccgactattttcattgctcttacacttggaaccaagcagtgttgtgtaagtcatgtttttggttctgttctttgttagtgtcattggagttaagtttcgctttgtcacgaattaactgttgattgtgatgcagaaatgaaggtttacattcatcatcaacatccggaacatttctggtcgaggatggtccatactacttctgcatgctcgagattttgtttggaagactttcgcaacccttgtttaatcaggtttcacttgttcccgcctgttcgctttcagttttttttccgtggtctaacgtatcaaaaagatgttattgtaaacttttccttgattataataggcgttaaagaagtttccaagttgtcagaccaatatcttcccggggcaattgcagaggttggattgctttgctgtgcttgtgttcacacgaacccagaagatgcagtaactcaacttgttgagccaactttattgtctgttatatcctctttaaaaggaataccatcgactggatttggaggtagagggactcctgattcgtctgtttcaaccaaggtacactcttgtggagataatattactgtctaatacagttataagcaccgaaattcttgttataatggttatatttgtcgctttccaggccaaaccctcaatatctccagctcttgaaacggcgattgattatcagctgaaggtattatcagttgctatcagttatggaggccctgcacttctacgctataaagatcaactcaaagaggccatcatttctgctttcgagtgcccatcttggaaggtttttactccttactcttcacaaccgatgttcccctgtaataacaagtcttctcttgtagattgactactaagtggtttaattgtctgatcaatttataggtcaatggagctggtgatcaccttctgcgatcccttctcggaagtctgattctttattatcccatcgatcagtacaagtatgtttttttctttggcatacaatggatttgttgaacattaaggaataagatattgatcaaatatctattgtcctaggtgtgttttacgacatccaaatgctgctggattagaggaatggatcagcacaaaagatattttggatgataaaaatttggcggaacccaaatggcatgttccaagtgttgaagaagttcatttcgcaaatgagcttttagaccttcattttagttcagctttggatgatctgctcaaaatttgtcaaactaaaactcattccgatacaggtaatttctctctcatacagcctttcgatgatcataacgtgtttttcacaacagttgactcacttttttgaaatcaggagatgagaaagagcacttaaaagtgactctcttgcgtatagattcgtccttgcaaggtgttttgtcttgtttaccagatttcatcccatcttcaagaaataagatggtcgtagatcaggagcatatctcgtttttattagctggagcaactggttcgactgttggaagtattgctcttcgtgaaaaggctgctgacattatacacacagcttgcaagtaatattttgttaaagatctcatgatggattttctattgtctagttgatacgagatactgaagcttgttgctctttgtgctttgagcagatacttagtagaggaaaaatcagatgacagcattcttttgattctcgttattcgtatcatggatgctttggcaaactatggtaacggctgtgatctatatggtttcgtattttttacatttgcctcacacacatgcatcctttttaatatttctctcttatagggagtttggaatacgatgaatgggcaaatcacagacaagcttggaagttagaatctgctgctataatcgaacctccgattaattttattgtgtcatcccattctaagggaaaaagaaggtaatgatatgaagtttccttttgattccgggaactccagttctattatcttagcattgatactaaattattctgtaaaatccaggccaaggtgggcacttattgataaggcttacatgcacaatacatggagatcctcacagtcatcgtaccatttatatcgtactactggaaatttctatccatcggaccatgtgaatcttttgatggatgatcttcttaatctttcgttgcacagctatgaaactgttcgggcgtaagttttcaaatcttctttagcctttcagaagtggaaaaatagcaacctaaataaagccattgccttcctttgcttattattaattgttccggttttggaatttttgtgtaccgaatttgattgaatgcca

SEQ ID NO: 185695 - DNA, 4098 bp, Cannabis indica
ggaccatctaactttgtaccttggtagaaattggcttgccattgctagccctgagagcccttaattggctctataccttcatgaaaatgttgacccatttttctcaagggttggaatatttcattctataattgtatgtaaatgtaaaaaaaactataatatataatataatataatataatacatcgaattatattttctgtcttttgcttagcttctgttcgtctgtttaattgtaaacaaatggagcattgttgaggaatggccagtgttgctacttagcacgattttcatttgtagattttaacgtgtttgaaattagaagtacaaaatttcgcaataatttatcaaagcaaagtactcgaaagagttctttttcttttttgtaatgtatatatttttttaaatggtcattcatttcattatagtaacttataatgcaattttgcatattaataataaaaaaaacttatccttttaaaagaaagaaataattataaaaaaaaaacttacaagttactaaattatgatattgcacagcactcaaccaagtttgagtaaaaacaccccttgacatgcatattttttgagcaattttagcacaatctgggtagtgcttttaaaatatgaaaaatatgagtgagaactactctattaacgtacacatttgacattttcttttttaatccttagctcaattttaatttatcaaaatctcagaaagatgatgcacgttcgccaacgcaatgttaggccttaaaaacatataaattacttttacggtcatgcatacaaatgttaaatttgtaagataattggcatcaatcttatttgaattacaaaatgttaaaagcaagtctatgaatctttcattcaaacaaggcatgaatgatacatagaattccctgtgcataatacaggaaaataaagtaagaataacacaattgcacatggatgattatccaatgattctcacattcactgtgaggtgaaagtaaataaaatatacgattacagaggtaaatttaatacacagatctgctaaatcattttaacaggaggatgatgcaaggtcaacaggaaaaattaaacagtagaaaaaaaaaatgtatcatacataaacagagggaaaattaatcagcccatatatccttagtttctcttctccccagcaattccaatgagaaccaacccctcatgatgtgagaaattaaatcctttttagtttattcttcttttatgtgtcaactaaaattatgtacctaccaaagttttccccattcctcccaccttttaccaattttttttcttggtatcatcttaggccaccatttatgtatcttcgtctacgtctcctaccagagcgtcccaataacaccctaccttgtcgtcgaaggcgattggccaacgacatatcaccgctgccgccgccaccgccttcatcgttactgtcatcattgtcatcatcttgatcagaggattctgcgccacctacaggggtcgtatgccgaatgccaacagcattaccatttgctgtctcgtggaagggcaatcgaggctgaggcatccttctattgaattcatctccgcctgacggcccgaatgcgtgcagtaaaagaaagacattcacaagattactgtcaaaacccatctcataaccctcggtcctttctgcagcccctgcatctacaccaccctcttcatctgaatcaaatccataattgttccttcaattacatagtccccgaaaacattgcccctggcatggttgatgttatggtgctcatcacatcattccgttcccgctcccgctcaagtcttctccatttctgctccagagcaggatccacttcacgtggtcgtgcagaagggtgctctgctctgacatgccttctcagctccttgtagttcccgaggaatgagcaatcatcctgcatacagcttctctgtttggcatttaaatattctcgtgcaggttcaaccacagtccatcccttcacttggcccctgcaaagggggcatgccagctctgtgatttcactgttctcaatacccgggctagaatcctgtattacaataggattatcaactgagccatgaatacttcgtccactagatataactttagtgtaagctttcttgtattggtcaagacagttagaatatcggcagctagtcccacacatgtaaggtcggcaacccttgtcatgagaagagcagaggagaaggacagcattgtgaggaaactccatgcatacagagcatgttacatcttcccaatcttttttctctacaattttggaacaattcttggtggggaaatcctccatgatatcctgatcaaagcgcagatggtagggagctgatctgaattgccgtgaactgatcctctgacgtcccctgctaccttttgccatttacaacctaaacttgaaacaataatgtggagtccatcaataacacaggataaagttgcatgaataggcaattaagtctacaaattagaagcaatcacatataaacacgagaaaaaaatatatgggagtaccaaattgatcaaatttgatagaggaaaataaaacacatatttcttcaataaaaaaaaaacaacattttcagagagagagagagatagcactaagcatgtagaataatcaccaccataccacacatacaaacaaaaaaataaccaccaccatgcacacatacaaacaaaaaggaggcatttaacattaagaaaagtgggggagagagaccatccatgtacacatacacacaaaggaaaaaggtattcaagttgtggaaacaagagacaaatttcaaaaattgttaaatggctatcattctatcaccattgttactgtgaaattgtaaatgcataataatgaaggattcaagtcaagataactgcctctaaagacaatagatgagaagcctaaaaccttttttaaataatggaatgagagacaaacaaaggtcacatgtgacctcccaaatttattgagagtcctcactaatggtttactcatattaaacttagagagcttatgcaactatctagtttctaatatcctcccatttccactgctacaaaaaccaaatcagacacagaagaagaccgtaagaaaatattacaaattatttgtgtgaagtttaagctgcacttcctaatttgctatgtcctgatgctttaaggaaaacataccattaatacactattctagaagaaaaagcgataaaattttatcaaataaattcagaaattcacaatggagcaacattacaagatgaaatgcacataaacctctaagatttccatctgataaaaatatgtatatggatacaaatccattaaattaaaaagttgaactcttatagacgaactacttggtcctaagtgaaaggaaaaagaaagaacatccctcccatgcttacctgacaataactccagagcatacgtcttcataaagctgaagagatatggaaataacttaagcccattgaaacaatcccatatgtatgttgttcccatcaccataaaaaaatataagcaaccttggtcgacgaatagaagaaaaatgatacaagggttgtggcctattgactcaaattaggtggcaactgttctgctaggcttcttaactctactagagaacttcttaattagcaaaggttaacgggagtaagaaaaacctactcacaaactaatacctggacaaaaggcaaaaaattgaaatgagtccaaagagaaatgcaattaataaatacattgtaagactttgaatgtgttttaacaatgaacctcatattaaaaaaaaccattctgaccaacaaaccaaaagagcagaagtacaatgggctaaatgagtaaattttcaatttaacttacaaaggcgacatatctatctcaaaagattctaagggaagaagaaaaggaatgagactgaatcagtaccaactgtccggagaaagataagtttccagtatgcacaaccaatagtcttatcctaaactgaatttttaaaataaaacagacaaatctgccatgaataacagcagatccatctatgtaatcaaccacaactgtttaaaaattca

SEQ ID NO: 185696 - DNA, 596 bp, Cannabis indica
ccttggccatagccacggcaactacaacaacaacacaacacaaactcattcttagttgtcaaaatcccaataaacaacactaagaaagaaagaaagaaagccccttcatataaagtgcaagaagaacattagagtaagttattacaatccataatgagagtttcctactgatgtgtataattatacttccaacatgcttgataatgcatacaagagtataaaagaaaatggagaaccatgaataaaaaataaaaagaaaaaacagaagagagaaactgtaaattgagatgagcttacaagataagctttcagcatcatcatcaacttctgcactaggagcctttttgtcagttcttctaaatacaactttcccatatctatcaaacaatttatcaaacatttcatctgtatcttcacttgcattctgcaaacgaaaaattcaaactttcaaagattggaaaaaccacaatagtagaaactaaaggcccaaaaccccattaacaattgagttagagttagctaaaaaagctactctctttagttctttttgcaataacccataaaaaaagtgtctttttttttgaaaaatgaaagag

SEQ ID NO: 185697 - DNA, 7453 bp, Cannabis indica
aaattatatttaaaagtttagaatatatctttaacaaaagaaaaaaagtaaaaaactagcaatggaggttttaatatatacaatttttttttttttataaaagtctaattttaatcttttgcacaaagtctccaaaatgattgggccggccatgcccataatacacctgtaataatgtatattagcccaataaatttaataaccataggattagatagtgatatatgtatatataaagggttaatggatttttagtaagatgaatagtaactggtgaatagaaaagatggattgctccacaattgtctttctttctctctcttgcattttacactcaaatcttgctcttgccagtatgctggttttagatattttgcaatagctcaatgtgttggaataaataatataagaggtatattttcttaatcattaatgctttaaataaatatttgatcttggtttgtatactcataagcattattgatgattattacttgattattgaggtatataatgtttatatgtgttaagttttatcaacaatacacactattattaatgagtggtctggtcccctactttcaatcatatttattttcttctatgcatgaaaatgatactaaacagacagttctatatatactatacataacatatccaagcttatatttttgggctagagacttcatcatttacaccttcacctactattttcatctaactctaaacttttgtggtcctctcaccaatgagccttgacccaattttgaaaattaagaaaaagaaagaaattaaagaaaaaagtattagccatgtattccaacatctaataagttgaaaatgaagcacattgagatgatgctcatgtccatatcaagaccaccaaccattgcaaaatgttattaattacaaaaattaacaacaattacaaaatgttattattcaattgtaaaattagttcaatcattacaataaaaataaataaataaaacgagtcaaagctagcttgaatgttaataacattgagattagtacctattagaatttgaaaaattattttcactttttttctagtcttcttatttctaaaaacactaccatttttggtattgttattggtgattgtaagtgtgttcttaatgacttgaaaaatattgactcgtacgttttgttaaacggtcaattaatatacatggtagctcataatcttgctagagtttctattttatatttttaatttgggtgatgtcccaactgagatacttctttatttggtagctgagtttgctagttaataaagttaattttccattaaaaaaaaatactaggatcatgattaattgaaaaagattcttctcaattgaagggccccaaacatttgaaaaatagagagtgtgtagatcattagttttgacaaaatcatgtgtagaataatactaatgttgaagaagaggagtaaaaggacacttatcttatgttctactttggcatttttttttagaaaggttctactttttatcttcttataataaaggcctctgatcttgcaagggatacacatgtattgtaccctataaaactcaatctaacctaaccatgttatttagttttcatttaattaatcacaatattttgtcatgcatacccactacatttccctcttttaattctaattaatatcattattataaatacatacccaccaattactaaattataaaagtcattcttattgtttttaattagggtttaattctccaccaactaacataaaaatacaagtaaaccctattgttagtgagatacaaaactttagcctaattagtcaacttagtcttttggcattttcttctaaactaattgtatttctctaaggttttcccttcttactttatatgaaggaaataattgattaatcatggcaataataagatatgattaagacttgagcttcacttacattaaatataatctttaggaacatataagtattttcagtatattttttttacatgacggtgtataatatagttatagccataagagcatctctaatagataattataaatgtggtgtattgttattttcttaaaatattttgttaaaatttaactttaatggtgatgtaaaatgtgtatcaaaattggtcaaagctaaaaattatgctaaatttggcacaaaagatgatagcatgggccaaattttagccacaataaataactttttttaattacctttttttcactcattaatattatcattaataaaaaaatatttttatttgtaagatattaaaataatataaataaaattaattattttatacattttcaatgagcattaatggtaatattgacttttatagttaatttttactgtgtgcattggaacacaaatacaaaaatcgtgccaaatataattttatggtatattttgaactaaatttaattcaaaatatacaccatacattaaaaatggtctaaggacatatgcaataagtgttttagtcataatttcaaaatgtgatctaactacatataacttatattaaaaatacatctaaatttattgcgagtaatttgtaatattgataacactaccaaaaatacttttagtgataatatagaaataattatttatgtttagtcacaattttttattacttataaaatttattgtgactaaaattatttattaatttttttttgtagtttattgaagttgaaacccattgttgttgtagtacatgatcaagctgtaagcctgtaaaacagttgtggcatagataattaaaatcgaaaaataaaaggtcataccatagtccccactccacaagaatctgtttgctaatattttaacaaaggggaagaaaaagtcacctcctttgctaaaaactaaacaagaattagccccacacctcacattcactcaaatgagagtatgaaggaatatcaaccctttttttaaattattttttactatgtaaataagtttaattttttagaaagaaaaagaaaataattataagtgagagctttataagtcatgtccaaataagaaaagaagaaaatgtaacataacagttattaaagtagttttcttttatggtccatcactcctttggggatccaactaagaaagaagctgttactttcacccatttgttgttctgcttaaagaaccatcaattattctatgccacttcccaacacatcatgcagcattattataaaataatcctctctcaaagaaaaaaaaaaaggaagggtgggggtgttgtgtcaaacttatcttagattttttatggttacacacattttggtatccatttcccactttgacaattctaaagattaattgccaatagtgatgtaaaattttgttgaagtgtcttatagaccaaagttcaaaaaaaaaaaatagttgggaggcttcttcgaaaactgtcccaaccgccctaaggcaatgatcattcacactgagacagacatggccttgtggaggtagaaggcttacgggtcatgaactacatcaactaactttgtgtcaattgttgcggtaatacaaatgatacaagcgttatacaaaatgattgggtgcaaagtatctctctctgggtggctttttaagcccaccgtcataaaatcccaatgcggccatcggtagaattcgaacctttgaccaaaaacaagaaaaattgctaatagagacatttctcccattactctgaggttaattagtagagaaatgctaaaagatattagtggtgcctaacacttttctatgtgttaatatcgttattggtctaactaagtatcgagtcccatataatttaatataataatttttaaggaatatcattagtcaatcgcaaggcaacatatctaaaggtgttaggtaccactggtgtccaatatggttacatccaacataaaagtatacatcatttatggatttgattgatgatatatgaaaaagcagagaatttttatgaccaatacctacctaccaacattacttttagtttttaccaaccgtgtatgatagataataataatatgtaagccttcttcactcattcccacaaacactaattccaaatctcactacgttttttgccatttacattacacaattacaaacaagtaaccaaatgagagtatgtagtaagtgtcaccttccaacaaaaaacgccaaaacctgcgttttgtgactgaattcagtgtcaaataattcgcttaaatcaaatatggaccacatatataattcaataaatagtaaaaccaaacaaatgaaaggcaaaaaaaatcacaagttcattgtaatattttgttatttatcaccaaaagagcaaaacgatttcaaagttggctcttttacaaagatacctcaactaagaaagcagaaaaatgaaaactaacaaatgaaaatgatgacccccaattccaatttttgcatgaaatggtgtaacttcttctttgaatgaaaacttctggttccttcagtatcaaaattgacttttggctcatgtacatacacagcatttaaactcaaggttgtagcattatgtaaaaagtcaacaaaactctgaacagttcatgtttttatcaattacattattattataaataaaagaaaaaaatatatatgtatatacacctcgtgggggcgagatgtcaatatctaatctataatatatcaccattgacgaacagctaagcaaaacagtactccaaactagacttgaccttacttattgagatctgtaaattattaatatggggaaatttcatttcactatataacaatttcatatttaacattataatacaagagagataggcactgaaaatgaaaattattaaactaatcaagtgaagataagagagaagtttaggagtaattaaaaagatccatttattctcactccctaaacaacatttaatatccaaagttgaaaaacatacagagagagagagagagagagagaaagagaaaagattccctcagatggagaatacagtaggcatgagaaaatgaccgacacccctttcaaccgattgtagttaaaaaaatgtagaagaagaaggaatttggggggtatggccaaggaatggacacaatgtaataaagggtttgaaaagtgagcaacaacaactatatataattatacatatggactaaaacatccctatgattttctaaatttgcatctcataccactagaaactttgtttataaataaatttcgagctaaatttataatggcaggcacagaacaatataacaactataattttatattaacttttgataaacaaggatataactatttcatacactaacaaaaaagtaaaggtagaaaaagactattagaagcttgattaataatactaagtacatgaaaagagaaaactaacttcagatactcttcttatcaatcttcaggttgagttactcagaatggcaagctcttagaagttgaactcgatgtgagtgacttgaagtgagtaggaactagatcttgtggtaaattggccctcttcactatcttcctcatgttgttttgcaagctctgttgaactaattgcttcactgctttcttctcttcactcatcatatcctccaattccatacactctgcagaacccatgtttggattcgccgaagaggatgaagagccacagattggtgcagaaactgtagagccacccaaattcccacaaaaactttctgaaacttgctttcctttgtccactcttagacaagccaaaatcctagaagccctcttttgagccaatgtactacccaagagtgttaattcaagcaaagccgaaacgattccagcttcaatcatggcttgcctatccccataagttttatgagccaaaaccatcaaaatgtaggatgccttctcttgacatgcaggggaatcattccaattcaacacatcaaccaaaatagggaaagcatcacgaacaacaccgattgctttccggccttcaggggttgaaactacattgcccagaattgaaagaattctctcactcacttccatatctcccaatgaactaaacataaatgggatcaaatcagtttccagaataaatgaaacatttgatgggaagattgaaagattgtaaagggctctcaaagcatcttgctttgcttgtgagctagtgctattctctaaatctttgagagttttaattaagaaaggaatagcaccagaagatccaatgatgggtttgttagaatctaatgcacttaaacctagaaaatttgctactatagcttctgaaactgatgggtttagagaattcggtgattctataagcttcaacattttgtgaactgcccctgctttgacaatagcccctttgttcctgaaatatttgaataaaatcactcaagattgaaaaaatggattggaatgggtaaaacatggattgaatctaaatttgaagaaagaaaaagaaaaatcacagcaaaccccccccccccccccaaacagaaaataacaaaaacaatgaaactgaaatatctgaataaaattactaagattgaaaatcgattgacacataacatacaatgaatctaaattcaaagaaagaaaaataacagcaaaaacacaaacagaaaacaacaaaacatggaatgtgcatgaaaacgaaaacagaaatttcccaaaacaatgaaaactgcaaaaactcacacgtcgtttccgattccaagattgagcaaagcatagagagaagcgatctgagtatcatcgtcttcgaaatcgagcattccaacaagtggagggatcgctccaagcatagcaagagtccctctcgcttccaaatcttccttcgcaagcaacctaacttcacgcgccgcttctaatttcctctcaacctgcaaatccctaaccacgcgcttcagtttctccaacgcatcaactttcttcttcgtcgtagcagcgtcagcttcactctccgaccactcagccaagttgagaagatccaataacttctctgatttcccattactacctttactcttcaccttagctttctccaccaccactaccttctccgatttcgagctctcaacgaccactgatcgttcactctccttaatcggagaagcttcatgctcatcgttgtggtgacgatagcgagagctaccaccgcaactgacagcgtcaaatatttttcttcggaatgaggctgctgaaaatgtagaccataaccggaagtgttgtccgccggaggaaactggtgcggcggcgggtcggtcgagaatcaaagaacccacatcgtttcggtgacacctagccatttttcactactgcatgctacatttcccagaaatctacttcgcaattgagtgactgatacatgtgtgtattatatatatatatatagagagagagagagagagagagagagagagagagagagagag

SEQ ID NO: 185698 - DNA, 3979 bp, Cannabis indica
atctatatttctttattagaattaaatttttctcttttcatttcattactttttactttgaaccaatatgtctgttttctgagttattttacatttgcagtagaaccttcatctagagacgtggaagattccaacttacaagcacatgaattggtaatgttttcatctgggcaaacacaggggtctcaggctagctctagtgatgttgcgtcttcaagtgggtatcatttaacacatacagaatcatctaatactgaagctagctcctcagttggggattcatctcgaatttctagctctcttgtacaatcaaatcaaaatggtcaaagtggcatttccatttttcaagggtattgaggctcaacatgctacatattgttgtattttggaattgtccttttataaattaatgcatgatattaaaatcaaactataaactatcggaaagaacaacgaggccacgaagcgggggaaaccattttaggacatagggcaattgtggtatttttgagaacataaattctaacagtttgaatttaaggaaatgagcttctttccaggaaaaaagtatagggtcattgatgttgctctcttagactggctaatgggaagcgtcattaaaacctcactaaagctaaaccacattttttaatgtttcatttctaacttgagtatcttgatgcctgtatcattttggatgtcaacagtaatgtgcatgatttaactttcagcctcattaatcgagttcgaagaactgtctgtggatccgctgatgacattgggtggatgcaacgtgatccggagatgcctccagttgaagacgggacacacagattcacagaaactcttgatagtatcaggtaatgcttgatgtcatatattgcatacctacatcggaattaacaattgtccgttgttgattcaactatatcactttggcaggcatggcgttcacaggttgccaaattcaatggtttacttattggttccaggtagtgtttgatgttattgtattttaaagacaaaatattatgccaagtttcgatttatagcttaaatatcgtaactgttaaatggaaactaccatcttatttgagaattcttattggttccaggtagtgtttgatgttattgtattttaaagacaaaatattataccaagtttcgatttatagcttaaatatcgtaactgttaaatggaaactaccatcttatttgagaattcttttacgacatattataaagtggagccttttacttaagatcttggcagtcacagtttgacttgtgaattccaatatcagtaatgagttaactaattatttctttaaagttattggataacacttcttgtttggaccttgaatatttgaccactcaagttttaattcaactgtgataaattaaaatgaatacaattggagtggctccaatttattgtatggaagtttgttcttactgggcatcttgttaagaccttgaaatttaattattaatctagctaactccaataaatcaaaaccaagaaccatgtttgaagtggctccaaattttcattgtgtggaagttatgacctttcttatgtttttacacactagtgagtcatgctatgcctggaaccacaaaaccttacttaaattgtgtggctggtgaattggcagagcttttggctgcctagcgagtcatgctattttccttttacaacaactctagagatagttaaaatgttttattggatatacaactgttttcaaatcttgatttgattgctttttataatttacaggtcttttcagcaaccatggaccactgtattttgtaaatacaaaaatgagcttctcaaagatgggtctggcttgtcatattgccaagattcacagcgaggtattttggttatcacttatgcaaccgatttctttattattttatttttttggtaaatatcattttagactctgtgttttgcaaaagttactaattaaaccttctattttgttaaatgataaaatggactctggatttgccaaaatagtataaataagatcttaagctgatttttttgtcaattttttgtcaaagtaaaacttaataataattcgatctagaggtgttataataaaactggttacattttctatatctgtttgtgctagtaattgttctcctgttagttatattaaaaaaattgtcgaaaattgagttcaatgttttatttttacaattttgaaaatatagtgtttattttgtcattaaacaaaatagatagtccaatcggtaacttttccaaaacacaggtttcaaaaaagtatttacccttatttttttagttagtagcaaattgttacggaaattaaactgtagtttctgtgagtttaattaggcctcagtcgaaaaaaatgctagggagataaaggagtacattgaggaaatctattggggttctgggaagcgtgttttgcttcttggacatagtaaaggaggaatagatgcggctgctgctttgtcattatattggcctgatttaaaagataaagttgctggccttgcattagctcaaagtccatatggtggcagtccaattgcttcagatatcttgcgagaagggcagcttggcgattacgtaaatttacgaaaacttatggagattctgatctgtaaagtaattaaggtattgtgagttcttgtcctcttttcatcattcaaatctatagcagcatgcttttcatcccaactatggggcatatattgttgccttctctatgccaccaccccatctaaagatgtctttgtgggcttcttgcctttgctttcttgaaaaatacttcaactacacccaaaagtaaagacaatttgacctgtggaaagaggcctgaatgtgatgaataatgtttagacgaagataaggctcattcattatttcctggggttgcgaaaaggcgtaaattctatatgctaagatatgttaatataattttgtgtggaagtgttgaaattaagcaacacataaaagtagacatgttgctaaatgctttctatttgactccttagtgatactaatgttctaatgctgttgtcatctgtctatgatgaagggtgatttgcaagctcttgaagacctaacatacgagagacgtagagaatttcttaagaaacaccacttgccaagggaactccctgttgtttcattccgaacagaagctgccatatctcctgctgttttagcaacattatcgcgtgttgcgcatgcagagctacctatgatggctcccctttctgctggccaatcaataacaaaactgcctgttgtaatacctcttggtgcagcaatggctgcctgtgctcagcttctgcagatcaggtatggtgagaagagcgacggtcttgtcacatgccgtgatgcagaagttcctggttccattgtagtaaggccaaaacgcaaactagaccatgtctggatggtttactcgtcgttgacagatgacccttctgaggctgatgcgtctcaggtgtgcgaggctctcttgacattgcttgtggaagttgggcaaaaaaagaaaatgaacatgccatgaaaaacgaatgacaaatgagtttccatcttgtctctctgttattgttgtacttgtacatttttcgtacattagtcaaaatatcttattcttatattacaaatataagaccgtctcccatatagtatattttggcaacaaaaaatcgataaatgttatatttggtaaaccatttctaaatttcttattatatttcaatgtatatatagatgcaaattaagtaaaagaacataaaattataatgaatattcaatcaatatttatcgaaacatatcacaaatatatttttctaactaaatttgacataaaatagattttttattaaaggagattacaaattttattaaccatccatcttagctattaaggtggcgtttcgttgggaaaaatgaaaatttaagaataggaat

SEQ ID NO: 185699 - DNA, 5518 bp, Cannabis indica
tataccgtatcatatccattctcatattttgttcgtcccaagtcatacttgtgcctcccaggttgtcatttcaaaaagttcagcccatattggtgactaatgattacgacacaacaatgcatataactaagtgcgacaaaggatgatgtcgtcactcatgaataattgaaaacagtagtacatcccaatagtaaggagtcatatttgttcaatttatatctctcaacttacatctcataaaccttgagtggtggattttacctacctatattgaaataatttgagttattgatgcgaaaatatctaagtttttcatattataatacttaaatatttaatttttttgtttttttatcatagtaattagaatcactaataaatttacaatgctcttcgcaatcaatacaaaatcctcttcgaatcaaaatatctcattgtctaaatatttttttgttttttttttctaagttaaaaaatacttccatctctaggtgcatttacaaattcaatgttttattaggctaactcttcaaaaccaatcctaatcattgaaattatgttgtcgtattaagaacctgaaattaatatatatgtatataaccttctttatttttcaagttctaattaattttcttttcatgcttctgtagtctcttttaactgtcatcggaaatacttggatgaactctaatctcactattcattttttcctctctacaaactttgttgtccttttcagctccggcgttatgccatccgtcatcgtcttcttcataaacttcaatttaggatgtctcccattgccaagttctaccattattcatgataacgcaattgatgctagggaaaatcatagtatgtcgcaacaaaagcttgattcgagacgtcagcaaaacgctacgtctatttttaaagacgaaagtcccttagcgtagaacccatcttccatcaataggtactcccaacgcatcgatgtgttttttagtttttatttattaaaaaaaatagtaattactttaaccaaacagaatttaattgttaaatatcaaaacatgatggaaaatatgtattctttattctataattacaaaaacaaaaaaaaacaaaatcattccgaacagccccaaaatagataataacttctaatattggataggaaaaaaaattaaacaacttctctaattaaaataaaagactagtagcagtggtggtaaataagttctgagtacttgaaaaagaagaaacggtgaggatgttttctatacaccaattctgtcttaatctatagattaactagactcgacatgaaagaaactttccacaagcaccaccaaccaaaatcatttaagatccgttcctatatttttgtgatatacatggacaagaaactacagctacatatatcccagtcttctaacctgcaaagccttctatgaaacagggagaaaagaaaaaaatggaaaattattaaacataaaaaacaaatcaaagcaagaacctaacttctttcccttcagaaattaatcgtataaatcatgttacatagataaaaccctccagctttattgattccctctcaataagccgaagggcttacctactcttttggataatcttttcgaccttatcgaacgcatgcgtctctctactggttggattcatgaatcgacacaaaagtgcaggataacaaaaacttactgtttccacgacggtggttgatgctgtttgtagctaaattggtaagcttcccacccaccatccggttccttccttttcccaccaatagcagaacttgatggcggctgtgaattggtcctaagctgctcctccagaggccttccctggccagatatgaaaaagggtctcaaaacagagtccctgttacctcctccctcaacaacaaacccagaatttagatcaaaattggggcgtgaaggtccagcaccatttagacttggatgtgcattcgccatgcccatgatgaatggatgctggggaaaaggtggcgcagtagaaaccagattttgaggcatcaacgtacctcgtgaatccaacatgcaggggattgctccaccaggtccatacatgggattggagaaagacatggtgggccctgttgccagaccattgtacccataaacaggcgaatgaccatatgaccctgtggaagcaagtcccaaaaaactccctgttctcgtcattgtagcagcatcaaatgcaggctcaagagacttgccactatgcagagaaagaacttgaggaacagtgtcttttctgttgatttccacacgggtacccattatagaaataacagaattaggcaccacaaatttattaaccccctgaaaagacttgccagacccttgttctatggaatcaatgaaagatggtctgtcattcaaatcaatatttctcataaaaggttgcattgatgaagatgatgacgcaggagatggactgcggtggccatttcggtgatggaacaactgctgcccttctgccttcaaattcaatggtagaacatcactatcatcttcaatggtatttaaatccaacttgaaccttttggatttttttggactcgcttccacagaagattccccagaggggaggccagacaatgccggaatttgtttccccaagtcctctccaccctcggccacattgagatcaatatctaggaaatcttgcctctgctttgaactactatcactagtacccccaacagaatgatttttatcattgtcagaatttctgcgaggagaagctggtcggaaagcactagtagcagcagatcctttccatccaagagaaccctcaaactgtaaaggggatactgacagtccagaagtcactggccttgaagcagaaacaacaggaacaggggtagatacaatattagcataacgttctacttcatcagagaaaagttcttcatttagatcaaaaccacaaggacctttgtctatgttcatttttgtttcttctacagcttcagttacttgggaggagtctacggcatgggtgcagttttctggtaccacatccagattagcgatgtttctcacctgcagatcttctgtaggataagcctcagcagaatggctttgagcagttggttcctccttcgatgaaacttcagggggtcggtcctgtttttcatttatggagtctggactacctgcctcctttggttcgcctgatgaaattttctcagaagaagaacaactaaatggtcctttgagatcccctacttctctttcaacagcttcagcaacgcgccgagcaacttctagagcgtcaaccccaaacccaatatcaaattctgaatctgatcttcttcggtcagtagcacgagaacgattggaatccatgacaggcttagaaaactcataagcactcctaaaatctgtatcttcatcgctagcactctccatatcttcatcactagaactcttcttatgttcatcatccctaccatactccttgtcatcatcaacactttccaggtcatccgtcatagaagaagtccctaaatcttcaggttttgccaaagaattatgattacccgatgagaaatgtgacgctttagagcaacattcactatcatcaacaacattgagattatttataaactttgaatccccaatcacactccttgaatcagatgcagatgccactgcaccaccaacaggagatagtttttgacagctatcattttcattcagtccgccattattttgcaaagtaggttgcttcataagttccagcgaacttgaagcaccagcatctgatgaaacaataaaaggttcctttggacttggcaacgaattttcagctttgtctgcctgcttttcattttttgtgagctcatttacttttgaaaaatctggctgtccctcaacagtgccattcttaggagccacaaaactaggctcagatggtgtgcttcctccaatagaacacacagtggaatcttcttcggtagggcttttctcaacagagtttaagatgataagcgctgaaggattggcagttatttcatcaatgttagcactatttgaacttttgtcaatgccttgctgattattaatctgtacatcatctcttcctgataatatatctgagcttattatctccttggcaggttctgcagtttgcatttcctcccctttaacagttccttcagaagtagagacacctgaagaagatggcctatcttcatctaaaataggctttgaagtcccatcattatgcaataaaccaacattgtcgacaacattgttaactttatcctcacagctttcctgcttccagctatcaaacagaagtttagctctgtctttaactctagaacttttgtgcccaagaagagtctcaatagtaatccagattcctgaagattttgacttttcattatctacatgaagcttttcaagtgcttgtaataaagcagtaatggattcttccacaaagctttcgtttgcatcggtacataactgctgtgcttcttttagccatctatcaatgaacaaaagaccatctaaattaatgaaacggtcaagacaatctttattctctgtggcagcaatagtgctggccacagcagtccactgccttgttgcatcactagcattcttcacaccacactctttctccttctgcattacagttatgagctcctcaactcgagacagggctgtgagcccatctttcatctcagtcaaagtgaaaaaatcttccagcgtcatactgcttcatatatcatgcttctcaaattcaaaacaacaattgagcagggataatgttctatttcccatacaaaattgttgtaaacctcagtgctagttgattgaaattactctgaaaacacaaaataaagttgtgtttagttattaaaaagaatcagatcaagtcacttataatctaaatgactgaatctgtaagagtaattatgataaaaaattattacaactttaagataaaacattaacaaaataactttaaaaattacttataacactaaaaatacaatgaatgaaatataaaaaaaatgtatatatttgtaataataataactagtcagtcacattagcttagccctatcccaataaacattcgttaaacttatatgttttaaaagaatttgaacacgatagaaacaacaattaaaaacattgaaaacatgagcattaattccatctctgaggtgtacaagatgtgacagctacaaaaacgccctcaatatcttctaatgaatgtattttccatgccaaacaaacaatctagtgagcaaaactaattagaaatgccccataaaaataaataaataaataaataagagcttaatttgccagaaaccaaaactcaaatctcaaacaataaatgtattaccaatccctctctagtaacatttactctatgaaccctctacatttcaaagaaaatacaaaccttaagagacataattttgttgattaaaaattcacaagaaaaagcagaagatgttgagcttctg

SEQ ID NO: 185700 - DNA, 6851 bp, Cannabis indica
ataggtatactcattagaagtgttctatgattttgtattttgaatgattattttgatgatgatgcagttctcaacagtgaaattatttcactaaggtgagtattgctgtattggtatgatagctagaaactactcttttgatgtagttgttttggctttgtagccaattatagacctgaagggatagaagctttggatatattgaagagtttacaactgtgaagatagggttttcttcagggttttcttcagctttttgtggggtagtgaaattgtctggttgttatcaatcttaataaggaatgatccaactcttactattaagcaatttcatgacatgtctttttctaactatccgagaattactagtggggctgcccattcattggcaaagctagtagtatcaaaggaaaattaatatggataccatttatcggtcatattttccaaggttgtatttggttgtttgggcttaattactaattagtattaaaatgaacatggttggttagttgtcaagttatttcttaaaaaaatttcaaggggaatgatatacgataaggcaattttatagcacttatagcacaccccttaaaatagaagttatcgtatatttttaattctgtatgagagaaattttggagtttaatttttttttaaaatcctatatgttattttatttaagatttcttatcatttttttacatattttgaaatagtttataaaatttaattattttattacacacgtaagtacttttttccttatacatgataaaattttggatatttttatttttagggctataaaatattctaaaactgtacagcataaaaacaattatgaataaataaataaattatccagattaaacagatagggactacgtaccataatttttttcaatgttttaattttctaacttttgaaagtatccggttctgattgacatgaacccgtgctagaaattccagccggctgaatatatttttcataataaaatcatgcttaggtgggaaagcatggactacgattgtgactgctgaacgaacctatttattgctcttgtaaggctgagatgatgaactttgtcgtttaatataactattatcagataaagttaaatatgttccttgaaccttgagggcttctgtatatgattcacactaatcatttcggaaaccaaatcgaaggtaaatacaaaatttttatttggaacgctaataatatacatttacaactaagaaaaataaaattaaagaatagtaattggggttactaatgtccataaaggaagaaaaagtataatgaaaaaagtgaagtcaatgtgttcggctctcatttgtagacgctagacacagaagatttgaaatttactaactcccatccctttccgtcgtatcaaattctctactcatctttgtcctcatcttcatcatagttgaatggtaatggcactgatttgaatgccctgtacttgcccacattgttcaaatgctcattctccaatctgataaataacacaaaaccctgttactacaaaattgtacatatttatatgtatccataagagtgtgtgttcttgttaattacctgaagaaattccaaataccacgacgaaggatctcaagcaatgcaacaatggctattaaggtctgtgtatgcaagaaagagacctggaaattgagcacagtttgcagccaagcaaatctaagcaacacattcatgccctgcatttatcgaataaataaaatcgatcagtaacagtaaacaaatgaaagttaatttggcataaaaaagttaagaaaatcccatatttcattataacttacaattgcaacaaaataaacactgttgtaagggactaaaagcttgtctctcaaccatcgattcttagagttacgctgaagaaggccccagtcgatgaccaaatcccagtaagttgaaataacggccgcagagattgagaacacccaggccgcaactttccagctcagtgaatggttgatactatgcgctgttctgacacttacagcaacaattgtcaagaagtacttaatgccattgtaaccttgcattgggtccttctcttcacaaacgacgaaggcactgaagaaaataaataaattgctaatgttcagtataatttcataataaaacagtttgaattgagaattaagaaaaagaataccaagttacctgaaggaggcgagacatgtatgggacagcagcaacaagaaaaagaaaaattttgtatacactgtggtctttgcaagttgtttctctgtgtttgtagtcaccccaaccgtagtagcaaatgtaaaattggacacttcttaaagcttgaacctgactcgttaactgatccgccaataagaaatcgggtagtgtaacctgcaatagaacaaagttgtacacataagtagctttctttaaagatagaaaaaaaaaataactgagaatgtttgataagcaaaaaatattcttaccttgtacagaggagcaaggagtccgtggaacaagcaggtgaggaaaaagtatcgacttgatcgatatgcgatgttaaaaggacatagcataaccgcagtaactaactgcaaagtgaaaaaaatagtctttcagaacaattaatgatacaatgataaatacatgtacatgtgttatgtatataaatgaagctgatcagatgttttagtttatttgtaatgaaattaagcccttaccacaagcaacaagagtgggagaagctctgttagagctttgtaatcttttgttttgggtccatttccatgtcgagatttgaaagaacactgccgagagctaaagcagacaaaatgaaactgggaagcagaacttctctgtagcccaattctgttccttgtttgaacccaaaaatgaaggagtagttgactttatatttcctccaaaagtacacatttgcagcatacatgatcatatgcatgacaataaacgcaaataatctgcaacacaaaacgtttcatcagtatatttgttgggaattgatagaattttagttaagcttgaaaaactaattcatgacataaaacttacatgtacaaaggaaacatgttttccatgtactgatttttccctggttcctccatgatattacgagcacggatgatcaaaataagggctagtattagagcagcagtacagccagcaaagaaacctgtagatattatccaataaatacaattagtatgcaagaaaagaaaattgttactgaaatgggtattcaataatcgaaataaacaacagtattgaagtctaaccagtcgaaaatgttgttctatgtgtttctctttttgcttttggccttaagatggacatgcctttagtacggtttgcattggagaaatgcttgatatatgtagcttcaaccctttccataagcttggtaacctgtatatataaatatatatatgagagagagggagagagcggcacaattagttagagtaaaattataacaattttctgataagattaacacaatactggagctgtgacttaatgcgtattgtactcacgtcatcagagctgcccaggtatgagttgtccaccattctcatgtaagctttagatgcatctcttgaagtaatctgcgaaagtgagaaaatccaaatatattagtaatatgccaatgtgaaagaaaaaaaatatggttcacgagtatatggatattagaaagcacatttttaatttttggtaaagaaaagtattaccttatcatacttcttcatgatctttgagaatgccaaggtattcaagaaactgagaaattggtagcataatggttagccagatagttagttaaaagaaaagacaataacataatccaagaaagacaaagcatcaaaactatctctatttacctaaagctctttagaagcctaagcttctggtaaaactcaacgaaagctttcttaagttgatcttcaactctcgcaagattttctctgttaaaagtcagctctgtctgcttaggaaccttaagaatttttttaatggtggaacgaggagtctcctgtgtgtgattcattgtcacacgatcaagaatttccaatggagctggtctagttctcctatcactccttggcaactgaactgcaacactttgggtcacagtttggctctcagtagtactttcgctcgtcttctcaatctcatctttatcatcatctccattagtttcttcagtttgctcctcatggttgtttgatcctccctcttcaattttgtccatgaaatcaactcgtcctgttacaagaaaaaaaataaataaataaacattcaattcataactaaaaaattatatatatcatgtcagataaatttggtaaacttactgctagctcgaatgttactgggagtggtggcggccaaaacagcagttgaagtagcaatatcagaagcgagacgagtcatctccacagatctgtcaaaccagcctgttggattctcaactttaattcggaaagcaatcaaagcatccatttgtttgttgagcattgaagcttccttcatcacttcgtccactttggacttataaaaccggtcgactttgttgaactcctcgtctagccttcggaaatataccagctcgtactctcctccttgctctgctgtcctgagaaaggtggtatggtaaccatgggagccatcttctctagttgagttaatcagaatagcttggctttcgatgtctgggctggtggtcggcgaatactggtgcgtgctgaattgtctgtgtatcagaccactaaaagatctgtaaagggtcggccttctcttaagccctgttggcactgctgccggaggcatatttttgtgtctgaaatcttggatatctttcaaaagggttttcagaaattcatagttcatgtaagcttcttgccattccggcaccatttggctcgaaaactcctttccgaacttcatttttctacctttttaacaccctgggtagattagtacaactttttgctagaaaaggaaatcctttgggactaatcttgtctggtgggtgcggaaatatttattggctgagtcgttttcttcaagagataaacatagagaagaataaacctaagacaatgttggttgtaataagatgaaagcaacagagagagatgatggtctggtttagatggaacctccctatatatacacgtgcatgtgtatgagagaagagagggtccgagtctgagagaggcaccttttctttattgttcgcaggcacaggtttcttcgtagaaaattcaaccaagttgggcattcaaagaaagaaaaaaataaagcgtttaaaggggaggggtttcaagatgaacaagccagagggcttctctttagtcaaacttttttacctgctacagtagcactagttgacattattcgtattacgaagaaaaagtgtggaaatttttggacttctgtcataattctttatattttgttatgtttctcttgcctctcgcacactacagttattatttcatttcaccatctgaattttattttatacatattcacacatactttttcagttttaactataattaatatccatacagtggactcgtgggtagcacttagccatttatatggggaatgacgaagctagttactaaattccaaaccataccaagctactccaaactttatttatgtatttttttaagctttttcttatcaacatgaggttgatgattgcatgtttcactgcgctaaataaaataaagattaataacaaggtttcgatattagtgaagactacttaattataataagttgcaagcaaaacgtgttaaatatctgcaataaaaaaaaataattacagagcagtggcagctgtagaaacgccaactttggttgctgctaacaatttactactactgcttaatggtaaaagtatctgtgcacacataaatcaaggtgaggcccaaccttaccgcttttaccactttttgatttgaggtttaattagatatatacgtgtcaccctcgctctcattcaatgcgaacggcttacggactaagtattattttcagaccaaccgcacctaattgtttttttaaaagaagaatagaaaaacagattgctcaacaaaaccaccacattttcaattcctttcttagctttatgcattaaatattaagtttaactaattattataaatatataaactgttaatcgtgttggacccattataccacaccctaacttttttctgaattaagaatgaaaccttgaccttatcataaaaaagcattgattttttttttataattatattaattattattattattattaaaggcgactacatagtctttcttttcttttttataaagaaactttcaaatttccatataaaaatacagtggctgatttcaaaaataagataataataataactagagtggcgactggtgacatgtatcctcggtcgtaggggcatatgcctcttcaaaatgtttatttttcttatatttaatatctatatagtacacatttttttttttaagtaaagtactaatacacctttttaacttatagttgtgcgtattttactctcttactatttatgaacaaagagcttttttcttcctaaattattatccttgtaaaatttatcaatgataaaaattccattgaactataataattgcaaaaagtcgttaagatatagttgtggctagaaatctcctcctttaccgcacttccatggccgacgacaatctcctaccactatctcaatcgatttctatggccgatcccataattatataaaaatgcgtgcatatatataaactagtaaacatc

SEQ ID NO: 185701 - DNA, 4630 bp, Cannabis indica
tttacataacctaaggagtctaaataggaaaataatccataaaagtgggtacatttaaaaaaaaatataaaaatagaggtaaaaattaaaacaagttaagtaaagtgggtatacaatgtaatttcctccgagctaggcccgcgcttagggcctactcattttagggccaaataaaaaattacattttaaaaatatacatattttttaataatttttaaaaatgtcatttatctttatagtaaaggtctaattttttttgtttacctatagcccatttcaaccagggccggccctgcaggcatccttaggatttcgtctcacaaataaaatttccatccctataatcacaaccaaactaaaagtggtattattcattatcttaaaaataagtgatagtaatgaagataatacatgtcgaaaaatctattacactacacaaaatccaagtccaacaagtgaccacaccaaccaaacctcaaatctcattgtcttatgttaaacccaaaccaaatatcaactcaagagggagagagtctgaggaacagagctcatgaggttcttaagataagaagaagaagaaagaagatgcaactccttcaacaaccatgtccacacctctctactactactttcgattttgttcacaactcactggaaaccttaacttttcgtggtttttccaaatacccagttcccaaaacctcatctttttcgattacaagctcagttttttctaggaaagttccaattttgagaagcacccacttgagtttttgctctagaaacgatgtttttgatggtttctcgagtacccagttgtctaataataagccagaagaagaggataaagctagagacagtggagattatagcttgcttgataaaccatctccattagttagagaagatgatagtgatgataatgagtctacttcagaagaaagtgttgtaaaagttgataaagatgaggccttggcgccttttttgaagtttttcacaacagatggagtggacaaaatgacagaaaatgaagatgaaatgggagtttctaaggaaagaaatgagttggattatgaggatgaggatgggctagaggaggaggaaaagaatgaagagaaaaaggttaatatttcttattatgagcctaaagctggtgactttgtggttggagttgttgtttctgggaatgagaataagcttgatgtgaatattggggcagattttttgggtacaatgttgactaaggaggtgatgcctttgtatgataaagagatggaatatttgttgtgtgatcctaattgtgatgctgaggagttttttgttagtgggaaaatgggaattgtgaaatatgatgaagctaatgaaagaccaacaccatggaaaccagttgttgaagttggtactattttgtttgctgaggttcttggaagaacacttagtggtcgcccattgatctcaactagaagactctttcgccggatggcttggcacagagtgaggcaggttctcttctctctttgttgtatgtttatttggattttgagcttagtgattttcaagttgtttaatttgaaatggcatcatggtttttgctttcattgttactcaaacatggtgttttgtgttctttttttactttgtgttttcattctttttttaatcttagacagataaaacaactgaatgaacctgtagaggttaaaatcacagagtggaatactggaggccttctaacaagaattgaggttagtgtgttgtgtctatatgtatttgcttattcatttcatttcttttgttgtctaattgattggtaccaaattttaatcttattttttcagggtttgagaggttttattcccaaagctgaattagtaaatagaataaacaactttggtgacttgaaagaaaaagtaagttgaatcttcaagattttttttcctttccttctttcaatcttgcttactctggtaatattactcttgaacctaatgcagtataaaattatgtccaattcactgatatatatatatatttatatatatatatatatatgtatattatcttattagagtgtgtacccactttacactacggccccatttagcattatctttgactaggctggttatcacttttgagatacatatgtcttgctattcagaataataaactcttgttatttcttggaattgttgtctaataaattatgagtataattgtgatttataacatgttgtctacactcacaaattgaagttctcctacttcctcttatacctttccaccttccatagttacatggtgtacactgtatagatagcacttgaaaggaccttcaaaaatcgtcaaattgagtttatgtttcacataggctatacttatacatgtttcttctttacaattgtgtatgtttgttaattgctttatgaatgctataggtgggacaacggcttcacgtgctcgtttctcgaataaatgaatccaacaatgatctgatactaagtgagaaggaagcttgggtcagttttatgcaacattttctttagcttgcaactttctttcatactatatgttcatttttactcccttgtttatgtttttcattatagagaggtgcatgttgttttgcagcgaatgttatatcttcgggagggaacccttttggaagggaccgttgagaaaattttcccatttggagctcaaataagtataggtcatactaacagaaggtaatgggcttgatgtgatattaatattgtacaatccagttggttgactcttccattttgaaaggagctatgcacattaaataatgaagctcgggtttaaacaataacaaagatctaatagaactagtgtctagagttctttttctcttccctaactttggattttgggaaaacgtatgtttgatgcttcagtatgtgtcttgagccaaatggaaaagcatgcaagtatgtgccttagtgttttgaaggctaataattcaaagggtctccatgtttcaccgatttttattcattgaagaatcctctcgcctagctttatctgaaattggattcattacgctaactattagtattgtagatttaacattattgtaatgttgttgacataatagtgatctcatgtttgcttctcatacttctcaggggcttgctgcatatttcaaacataagccagaaacaaatcacgacagtcagtgagttactcgccgttggtgaaaaggttaaagttatggtggtgaagtcaatgtttccagacaaaatatctctcaggtacattatcgagttcgcaagattaactttttatttatgaatacaactactgaattagttttttcacacacatgataattctcatacttgtttcttagtatccaagaaaagttctatcactttgattaaagcataaaccgaagtgtctgattttctttgccaatctgatctgatcttaattgggttgtatgatttattttgttcgttgcagtaccgctgagctcgagagtgaacctggcctctttataacaaacaaagaggtacatattatatagtttattttctcgtaaagattgaaacttttttcggtttgttccctctgtttttgatcattcacaaagctaaattctatatttcttgttccgaacagagggtgttttctgaggctgcaatgatggcaaagaagtacagagaaaaactacctccttatatagctgcaggtgaattcgaaccacttacaaatgacactttatttttcgaaaatgaagagaagatgtatgcaaattggaactggttcaaatttgaaagggattgagattgaattagcactcaaggttgacactttttcacattgtgaacataaagaagaagaaaaagaaaaatgggatagtcgtcttttagatcgaattatccaagcgtataaattagtttgttcacttgaaaattacaggcagaaaccatgagaatccaagaaaaccacagcctagaattttgattatcttatcttactgaaaaatgtgtagtgataattttgtttgttagctaatttagataggttggttttaaaaaagattttgttcgatgcttgtgttgcggtggaccgacgagttcttctggtgaatggaaaaccaaaatcatgtagcataattaatccttgaatttgaattagtaacatctgattacacattgttaaattttgtaacaaagttttgataattttgccctttcaatttgtaatatattgaacttgtcatacattagcttgcatatgattgctatttttctttggaattaaataataatttattttcattattaatttgttaattcccagaaaatttaaggtatgtgattttatgtgttttgaatttagcagtcaaagtttgagtatttttcagtaaagcttcttttaaaaaaaaaatgaaaaaagaaaattacttgtgatgtgagcaaataaaatagaaagaaaataattaaaaacaggaccagctttggtttgattccttttaactgaagtacttcattgtgagataattaaggagagctttacccaaaatcaatcatataggtaaaagtgtctttgaaaaataaaatacgttttgaaattgactttataacaaaaaaaaaaaaaa

SEQ ID NO: 185702 - DNA, 5516 bp, Cannabis indica
aaataatttcttaaataataaagaaaactactaacccgcgcatccgtatggggttgggcatagtaatgctcattattttatggtgcactttgtgtgtggatcagcagagcgaaacaacatgacttcaccacttcatctcctccaatatctcccgccaatatctacagcaacgggcacaaaccagaggctaagatcttcactactgccgcccaataacccctctgcctctcccagagactcttatccgtacatcaaagcttgttccggaaccacaaccagaagtgagaagaggaatggcccagatgactaccacgcaattctcaaagctctcaactctaaaggccgcttcccaaggaaatctcttggccaggtttccctcttttattatattttctctgtatgcttcccgacaaaacaactgtcatctgaatattgagtttgctttctgctctttggattggttgccgcgaaaacttaaacccacgtgaagattgaaatgactttgtagtgttttccgaatgatttaggaaaatttttgcgtcatatgtggctcaaaatcaccttttctctttggttttggaaatgggtttgattgaatgtgggttctaacccttcgaaattggttgagacattttgtcgagcattgtgtacacgttttctgtagtagactctggtatataatctttttctgttttactgagttttggccttttggttatgtttttgcagcactacatgttgaactcggaggtcaacgagcagctttccatggcagctgaggttaaagaaggtgatttggtattagagattggaccaggaacggggtctttgactaacgttttaatcaatgcaggtgcttatgtcctggcaattgagaaggttagtgggaaagttcataatctctatactatgaagttgttttcaaagtatgtgaatgacaaatcacacgattacctgtttctcagcttttctgaagttgttttcgttgttgtaacttgtaactggaattaaaatcccaaactgttttgttgtacataaaaattttcaagttatctggatcctggttgatattgcagactgattttatgcatggttaatgatttcaggatcctcacatggctgctcttgttagtgaaagatttgcaggcacaaaccgttttaaggtatacaatattttggtgataaatgagtgattattatatgttcattaattctacatttctttccagcattagtaaatttatagctttcattgaagagttgaaaatattttgttgcaaaatgaaataataaattgttctacagggaccaaatctttataattgaggatgttggatacatttgattttatgtattgcaagtccctttcattctgtattcttatcaaagcaatttcggtggttaatttgatcaggcattcttattatccttctctttgaaacataaaggttatatccgaggactttctcaaatgccacatccgatcgcatgtgctatcgattatggaaagtgcaaagtctctgaacataaattcaacatatgcaaaagtgagaacacctccatctattattacttcatctgtagtactcttcccttcttggaatgatactcctgaatttgttttgattattattatcaaattttggaaaagaagttaatgaagttgaggctaattttagcaagagcggaaaacaatatccaaaaattcagcaatctagtataattttcttttactgcattagttcataggaattagatttgtttttagtgacggccaatgagcggatatatttgatatttgcatatgttagacctcacttgagatgatatagttatatttatatagcttcaagattgaatctcactccagtaattttgccaatgacaatggcatcgtcattttggaatgccaagtccacacagtggtattctaaaaacttatttgtacatgtatagaatctaacaaggatgacttaacaaggaattctttgggatcatatatttcctcacataatccaatgaaaactaatagtaacaattactggttttcctcgtgacattccattgttcaggtagtctcaaatcttccatttaatataagtacagacgtagttaagcaacttcttccaatgggcacgtattctcagaagttgttctcttactccaggttttggaattttttttcctcttggtccattttggaatcatacattcttgttcaatctatattatggtctatttcttacaaaaatattcgttgctaaagtcacttcacttatgaattatgttattctttctgtctctgtatctgggataaacggcaggcaacatgatgttctatatgttaattttggattgttaatcagattaatcaacaaacagaaaccatatttgatgggctttaattatatgtggtagttggaagatcatgcattttccatagttaaagacatcacaagttgcttccataatttatagaaatgaattctgagtgcctgagtaaaaaatgcgctattttttggtcggcttggaagattaagctctatggtcccacaggatcataaaagcaagtatgaaatgaaaaatcctaatggactactgaacctgtatccttgcattaatatatctatctgcttaaaattaattcaggaggagactgctgtgcgtttagtagaatcgtcgttggggacacctgaataccgaccaatcaatatctctgtcaatttctattcaggtatccttctagatctgtgtactactttgttggccaactttgtcctgcttctaagttttataactttggttgtaattcagaaactgtaaaaggcagaaattcctatggttgacttgagcttttcatggccccatattgtataaataccttcacgtctcatagaaactactaacaggtggacatagacataacttagtagtgttatccttttcctaacaacaggtggaatacagaatacatggtaatgaaaatagttatcaacaggtggacatagacataacttagtagtgttatccttttcctaacaaagagaagatcccaagtttaaattccccttgtaagaaaaaacagttgatagatcccaagtttaaattcccctcgtaaaaaaaaacagttatcaatgggctctggatatttaagcttttctgttgtaaattcctatttcagatcctgaactcaattttaaggtgccaaggacaaacttcttccctcagcctaatgtaggtgatctatcatctcacgaatacatattaaatgctaattattgctatgaacaatttttttaatatgcttatggttgcattttatagtgtttttattggaaattccaccaaatattcccatagataagtggactagtcaccctacttccttaaaaatgagacatttattggacttttttctttctttacataatgctcatacatggtaaacagacatcatctacattggtcttttaaatgaatcgaggctgcactgatgctttttatggtggtgcaggttgatgctgctgttgtaacatttaggctgaagcgacctgaagactaccccccagttacctccgctaaaagctttttctccatggttatttactttctaacatgattaagtgtgctacattatagaatttcattatccatctatattcatattctagtctagttcttatcatagctgaactgcatttggtgtcgtatgcatgaatcatgatacgaggaaatagagcaccaaaatgtgtactttactagtagtgagtgaatgtttcagaactgttaatttttcatcaaattctgttgatttctatattgttttagtttgctttcatttgaataggtatctatcatgagagccactctgcattatctttgtaatgtcatgttaactgttaagatagtctctgtattatctttgtaatgtcatgttaagttagtctatgcattatcttgttgcaagctgtcactcaaaacaggtgtaaatagttacctttgttcatgcttcttcattaaatccaccaaatttctctttctgtttgttgatttagatcaattctgctttcaatgggaaacggaagatgttgcggaaatcacttcagcatatatgctcatcaactgagatcgagaatgctttagaaagcattggtcttccagctacggtatccaattataatattctcacacgtaaatcaactttatgttctcatcctcttaacttataccttaaaatttcaaacatttcatgttacagtcgagaccaggagagcttactgtggatgattttgtgaagcttcataatttgattatggagatataattctatctctggttcgttatacgaaagctaaactagagaaatgactatgcatacactcaactatggctaaaagatggatggaaaattagattgacaatccaatcctgaattttccagctgcagaagggatttggcactcggctgcattgcttggaatcaagaatttctgccccaaatcaagaggctcaattgttatgttgcatcacttatcttgtattcaaatttttggcaaacagaaatggagaaatgcaacttcttgtttgctgagacagacagacagtgtaaacatcatcaccatataagaaaataaaatgaaataaaaaatgcagttgatgtatctgtaaaattgtttcgactcagtacaagaaaataatattttatcattcaaaggttgaagtcaaaaactttcctaggaaagtaaaagagcaagtttctcattgtaacgtagtgtacatttgttcagctctgaatcacaatctttttttctttctacaaatctcttctccataaacaaaaaaatgaatatcagaaatgactataatttagccacaatatctcatccatgaaactgatagacaaggttcaaagctctcaacctcgtggcataaggatcaaaaccctcagtgaccccataagacccatcatcatttaaccttctctcctccgccatggccaccgccgaaggcgaaagcggccgcttggtacgcttattttttatgaagcagtccctcatcttctcctccacactgtccacgctgcctcggtaactatcctgttcgacatcgtcgtcttcgtcttcctcacccacttgcatcggctcattaccattgacgacggtgtctgcggcggcggtgaggggttgggggaattggggttttgagaggaaggtggaaaggtgggtatgagcttggcggagggaggagtatatttggagaaggtgggtggggttggcggtgacggggagctgtttggctgcgaggagagcttgctccatggaaagtatgaggtctggtaaagatggttgggcttcttcctccatgtttgagtccgattacgatttagattgatggtgattcgagttcggacattcaatacataaattaaatcaactttttctttttctttctttttttttcatcagaaaaaaatcaacttcaacgatttttttttttcacttttgattttttttttt

SEQ ID NO: 185703 - DNA, 2691 bp, Cannabis indica
gtcctgggttcgagtcctaggtagtgtttgcaaaatgatagttttcgttagatgatgcattattttagtcgatatcttataatcattaatttgagcattaaatatatagacttataattaataagatctttaagagatagatgacaatctattaatttggataaaagaacacattaccatagtataataaatgtatataagtatatttatttttggtttggtaagatatgaatgacattcatatttcatttgtgaagaagtattaatatactatatagtaaatatatgtacaaaactgaactatatataaaatataacttaatataaatatatatatattcttaatttatatggtttatgtaattaaaatagggtcgtattaggaaactccgaagagcaaatattaattaaaaggcaatgaatatgaatataattaagaatttggtgcagaaagataataaattccctggcatatatagctagccatatttccagtaataattactatatttgtgaattaaaacaagtggtgggatatatttatcaattttatattaattattgtacatgcaagtgtggtcctacgtaatataaaaaatggaggttaatataaaaataaattaacgataatagaatgaccataacggtcagttgtatgtccgacgaaataaaacgcagccttttagtggcagatgatcacagaaaaagaggtggatatattgcccacttttcaagattccttctcttaatttctatattcttcataattcagatcatccaagcctcacttctaccttgttttcattatcatctcaaacaaaacatcatgatgtggttcaccaaaatatgaattagtggatttatatatatatatatatattaaaataagcatagggatatattaaataaagtatttagactttgcggtcattacataaaaagttctccaataaggagtagatcggaatagatcgatacaattggtgggtgaatgcccattttgccacattatgggcagcatagttaccattcctactaatactcgaaaaattacaattaataaaagaaagagataacttagcacaaaaggagagacatagttctcaaggcccaatggacgccttcccattgatagcattgatagctagtctcgagtcactctccacaataacatacttagaccctaactccagcgccacagaaacagccaaacagcaagccgcagcttctccacaaagcaagccagataagccgatttacatgagaatcacccattactcttcaagatccaaacccacctatccttcccctgacacgaggggttgccaccttttaaaattgcagaaaatagtctcttggtcaaaaagactctttagtttacggacatcccaatcaccactagttaacaagagatcagccacactgttgttatcagttacaacatcaccaattggtttcagaatgaaacctttacaatgaggaatccagaggtccctccaaatgctagtatccctaccattcgccaccattttacaggtcatttttcttagaattgcattggtttttacaatatttttctaaaaccaggaatcagagtctttataactacagctgaggaagtcatttccttttagatacttcgccttcaggatcttgcaacataaagattgacaaccattcaagattttccacccccacttggccataaaggcaagattcatttccttggttttcctagtccccctaaggacttagggagacagagtttgtcccaagctcttagatgaagaccatgattccctttcttgaagccccaccaaaaatcccaaaccaagccatcgatcctattaacaaggcgattagagagttttgtggtttacatagcatagataggcatcgacagacccacagacttaataagggtagcttgacccgccttggataacgtttttgccttccagccctgcaatttagaagtgagattgtcaaggatgaaattaaagtcaacatctttttgtcttgatctaaagaggggcagtcccaagtatttaataacaccttcaggagcatcaatacccaaagcttcctaaattcatcttctcatcccatttagggtatttttgctaaaaaaatattgatgttttgagcttattaactttttggccagactaagcgcaaaacctctcaaggcgattctagtaacacttagcttcgtttaaattggcccgaccaaccagagaggtttgagtacaacacacccattagatgaaactaagcactgagtttgagtaaaacttacagagaggttgttgtcacacagttgaccgatgctgatgagatttgctttgagcccttttacatacaggaaatctgttaactgatctacttcatttagatttacatctcctttgccaacaatctgccctttgttgccatcaccatgtgtcacgactccctccttttcctctttgtaattaactagcaattttttatttccagtcatgtggcgagaacatccactgtcaaaataccactgcccttcaacaaaggcagacagagacagcttcgccaccaatccaacatttggacttggtttagactttattttccattctcgacgaggtttgcgcccttgagatttgtttggttgaggaaaaatatttggtcaattaatcattgctttcaagtagt

SEQ ID NO: 185704 - DNA, 4103 bp, Cannabis indica
gaaggacaggaaggagggatgttgctgtctcgattagtcgctggaatgattcgcggcgagatcagcgaagaagaggttgtcgataatgttgttctgctggtttttgcagctcatgatactacttcttttgccattaccatgacattcaagatgctttcacagcacccaaattgtcatgccctcttactccaaggtaaaaaaaaatataacatggtttcttcaaaaagaataatcatgagactttaacattttatgttttatgtttgttcttacagaacatcttgatctaacaatagacaaaagaccaggagagagtctaacattagatgacataaagaaaatgaagtatacatggcaagttgctagagaaagcatgagacttttccctccaatatttggttctttcagaaaagcaattgttgatattgaatatcaaggtttcacaatccctaaaggatggaaggtaaacaaacatcttgatcatttaggtgaagatagaaattcattaaattttcaagaaaaatcaatcccaccccaccttttttttctctttttctccaggtattgtggacagcatatggaacacattacaatgcagagtgttttcaagatccttcgagtttcaatccgagtcggtttgatgagccagtaccaccttatgtttttcttccatttggaggagggccaagagtttgtgcaggataccaactggctaagttgatcatcctcatctttgttcattttgtggtgaaacgttatgactggtctttactctatcctgatgagactatcaccatggaccctcttccattcccttctcatggaatgcccatcaaaatttcgcctaaggatttaaagaagtgataaaacacacagatagatgatatactaataaaatgttagatatataacaattctttaatttggtacctggtaccagcattcttttgtaatctgatatagtcctaaatattcaatgatttttttaacacatgtttgtaatgcttccatgttgatcttttcaagctaaataaattaataaactttaatgtcaactttcaagtttgatgttagtctaatgtcattgatttaggtgagttttgaagaagaaaaagaaacatttggaactttaacattttactatagctaaagctacaattggttttctttttctatctaaacttctcccaagattggaaccagattggattttggttaagagtttacatgagtcaaatggatagaatgagaataaaaaaatagataccttcatatcctgtcctttcctagaattaaagaataaacactaaacaatttcctctaatggctacaaaaaattggcctctagaaagcaatattatccaacaaaatcattcttaaacatttggtggatctattacacacagagtggtgtctggcaatagcctgtgactggttgtgttcaaacctttccttgaccaacatttcaccaaggatgtttctagtttcctcacctgtaataattaacagtcaaataagcaagactttcaaaatagagctttcactatctgaatatttattcaaataatcatatgtgatatgacaaaataatctttgaagatcttaatttgcaattacaccctgaattcacaaatatttgttattaattccatgtggttgaaaatacagtgtgatttcaagaataaacatatgaaattgttacaagttcaagaactatattacaaatctataatagacccaaacaattaatgccaaatcaataactttcctcttgtatttgacattagagagggaattcgaacatagtttatctttgcaagaaccgaagtgtactccgacaaagtaggctatgcctatgaccacattacaaatatcaaaagcatacacaaacttaacacacttatgtggcaagtgatcttaactaatcatttccatttaagatagatccctcccactttttaaaattggcttgccacataattgtgcgtcaagttcatgtataatttatgtgtgcacatatcatttcattactcttacaagtataatattgcatgcccgtttggtatatttattgaactaattacaaaaccaaagcaacaaatcaatgaaatttggtcatttatgaaaaatttagaaagaaaatgtaccaaaccgcaccagccaaaaaaccatgtaccacacaaaaggaaaataagctgattccaaataccattcactcatgcaccatcttcacataataatgcaaaattagctaacaaaataacttattcctaaaaacatgatgtagttacttaatttacacagattattctcacaccaaccatatctaaagattgaccagcataagctctttccctcattttcttctctagataaagtaaataccttttcacttttaaggcattcacccacaagagaaatcttcatttaggaagtttctttaacaatgatagcaagtaaagaataaacaacaattgttgaagctaggtgttaactaaagtcaagtcttttccaacaatgtccatcaactttgtttcttctaaataaaataaaacttagtctagaaaatcacaaactatcgaaattatcaacagaacaaggaagaccaatgagtgattccagataatacatattatcaaggaaaaagactaacggtgtgaacaggggatccaagagatggaatgaaacattattaagttactaactagaccaaccagagataaaaggagaacaaagttaagtaagcataaaagagaaccaacctgcctaacaatgaatggctcctctgtcagactcaaaggctctgttagaattgttaggaaaccattcatattgccataaacaatgtcagttaagggacgatcacccacctgccacaaacataagtatggtattagtccaatccaaaacaaaccaaatgaaacccagctaacgacaattcaatgagtcttattctgatctaccataataagttgggatgcttcacatccaaagtgtttctcaacttcttcagccgtgccagcaggtttcttcactcctagaagttaaacattaaaataaccacataaaaagctaagaaaagtcagcactttagggtccaggcctaatgtatcaatatagagtctaaaagctagaaaatctaatgaatgtaaaagcttgcagcagattaaagccttcaattgagaaaagaaatactcactatgccttataactttaattccaatagccttttcaagtgccttagcttttgaaccatcatggtcatactcatacaaccctaacaaaaaaataaaaaataaaaattataacttcatattgaagaaaaacagcagcatgaacatgaaaccttttaacaaatttagaaagaaaattaccagcagagttgctgaacactgcaatattgggtccgaagactgctttacactcatccaacgaagaagcaagaggagcccaaagattcaattgataaggggcagtgattgtattatctttatcaaacacaacgcccttgaaaccccttttacgaagttcaaaccaatcaatgtaccttatatcgggcacagaaacatgagggagagccaaatgccggtctttaagtaccactcttgccgaacaaacaatggcaccaaagttaaacctctgtcccaatgcccctttgaaatccacccaccacatgtttgtgataatgacctttgtgttcttgttttcgccgtcaccttgttcttcctcttcttcctgcttttgagcttctgggttttgtttattggttgagttagagtcagtggaagagaaaaattgcaaaagaattgaatggttgtgatatgggtcggatctgttgttgattttgtcttggtctttggtgctgcaactttgtgtttgaggaaggtcgatgagggcacagaggtttgtgaagtgggtttggttccttttgggaaaggattgaagtgagagatttgttcttggatttggatggtgaagacgataagggttgcagcaatttggcaatggagaagtagaaatcgactgcattttcctttttctttctttattttaagtcatttttctaaaatggtaaaagtatttttaattaattttggcaagtt

SEQ ID NO: 185705 - DNA, 10614 bp, Cannabis indica
attttacctatttttaattaaaagaaactttaattataaaaagtgataaaatattttataataatatataaaatataatcatataatactactataattgatattttataaaatatattaaaaaatttaaactaagataattgggtaatattaagttaattaatcacctatataaaaagagaaaaaaagtaataataattttaatacaagtaaaagtgaataattgaatgtgttatttataatgtacaacatgacatataacatactaactaatcaatgtgagagttttttttttaatatatactatggagcgtatcatcctaaaatttgaaaaaatatacaaaagtaaaaaaaaaatatatatatagaaagatgaaatcttagaatgccacatcatctctcttaattttaaaattatatagatatatagattacaagttacaaccccatcctccatagcatttctttatatccagatatcatgtatgtactcaaaactcaaaagctactgaacactttactcttttattatatatacacgtcttttgctttgattagttttgcttttgctatcaatcaatttaaattagtttcaactattcttaatttgttctttctctattctgtgctacatataggttgttactcgagttttcctaacttagcagtagaaacaacaacggtgaattttcctaactcagcattggcggacctcccatgggacacaatcgtctacatcctaagtttgctaccagttcaagatttgctctgctacaaatgcctgtccaagcgatggtgctcgctaatcgaaagtcgtgaattcatcaagaaccacctcaatcgctccatggaaaacaactctaacatcttcgtgatcattaatttcgaagcttcaatatgagtccgagttatgagacagttatttggaacccatccaccagaaagtataaaaaggtacctatgtctgaacttaataaggttgcttatagtctttgttgtcacattggtctccagggttttcggtacgatcatgtgaagggcgaacataaatttgtaaggatgatcgtacataactatgaggatttatcattacttaatgaaatttatgtgtatggcctaaacaccaacatttggaagagggttgttgattttccttactaggtggccattgtcgcgaagatattcttgtgggaagttttatccattagttggtgtaaacagaacttgacaacacgtaatcttctattattgctgcatttgatataaccattgaaacatacagccaaattctacttgccaacataaatgctaaggacaatgtccatctctcaatagtggaattgggtgggtgactttgtgatgttgcaaaattcaaaagacattatgagtggcttgttgaagcagagtatgttgagttgcagattatgatggaaccatcacatgtgactaggtctttcaaatatttaaaatctctcaagtatttcaagtgggccaatcaagttcttttggaccaggacaataaaaaagttaatactctagagaagaaggaggctaaaagtgtgaggatttaactaaaaaatttcaagagattgcatgggtgatcatagagcataaccttcttattgtcctggtctaaaagaacttattgaccctcttgaaatacttgagaggctttaaatatttgaaagatctagtaacatttgatggttccacggtaaagagcttagtcaacgactctttaacgatgtattccatcataatccaaaacgtaacatactctgcttcaacaagccacctataacatcttctagactttgcaacatcacaaagacacccacccaattgtgctattgaatgatggacattgcccttagcatttatgttggcaagtggaatttagctgaatgttttagtggttagatcaaatgcgacaataatagaagattcagtgctgtcaagttcagtttctaccaaccaatggatagaactgcctacaagaatgtctttcccacaatggccaaccaagtaagaaaaatcatcaaccctcatgagaatgttggtgtttaggctatatacacataaacctcatcacacaatgataaatccttatagttatgtatgatcatctttacaaatttatggtcatccttcttagggtcgtacccaaaatcctggagaccaaagtgacaacagagactactaggaagcttattaagttaagacatgagtaccattctatactttatggtggatgggttccaaataactgtctcataactcggattgaagcttcagaatcaatgatcacgaagaggttggagttgctttccatggagcgattaaggtggtttttgatgaaatcacgacttttgattatcgagcaccattgcttggaaacacacttgtagtggagaaaatcttgaacgggtatggcttaggatgtagacgattgtgtcccatgggaggtccgacaatgctaagttagggaaatttgccattgttgtttctgctgctgagttagggaaacttgagtgacaagctacgcatagaatagagaaagagtaaattaagaatagttaaaactaatttaaattgattgatagcaaaagacatatatatatatagatttgcatagggaatcctataagacacactactatttttatctcatgctagggaaagaaattaaaccaatcaaaagttaacgacaattaattgtacatgagtttattaattgatcttgttatattgataggattttaatataataatagcaattataggataaaataagttgatatattgattatagaatgtaatgagtacaatgttgctgggtatttgaaagacctagtgctctcccaagagctactcattaactaattcattctctcctccaaaccctttctaagactttcctatatatactatctatctccatacccttattgcaatgacccctataccctttttatttatcttaaggcctaacataaactattttgtataggtagattttaagaaattgacaaattaatggaaaataaacaataagatgggttgataagttggcacatttggtataggtgttttaacagcttgataggaaggaatggaggtaatgttatagctgtttctcttgagttattatattgttattatttttctctcatcaatgataaagttacaagtagcttgattgatttggcaataatctgcttcattaaaatctgttttttttttgaaggaacagctgagttcattaaactaggaaaagaaattaggagtcacaggggggattccttccccttaaacaacaccagcgttatggctagaacatctagcactcttagccagcaaatcagcaaaggttgtaaactttctagacaaatgataaaaatcacaacaaacaaaagaagctaataactctaagacctgagaagaagtatgccaacaattccaggcagggggacactcccttgcctcaaatgccacaactgcaaaagaagcatccgagataatagcaatattatcccaactttcaccttttgcccaattcagcaccaaaagcatagcctgaatttcagcatcaagagcaaagacagttatggtacagcaataattcgtagtccacattcctgaacttttgtggatcaaaaccacagcaagcccagcagaacaatccttccatgattcatctgtcatgaatatgaaatcgtaatccttccttggcttacctgaaaactccacacggtttaattcgaaactctccctttcgtctgaaacctctaccatttcacaaaacttgacattaatttgcgcgatcaagtctttagtcaaatcagtttttcctatgaatcgcatctggtttcgttggaaccaaacctcctccactagataaccaatatacaacaacatcttgtgactatcctctcccatgctactctgtaaaaggttcaacaaaaatacttttagattttcacctggaatacaatttactctgcagctatacaaacctgcaaaccacaggcacatcgtaaaaggacagtctctaaagagatggaggccatcttcaacttctgcttgacagaagaaacaatccttctctttgacaaaagacagttttgttctgagtggaagtgcatcattgcagcatcgccatagaacaacgacactcggggatgaatcttcgggtgccaaatgagtttccaaatcagattgtattctccaaatcgatgttgttgatccatctcataagctttttttcacagaaaaatggcccttctgtgagaatttccataccaaccgatttccttgagactgaggtaggcgaggtatgttgagaatacggctccccaactcccctccaaacacctcaattactttatctctattccacgagttgccctgtgagagatcaactacaattttaatctctggatagattaggttgaattgattcataagccttcgaaactccccataatcaagccaagggatccaaggttgagtccaaagatcgattgtcgacccattagcagctaccgtgtgggcaccttatttaataatgttcctaacttcaagaatttcctccattgaaacgaatcactttgttttttatcaacctcccagaagctctctattttacagtaccttttaagtaaacattgaacccacggtttaggctccttacaagccaagctccaagccaattttgcaagcaaagcacgattaaaatctttgaatctacgaaagcctaagcctctgacgctcttcggttggcaaagactgtcccaagatttcacagtaagaaatctatccttttccaagctcctcagccaccaaaattttctcataagaccatctaagctcctacaagtactaactgagattttgttggttgacatcgcatagattggcaaggcagaagcgactgattttattaatacagttctcccaacataggataaaagtttcattttccatccctccaaacggctcaacatcttggctttcaaggattcatattcttctcttcttctcctcttgaaaacaaacgggttccccaggtgtttttcctcaccatttgcttccttaacattcaattctttcaaaattgattgtcttcgattaccattcaagttattggagaaaagaacactgttttggatttactgcatctttgtcccgaccatttttcgtatattgagagacaattcaacaattccttagcttccacctcattggctctcataaaaaggatggtgtcatcggcaaacatcaagtgagcaatagacgaagcatcctaagagattttaattccatggatagagcccctactctcggctcgtaacaagagtttagatagaacctcttgacaaagtaaaaagagaaacagggacaagggatcaccttgtcgtaaccctctttgaggcacgaacttctttagagaactcccattaaggagagccgagtaggagacactgcagacacaggacattaataaattacagctcttctcgtcaaatccatttgccacgaggaatcgcctaagaaattcccattccattctgtcgtaagctttatgcatatctagtttaaccgccattaagccacccttccccttcttccttttaatcttgtgaacaatctcctgtgtcaaaattcaggattccgctatccatcttcccgaaataaaagccgactgtaaaggattaatcaaggtctccaaacaaggacgcaatctatttgataagagcttagcaatgatcttataaataaaattgcacaagcttatgggtctgaaaaagttccatcctttttggattctccactttcggtatgaggcaaataaagctataattaatcttggggttcagagtacctgattgaaagaattccacaatggccaaacaaactccatcccccatgatttcccaatttcttcgaaagaaacaacccgagaacccatcaggtccgggagctttaagtggatgaagactaaaaatagcacttttaatttcatccgaagacggaattgccacaagaagactatttgtgcttgcatctattttatttttgaacaaactatcaagatcttctgatatgatagggttctctgaacgaaataatgcctgaaaaatagtcattagctatccttgttaagtgcttatgatcctcccaattccttccgttcttgtgtaagagtgctgatattctattccttcttcttcaaatcactgtagaggcatggaaaaacgcagagtttctatcgcccaatttaagccacacctctcttgacttttgacaccacatgctttcttttcttttccacaaatctttcaacttcaaatgtatttcctcctcttccctaattaaagcatcattaatatcttgagattgtatccacctcagtctattttccaaaccttttatcaagttatcgcagtcaccgaagttttcctttctccacttctgtagtactagtcacagcttgtcaaggttacgaactatgtttcttgtttcatctcgagtgtcgtttttctaattttccaagattgtatctttgcaagacttcatttccaaacatgcttcaataaaccgaaatgtcttgtagccatagattttttccatatccaaatccagaatcatgggtccatgatcagagacagagattggtagattggtgacaccagcatttggatactcacaaatccaatcataggaagccacgactctatccagcctttctctaaccaaaccaccctgaaatctcttgttatgccaagtatatttaccaccacgaaagcccaaatccacagctcccgtattcaacataaaatttggaagccaaaacaaatcctgcaaggaaatacgagaaccaccacatttatccaaaggatcagcaatggcattaagatcaccaattaccagctacgaaacatcgcattggaaaactcgcctttccaaactattccagaacacaactttatctctttcataaggggtttcgtagactgcaaaaagatgccaataagatgaattctcagtattgaataccatcacttccaatatactttcattcatgaacagaacatgaaaccgagtaactgggtaccaaaataaacatatccccccgccaaaccatcagccaggacacaagcaaactctgagtaaccaattctccacgcaatatctctcatcttctccttattgaccttcatcttcatgagaaaaatacactctggtttgtattttctctccctagcaaaaagcgcttgggtttccaggccacgacaattccacgataggattctcattgtaacgatgggggcttgataagggccgcctcctcgcccacatgaaaatttggtacgaggcggctccacttcccagtttgaaaggtgtttccagagaatcaggggtgaatccaggaaattttggagctgtttgttcaaagttaacttccacattcttttcatattgaaccatcggcaccagtgtaagaccaacctttcttttcttgggctgagtacatttgtgaatgagattggatacatcctcaggttcatgaaaaataactagtcccggttcataagtgtcaacttggggagggcccattaattcttcattcaatcccatttgcttagcatctttgggccatgggaaataagtgggctcagggtgggaatgatgtattctggacttgcaaatatttgaatgtgggctttcaatggtttgttcgtatgtaggcccaatgtggggtaaaattgaagctataatcctagcatctttaggattaggcacaggtctagaggagtgctttttcaaaatatcatcctcacatatctattgaggcttcaccaaaatggaattctgaatagaacagggaggaattgagcaaacctgtttaccctttccattgtcgcgtgccttaccttgttttaaattgtatctctccatcatcctgtcaagtgaccttggaatggcttctctaccacttttagtaatttctgtctttgttgaccgttagtaggggtatgaaccttgaccactttccttaaaagctgtcctggagcaaccgcagactgatcagttgtggcgttgttctcaatggctggactcttaattctgtacaccggagttctccttccattcattagagacatcagacctctgattggtgcggaaccatcacgtcacttgttttcaactccctccgaatttcgaaaccacagaagttgatttatgggattgaaacaactaataaaagttgtctccgcctttatccatggcccgtatgttttcactggagcaccttctggagggtaagtcaggtccatcgccctcatacaccccttgaaaccgtgtccaaggtagccacagttataatagattttgggtaacttatagaaccggaattgtatccattcacgtttatccctggtaatatttagaaaaaaagcagaaggaattttatggtatgtgtccaactcaacctgaaacttcaagaagcctcgtctggagatggttctctgatcaaccatgtcgaaacttttgtagacccctgctttagccgcaatcgtgggagtgttgactatcttcaaaaaaggtgttggtaagcccgtagcctgcacccaaaataccgcttttctcatgttcactgtgttccaagccccatcctcaggccattcatgaatgataagcattttgccattgattatccaaggacagttgtcgatgatctccacacaatcctcttccaaatcaaagaaaatgccccaaagcccagggctcatagtcttgaaacaccatcctcctctcagcttccaaatcttccccagtatgtctttgcgacgatttcaggatacccctttaccataaaaaaactcgctaaaattgttgttcttgtaatctccgcattgatttcaaagtgtggttccagatcaatggtcatggaatccaaaaagttttgatgcagggtctccagctccccatcttttacttcgttgtcctgttgagtatcattaatttcggtttccgcatttgtaggaccattcgcattttgttctataacaacctcctgaatgctgtcattaggattgtttgccacgtcttgtgtgttttcaactactgtgtcatcaggaatattcgaactttcttccatcattaaggttctaaaagactcaccaaacttcaccaaccaaaataaaagacaataagtaataaaaggcagtgggagatgaatcaatgataactctctttaactagaaaaccagtaggtatcaatcacccaagttggaagaccaacactctcagcagagagaaaactcctccgacatgaaacacacacttaaaacttgaatgtgaaaatagtggtagtggtgaactggtgatgtatggcttaactcttgaagagacaaatacaacttggagaaaactagctatagataccttctcctacaaaggtttagagaaataaaatataagcttttgtctacataggattgagaaatacgagagagatagtgaggttgagagctactttggctttttgagtgagtaaaatctgttttattaaggatcattacttctaattgcatgttttctttctttaaagtgtgtttgtatgtatgtataacttatatttgtatcttacgataaaaacacattaatttaaaaatggcctgtttcacaatattgtttccaatatgagtattttaaaggactgaattagacaatttgcttctgccatagatgaaccaattacaatatgccaaatgctgcaaaattaggttcgaaggttgttcacttttttgcttgaaattcagaagaaaaaaagggttgtatgagaagatattagagagaagaaatattagaatattaatttattacattgagaaagatgtttttgattgatgatttgtggaagagtaatttctatctaaccccttttttttttcttgttgtcttcaattgtagaaacacattccttttaatgtatcattattagcatgaagccaatttcatagcaaggaattcgtgttctgtccttgaattcaaaaacaaaagtggccactttaaagttattcttcacaagatctatcgataatactttaaatttctgcatttattttggatagttaatcacaagaatttcaggaatataaaaataaatgcagaggtgcataatatgattagatgtatcatattaatgaaaaaagaaaaaaaaaatgtttacatcatttgatcaaatcgtattctgttccaaaactatgaatgaagtgcaattcacaatattaatatatgtagattaagcagcaatgctaccagaaactgaatgaagaaaattaatgaactaacaatactaagtaaaatctcaaaccatttacatgaagaagaagaaaaaaagtgtaactggagctataagccaaattaaatcaaaagtaaagtaaccccattttttcaaatgttagccacacctacagctagctattaacatatacaagtttctttatagggctacacttagattgcaccttatctggccaatgatacttggttaatctctatccctggccgacttgtacaactcaagccgctttgcgcattgca

SEQ ID NO: 185706 - DNA, 2047 bp, Cannabis indica
atagttttttatggtagccatacgccaaatagacaaagtggaggcagattatcgcatgagtgtagaacttaaagctcgtgctgaagctgcagatgtggcaaaaatctcaggtgcttttcaaatatatatatatatatatatatatatatttaagattggttgaatctttatctttagaccaagactgtaaacattcatttcttttatattattttttaattattaattattcagttggatagttgatttttcattactcatttttagtttatgattcctattactgaaaagttttttagatcattgatttcaaacttgcatcttcaaataaatagctttgttgtattttccattatttgaagtatagtcaaattttctgttattaatttctttatgtttttgtagttcttagcaactgtctctcatgagataaggacaccaatgaatggtgttttaggtaagcttaaagttcatctctataaaattgcttgtgaaaatgtctcaagatcaagtaaaatgatataacttcctctcccatccaggtatgctgcaaatgttgatggacactgaccttgatgcaacccaacaagactatgctcaaactgctcatgctagtgggaaagacctgatttcacttataaatgaggttcttgaccaggctaaaatagaatcgggcaggcttgaacttgaggatgttccttttgatttgcgctctgtacttgataatgttctgtcactcttctcaggaaaatctaatgaaaaagggattgaggtaaaaaggaaatttcagtttcccagttcaatttctgtttatatgatgggtgtctttattgtaccttaatacttacacatttgttgttttggtgggagaagttggctgtttatgtctcaaatcgagtgcctgaagttgtcattggtgatcctggacgctttcggcagataatcactaatctagttggaaattcaattaaggtcagtgataactcctctctatgcctacaagcacacacacacacacacatgtataaatatatatttatgtaaccatgtatataatttgaggcttaattactcgtgtatccattaatgcatctattctattttgcggcttttgtttttcattgctgttcttacaatttgagcactaaagaatggagcaatgatggtcaatagctaaaattattttgggttgacttaatataaaatcagtcagagagttagttatcatctcctccaaagggtggcaacatgtttctaaatgtcactgctgcattgtctgtgttgatatttttcatttattttcacgagctttgcacgaatctcgactgtttgaacattttctcagtatcctcgttcccatagttttggaatggacttgtttctttacttaataatattcaatatacaggtgactacatttctatgtctaaagtcactataaaaatgactacatttctatgtcataagtgactatttgaacgtagcattgttcaactttctcatgatggaatatagttattgttcacatgaagattactagtgatattgcatcaagttaagaataaaaatattctatacagatatatgatttgtgatcctaaaaaataatttcacaacaatttgcctatgatgtttgaagtttatttgttatcaatatgtggtcgttaatataatcactgcaatctttatttgaatgggatttaaagggtatggatttttgtagctccttgagtgtttacctgctaaacttattttggagagtttaactggatggttgttttaaaattgtatatttggctatcattttttttttattattttacaacagtttcaataattttgtgcaaataattcaaatggcttgcagttcatccctgacaacggacacatatttgtcacggtgcatctagcagatgaagttaaatgcccagctgactctatggacacagtgcttaaacagggtttagattcagttgaagataagccaagcaatacctacatacattgagtggttctcgagtggttcgatagatggaaaaagttggga

SEQ ID NO: 185707 - DNA, 2468 bp, Cannabis indica
ccgaagagtttaactcttctcaactttacaaactatcataccctaataaaaggggctgttgaggtatttataggctcagtcacccaactagattctaatacaaataattccctctccaacaactaatacaactcggccaattagaaataacacatgtgaaagctagtatctccccgaagagtttaactcttctcaattttacaaactatcaacacccgaataaatggggctgctggggtatttataggctcagtcacccaattagattctaatacaaataattccctcaccaataactaatacaactcggccaattagaaataacacataacacatgtaaaagctaggcttactataatcagacatttgtgcactccagtaggtaattgtaattggtggtctaataggtaatcaagagctaggcctctctttttcagttgttacaaattcttctaaaaacaatgtctaacattctccctgccttctcccatgttttattaaagttaacagaatagaaaagcaaacataaccatttaaacactctcagcttccccattggcacatacctaatcaaattctttcccaacttaatcaaggttttggctgtacttcattcatcattctttattttattttctcttttcgggataaaaagcaagcttttacccaatgtcaaaaatttgcatctgtggaaaaatttaactttgttttgagcactctaactcttatatttggtcaaattggtaaccagagcagctacttgatccaaatatgaactgggagtgtgtgtggatggtagtccaattggtataggagagatcaacatcgattgggaaagcttatttatctttttcatgtcccaaatattgattttatggttggcgtagcaagtctgtctatgcattcaccatgtaaatgcatatgaaattgctaccctattttaaaatacttcaaagagactgtagggaaaggagcactctttcagtaagttggaggagcaagaaatagttagtattagccaaaagcagtgttgaaggaaaggttagagcagtttctcaaggaatttgagagccggtatggctaacagtttactattttcacatatgttcctgcaaaaggtcttcaaatatttattatgtgagtactcaagcatgtctgtggaacagaaaggcagaaagctcagtattagacttagacgttagtccaatattagatatatatatatatatatatatatgtgcatttgatgataactaaccaacacttgtcctgttgaagagcatctaaacatctcttcactggttagatttatctagaaatgagctatatttgaattcctcaaagctcaaggttacatccctccaaaagtttaaaatgtcctaacactatattggtcattttataggcactaacctatacaattcttaaattcttaaacaaaagaaaaagagattattttgcttccattctccctaaaacattccaggttgtaaaacttgtttttatgagtcatactgtttctgtttctaaattacttttaagggaaacttgaggaatatatagacacacacacacacagactacaatgaacccaattgaaactttccaacactaaaaaaggaaaaaaagccaaatccccaaaaaaacataaatctcaaaatgaataaactaacctccgttccatcagggagaagtttagctaacacgggtatctcatactggtaagctttctcccactcaggattactggtaatatcccttatctgatcaaacatccaaaaacactcaatttcaagttaattagacaaaaggattataacccagaaaggatggataggaatggtacctgcaaatcgatgtcgttgagagaatctggaccagacaataagaaggcagcctgaagtttttctttgagaccgtcgcacaaacagcacccgggctttgagtaaaggacgagctttcgaggagggggaggagaagaagaagaggaagaggaatacgaaagagccgaaggagtagagacccacttagctctacatcttgtcatgagcatagaagaggtgggccttcccacagccaccgcaaatgcaatcgccatttcttcctagttccgactcccactccgctcaggtcctgagctctacttttcagtcagaaaatttatcaaaagcagctagtagtagtaggagtggtttctaacggtcgttttagagataactaccctaccaaccgaaaacaattctaaaccaatttgtgtgttaaataacaaacattttggtcagttataattggaaaatttacagcttaaatacttattttgtttaatttgttgctattaaatatcctaaaatttaaaaataatagcaaaagtacctaaatcttcaatttctattatttcctttagtacctattttaacgttataccacatgtcaatttccaattgatatattattattaaaaattatta

SEQ ID NO: 185708 - DNA, 6965 bp, Cannabis indica
ataaatttatattatcaaagagtaatgttatacccataagtaatatggtactgacatgtgtaatatcgctggaatatgaaccaactctaattatgcatcaataaatgcatccagacaactcgccccgagaaatacagttgatagaaatactcgaactcaatattttatagacaatagtgagacacaagtaataactaccgattgatgagaccagtgagataaatatagaaaatccatttgaggataaacatattatattatagaattgtttggaaaaagtagataatgagtttgcagttcattgacccatatccacgtgagtatgttagtgagtttgcagctcgccgacctacatacacatgattatgttaaaaaattctcgcttttgtaacgttgtaataagcttctcgtgtaaacctcactcaatattaatagaaaaacgcaatgaatactacaacatatacttatacgctggctcacgatgaagtatacaaaaaagtactattgaattgcgagaagtatgaagcgtagtcagcataaccgtctctagataaagacaaagagtggttatggtggttatcaataattatcccatgtgatgtaaatatgaaatgtggaaaatgtccacgtttcatgaacggttacaagtgataaaatcccaatagaataactgtcattctagactactataaatagggacagacctagggaacaagggacgaccatttttggagaaaagaaagagagatatatctattattcattctacaaaataatgtattgtattatgtatatataatttatcaaactttaaataagactcatgtactatgaaaaattaacttcaaaattacgtaaaaagcctcttgtcatttattgctacattattattaattattacttaattaactctaaagatcatttattacaaaaaaaagttcatttattagttaacaaaaatttgcgttaacagtttagtactttcatagagagccttgtaacaacatctcaaaagaacaccatccttgaaaacaaattaaaattgtccattcatggaagacaatattcctcgaaatgaaagaatcggctaggagagatgactcaacgtccaggaaaggagcatcagacttctcacaggatgaataccactgaaactccccattctggaagaaatggtggagagtttgaacaagcgggagatgaaatcctagagaggcgaagtgaggatgcatacgatgcaacaagatatgttccattagtggaactagaaaataggcaacttcaatagtgactggctgaatcaaattgaagaaatgtagaactggagcgtgatgcagcagctgcaagggctgcacaagacgatgcccctccaaaccaactcgatatgtctactagacgaccttgaggaagacctagaggctctagaatcaagagacatggggatacccctaggggaataaccctagaaatccctcgaacactcaggaggatcaacttaaggatgcgagggacatcccagtggatgataagattcctcagaatccaggaaaaactagaaatcaagaaactcaacctaatgatctaggaacttctcatgtatttacaaactgtgggaatgtgcaacctgagaatccagagtgatcttgcatgaatgtgaataccaggtaggcacaacctgggaatcaaggatcttttcagcacaatgcaagaggggtaggaaattggcctggatcaagttgaccaccgagacacccataaaggccaaatcacaatgacagagacaactcacacacctatctgagtaggggatgcatgtcaaatattttttgaagacaaaggcgagtgtgagaggaacctcaagaaacaaggtcgagtatagatcctagcaggttaaagtcaagaacccatgggtatagcagatccactagaacccatgcatgtgaaaggtgagcacaagatagggagggttcacgttgttattatcaaaacgatcaagagagcatcggtaactctcaaagtaatcaatctgaaagttatttaggaataaggtcagtaagcaattatgtcaagagaaacgagaggtgacgtattggattttgcgtttctcttaaagaagaggaaagcttaaagcaattttagcagagacttggctatcttggttttgatcccccctttttatgaaaatagaaggatatttataggttaaaaggcgggtatggacatgcccatgacccgcctaggatttcaacaaaaggcctactaatggagtaaaatatatgcaaagagagttgactatgaggcccttcggatggatttgtacttgtgcgttgaagaagctggacaatagaggaccaccattcgtatagaacacgtgttgctaaaatattttaccttgaaaagtaatatcttggaataagatgggtgcactaccatggcctgacacatgggacaagatctgatcctgtgtcagagaaagcataattgtcgttaggcgatccggtttcatcttcaaggtagacatttacattccttttgggcagtcagcgtctgtgataggccaagtacccttttaatttgagtatcacttgggcaagctttgaacctaggccacttcggatctctgagtggtagtaaggcttccatgtctcaatagttgaaataaggcagtataaatctccacatatctttcggttttgacctgttcccagatctgcaaagcttctccgtgacttaaatttaattaagggaatttaattactgagtccttgagattatattgttccttttatgccatgtgtctccatccaaaaatgcggataacaataaccaatctgaatttctagcataaatagatgcaaaaaatgtaatcagtctggttacaaacacctcaaggttaggttattattaagttttactttaataaaaattgagcttggggtactattttgtaccattttaaaaaatacaaagtttgatttgttatttaacaaaatagagtatctgatagttagctttacaaaaaataaggtctaaattggtatttactcaatattttattcatttctaatgtcacattcatgaacaagttaccattcatattcaaaaacgtatttcatgtaatttatagtaaatattgtagaaatgttataaattttctggtgaaacatatttgagagagatatttttctacacgagttaattatactaataagtaagtgttgtttcttaacaataaaatactttaatatgtattcattccattttaaataaggaaccattattatattcctattacaatacttaagcatacacaaaaatagatttatgattgactcatttaatatgttttaaggatagaaaataattaattatatattataaatactacttagtaactaatcattatatcattttaaacttgacccaacatttacaatcaccctctacattcattggtcgattatttttatactgattcaatctctagtcatacttataccattgacgttctaactatcagtcactagttccactaccaacaccgctacctccacctactccatcattaatagttccacttgtagcagctccacctttagcactcacaccacttgttgcacctactctgccgctcacggttccacttgcactagctcctcctccagtgctaccattgtcgtttgcaattactcttccactagctctatcactagcactaccacttgcacccactcctccactaacagatccgcctacattagctccttctctagctctagcattaccacctgtagctcctcctccaattatagctccaccacttgcccttgcactaccaccccctgaaactccacctccactaacaaccccagcagctccacctataccaccacctacatttgctccacctccaacactaacaccaccacttccatttattccacctccaatagctccaccaccacttgctccttctccaaccttaccatcaccacctgctcttactccaccattagctccttcattaattcctccactagaactaccacttgcacctactcctccgctaatagttccacctgcatttcctccccctccaactacagcaccgcctcctgcgcttactccacctccaactcctcctccaattatagctccaccacttgctcctgtactaccacccccatcaactctacctccgccaacagcccaagcaccaccacttatgccaccacctgcactagctccacctccaacaccaacaccaccacttacaactgctccaccactaatagttccacctccacttgctcctcctccaactctaccaccaccacctgagcttactccaccactagctcctccactaattcctccaccaacaccaccacttgcacctgctcctccactaacaccaccacttgcacctgcacctactccaccaacaatagttccacctccacttgatcctcctccaacttgaccacctccacctatgtttactccgccactagctcctctgctaattcctccaccaacactgccagttccacctgctcctccactaacaccaccacttgaacctgctccaccaccaatagttctgcctccacttgctcctcccccaactctactgccaccacctgtgctgactccaccactagctcccccgctaatacctccaccaacattgccacttgcacttggtcctccactaacagttccccctgtattagctcctcctccagctctagcatcgccacctgtgcttactccacttgcagctcctcttccaattatagttccaccacttgcacttgcactaccactcccagtaactccacctccaccaacaaccccagcaccactacttaccccaccacctgcacttgctccaccaccaacattcccgcttgcactagctcctccaccactagaccctacattaccacttccaacaaccctaacaccactacttacaccaccgcctgaatttcctgcccctccaacactaacaccagcacttgcacctgctccgccagcagtggtgccacctgcgctttcccctcctccagttctaccaccattgcctgcacttactccaccactacttccactgctaacaccaccacttgcacctacagcgccaccaatagttccaccagcactagctcctccttctactctagcaccaccacctgtgtttactccacctccaattgtagctccaccaccagctctcgcacttccactttcaccaacaaccacagaaccaccacctacacttgctccacctccagcatcgatgccaccacccaaacctactccaccaccaatattcccacctgcactggctcctcctccgactctactaccagtgcctgaacttactccaccactagctccaccaccaacaccacctcttgcacctaacccaccaccgaaatttcctctagtgctacctccagcaccactacccacattaccacctatacctagtccacctccaacactaacaccaccacttgcaccaactccacctccccaacctctacttgtattaccactgccaaaacaattatttaaatcttttctatgaccttctccaagtcctatgaagatcatcatcatcatcaaaacaaacattttagcatttcccatactcattctcatgcttaagcaatgaacaaataaagaccaccacaaaataacatatatatatatatatattgtaaggattgatataaagtaatataacaggacaacttacaatacactcatgtagtctacgttgagttgcacaactctatttataagtgaagtttaggaagagcacttacatttaatattgtatcatcactactttgtggttcttggatctacatgtggctcatccttgtatacatggccggtgcaatctgtaatagcactagtaatctcacaagcaaagctagtgcagctcctgccgtcgagagtgttactttcatgtcacagctacgtgtcaatgagaatcacaagaagtcaaaagggctcatgtgatgttactagaatgttaatacacttatatctactaatatagggttcattattgataaagtacaacgtgccttgataatactgattttggagatgtagtgccacactgctaaatcccaatatggtattctagtagctttatcatcacctttttaatgttatttaaatttatttaaggagtccggatcacctatgaaagaatcctatccattttgatgtccatccaatggaaaaatgccacaccaactaataattgtttatatcaatcttttttctttatcagcacttaataattgtttaattttttttatcaataacaatataattgtttactttttttctgataaccatataattgcttgctttttttttcagataaaacatatatttgtttactttactttattagacaattactttttttaatttattataatgtatatcgttacatattgaattaaatactaaactaatagtttatatataattattattataataatttagtttattactaaataatttagtttcatatacaattattaaattttaaaaaaattaaaagaaattgatactaaatataaaataattgatttaaaaagaaaatatcagaaaaattaataaataattgtgagaagaaaaatatatggttaatgacgaaaaagttaaagtgcccaatagctaaataccacctgacaaatattaataactatataataatcttacttaaatattcaaattgttattgtatgaaaaaatttcaaaattagttaatatattattttctagcttaaattaattttaaaattaagttcactttttttattataagaatattatttaaatattatttttttttttatcaagaagaagagacttcattaatcaagaacaaaccattcacgtacaaacaaaggcacagccaaagc

SEQ ID NO: 185709 - DNA, 4473 bp, Cannabis indica
aaaaaaaaaaagatgagattgaatattagcaacagaaaataaaataacaggctacagatcctgctagtaatacaggaagataaagcaatgcagcttatagggtccaagatttatagttgcgaggtgaagcaaagtggtgcatgtttgagaagacatacatatagtaacctcaatcagtacatagaacaactatttagatcagcattgacttctgtatagcaactttaacttgtataaaatacatggctcaatcgagtatttatcagcgccaaaaaataccttatatattacacaagagtagattcccaataaaaagcaaataaaaaaagtctcatacctcgtcatctccgcgttcaagcgatccgtggccctgaatgcataaagattttccagttataaagagataatcggaacacagttgaaatagcatttaggaacactatcaatgttatgaattcaagctgtagcaatagatatatacaagaaaaattatcaatagatcttataacaatcagactcacaagacaagaattagataatcagattgcattctatacaaattttactgtgaaaattttcatcatatcatattttttattatgcacctcatccatatcattgctatacatgccgtagcggaaagcctgactcaagttgtttgctagagcagcaacatcataatctctatcttgataatcatcatcgtcactgtcccttgtccgatcctgtaatgcggtcggtcgcctgttatagggggaagagagaggtgttacataaatacatgcaaaaaagcaataattttaacccagattaaatatatttgtggccatggtaggaaatttttgaaaagaagcacttgaaacaacaaaactatagatacatacttgaagaaacaattttaagcaaaagaacatacccacaagcccactgataaacattctccagagcattacgctttgctaggacatttgtatgatcagaccattcactgtttgcctataagaagataagtaaatatagaacaatattaatgaaaatagtatagaatactctaatttctggaattagcttcttttaatacacgcattttacatgcagaggtaaaagatatagaagtaacttaataaggaaaaaactgctcgcaacctaaaacttgataaaacagtgaacaaaattttcagctaaatgaattatgcctgcaaacacttctaagaaaataaagaaaagaaaacctgcagaagagcctgaacgtcactatttgtattcccaagttgattaattttgttggataaacgagtgatatgtccaatattccctatcctgggtagcgatctgccctcagcagggactgttggctgcacaacaagaatgaacatgttacatcacacatctaacatctgcactaaaaggagaaactataacaaaatgcaacacaagctcacacagaatacacaaatcctgataaatttaatgtataatcaccaattatgaagaagtggaccaccttgtttgaatcagctgtcaatgtggtattcttttcagcttcaagaattttcccaacaagattacagtcacggagaatatgttcaacaagtggagcattcttgctctccaagcatgaatttataatgttctctacgtggtgatgcagaaagttattataagggtacctaaagaatcaacaaaccaagaaataagagaataaacaatccatcacaaaacatgtgttacagccttctctttttctttttttttttcagcttggaaaagatcttaaagacttactcaaagaacaagtctgaaatcctttgtagagctccaagacggatcaattccttctcagcagcttcactaccaactgccagtaacactgaaataaactctacaatctgaaaaatttcccaattcagcacaatccagcacagagttcagacaccatgttagctcataagcttacattgatgatattattacacaattcaagcagacaaacaaaaaaaaaacaaaaacatttacgtaagaaacataaaaagtccctacaaggggcaaatagaaacaaaccaaaaaaagaaggcaaaaactgatctagaccagataatatggcccatgaatatacctttaaacgatgctttcctagcgggggctgtaactttccatatgtagttaacaagatgttgtcagaagatgaaacatctaaaagcttgagcaaatcacctggcgcgacaaaaagagataaatagtcaagccataattttaaaactagcaaaaaagcttcattagctgatcatgtttgaggataagaaacaagagcacacattgatcaagcataagagacataaagattaaagggaaaccaatgtgacacgtataaagaacttggaatataccacaagcttgactctttgaacacccctcttaggtaataaaattatataatatagctcacataaaatgcaatactaaggcaatccattaagcaagcttggatgcaatgccttacttgaattaccgtttgtttgaatgcttgaggcagtgccaatggacaaaacaagttttgagaacaaaatagtttatacaaacctctaattgtattaaaacacagctaccaatttacaccgagacatggaaacatgagctaaaatagatcggcaatgaaagaaacaaattttcacctaagctctctagcatgccctcaactgtctccggattagcagttacagtggacccaagagtcatttgacggccaaacatatgatatgctcccatatttaacctcttagggtctaacaaagttatgcatattgtcagcgagttatttagaacagattttggacgtgattcctccaaggcatgacgaaacaatcttccaacaaaactggcaatagaaaaattaaattaattctaatatgaaagctagagcataacactataacagtataaaacatgatgtataaatactaccttgggcttgaaattttggccgaaagtccagcaggtgcaaaacgcgtaattgcacaaagtgtttcggctgcgttagcatgaacttcaggagaatcctgtaaaattcattttaaaaagattcatcatgtaatgttgagcattggaagaccttatcactctctaggtgttatatttacattgtcattttcttcacagacttcaacataaaaccaagcatcataagagagaactggatcttctatttatctaatatagttaaatataaaatgatatagctcaactgacatgagaatcagctatgaagcacaactacagaaagaagaaaaactgagaagagctgaatgacgaaaaatatgcaagctcactaaacatagccctcgtgtacacttcaaagtacttactgaagagctgaacttgtccacaatcatctccagcacatttgtatcttgtatccactgcactgcgtcagtataatttgcgtacatatgttcatcagccccgatcaaccttattaagacctattcaacaagaaatattatttttcattataacaaatgtgtattctagcacaccaagtgcatggggtcaggaaaacaataattttccttcaatagagagtagtggcaataagaagtcccaaaggttctctacagttgggtaaattgaaaacagaggacaaaaaatgaagttatacctccataatggatgtgattccaatcaggtcaacaagcttctgcataatttcccgatgagcctggacaatgacatgagttcaaaccaaaaataagtcaaagtgacatcaagaaaacctcccgggtacctatattgcaattgctataatttcttggttccaaaatcacaagggttaggtgtgaagcctagtttttttttaaaaaaaaaaagctcaatgtgaaatataatgacaaatagccgacatcttctatttcatatttacaaattaaaacacacagctggtacagacatagatttaatttaaacatctcagttctcaccctgcatgcagaaattaccaggggatttttcagttcagtcgtaacaaactttttttcttttaacatttgatggtagtattgatttcactaggatgtaggaaaagaagggtctgaaggccaaaacttccttaattggttccaataaattttatattcaaaagaagagaaaaaatcattaacttattctctaattagttacagttcccacaacattgattgcatgtccacaagcacgtatcattgtacagcatatattttaaaagaaaaatcaatttgtattaatgagaaactaatacaagaaaggtgtgagtgaatcacaccaaaaagcataaagatactgattttggtgagcatattctccaactcattttggtgcgattcactcaaaaaacatcactgggacaagaaaaaataagaaaagaggaaaagaaagatatttgtacaaatttacatgaaatgaaaagacaagaatcaattgactcaaaaaaaaaaaaagaaa

SEQ ID NO: 185710 - DNA, 2043 bp, Cannabis indica
acttacttcaaaagatgcttaaaatcttgtttccccaagacaccaagatcatcacaaagaattttaacctaccaatatttcatacacttaattaagagtcttatgttgagaccccacaagagtaaacttcttaattagaaaaaccaaatgatatatgtatatatagttagctacttcttgtgttgttacagcatgatgattgatgagcaaggatgttggatcatgaaatgatatggaagtaatagaaccaaggatatcaagaagagtttcaggccatataaattctgcagctgttgacaccttccttaaagttgtgtctacatcttcatacctatattaagacctcatttgtcataacttttgcttatacatatactatttactaagtcttaaattattaatacaaaacagagaagaaatttacccatgacaatgtcgtttttttgccactcgtccaagatcatgcaacacctacatcaagcaatcatattagcatatgaatctatacataataatagtagacttgataagagatgaccttcttcttttggggttctatggctccttgaaatagatgcctcacgtcaagtatgcgaggattaatctttgcaggagccttgtagttgaaagccagaacaaatatctcggcagacacagaacgactagaatttggtttgtgcactacaactctctcaaataactgtataagagttttcaaattaagacaagtgaatccatccatccaaccaataataataaacatgtttttttgtgtttacttttgaaagacaatacttgacagagttgtaatcttgagaacgaaaaatctgacaaatgaaaatacattatattttcttcataatcttcccaaaaaattatttatgatactaaattatacagctttttgtggtaatgagaagtgaataccttagtaacaaaagtacccttaggagcaagcaaatgagtggacaacttaactgcatcaatgaccaaagcattctgaacagtggcttccatagcccaagcaccgcccatattgggggcaccatcatgaagaaccaaatcaaagacaaagcactcatacttcctcatcacccttttgatctccgacttgcattggggtttagtgatgtcttgctgaataaaaatggcgccagggattggttcaacccaatgcaaatccacacacacaaccaggcttccacgtggcaccctccgagtggctatttgagtccaaccacttcgagaagcacaaagatcgagatcagccccagtctagcgaaacaatccatacttgtcatcaagttctattatcttccacaccgaccaatacttcacaaagtttttaacgtcaattaagagagataagatattaagaatttgaacaattgataacaaaagaaagaaaaaaaaaaagtgaaaaattaaattagccaactttaatccaaggcaacattagcagacaaatggagcgaatccaaactggggattttaagcaacacaagcttataggaacccatctttaaacccaaaactcatttggattcaaacaaaatcccaaaatataaactgtgatagtgaaaaatacctctcaaactgagaaaaaaaaaagaaaaccaccaacatgattacgattagattaggccaaaaaccatcaatgtttgattacacaatgattatacaaatcgtaacctcaaagggcataaataacagaaaatgaaagaagattcacagggatattgaactaagagaaatgaaaggaaataaagaaagggagtaaagcaaaagttagttgtgaacatttttggtgaaaggaaaaatagtaataaactcagcgatgtaaccaaaatttatgaagtgtaagaacaatttaatactcaaatgttaaaacagtaaaatctttagctaaaaacgatcatttaaaatatttaagaacaaaaatttatgaaacacccaaatcacaggataaaaaaaaaattaataatttccaaatatttgagtgcagttattgacacagcactgattgattacaatcaacagccc

SEQ ID NO: 185711 - DNA, 2944 bp, Cannabis indica
tatgggaactcacctcatagaaatcaaatcaagaaaaccattacaagactgttcgagattccacttggccaaaacatgagtctagtggagtgattacaagctctaggcatccaaataacagaaacttgcaactcagcaagtaatttcaaaacatgacagaaagaaaaggagagatcccaacaaagagcttggagcttctaaaatagccaaaaccagagtttgacagtccgaaaccaaatcgacatcctgcagacccaacctttgaatcactcccagacccttttggagtttggtgcaccaatttgcaatcttcatttttctttttttttgaaaggatttgcaaccttcattagaacattttgtgaactattgttctcttgtgattatatattattcgatagttttcaaatattttgttgcagatattattattacttagttatacaaaatagtaaacgataattcgaactttattttcatagaattttccacatataatcttaaataactttaaattataaaaaaaaaaaacaaaactaaaaaacttatcaaatgcctaatcacaaggagtatgccagttttgtaactaatttaccgtatattacatatgcttttttcagtccaccatgctgaacaaccaaatgcattaattccaagctgaaaacagttgagtttaatcgccaaacagcaaaacacaatgatgctttttctttttgtttgtttcttttgttgaaatcgtctacatagctttaaaggatattcaaggaagatggaatttttttagtgttttttcaaactccagacttagttaagcaaaaaaaaaagaaggggggaggcacactttcatataaatacaaactacaggtaagtattgctaggtcaaagatgcctctgctattcattcacatgcaatcttagtgtcaaagctgctgaggcatatggcaaacgcctgaaaagctgagatgggatactgataatccatggtaaaaacatcctttccaacttttccgaactggagaatgacattctcatgctcctgcccggctgctccattctctggagaagccacaagctgaaaattcttcaccgaggcgactgtcacccttccattgaaattcagacaccagcattgcagttgttcatgccacctaggagctttgttcctcagcacaagcaatccttcactttggccagatggaggttctggttggaaactctcaatgcgggttgattttgatctgaagaaagggagggagggaaacatatccacactgctatgcacaaattcagtcggtgttggggccgcacctcctggctcaatagagcgagcaggaatggcatccattacacactgcatcctcctcggtcccctggcattgcaaaatgagtgaagtgttatatgtatgtgtgaattattcttgtttcttgccaaaggcacctaataaggaagtttcataaaaaaaattcgtacctagagcccaacacattcaactcataagaaatatgtgccacgggatagttgccagcaggaactcttggggaaacttgcttcatatttacaagcctggtagagcgagatttagtaactttggctccagaacttggcggttgggcatcatagattgtaaatttggtccctagaaagtttgatctgcaatggcagaaaaatgaaatgagttctggcctagagtgataaaaaaactgaggttgtaatgcattaactatggcgtaaatataccttaacttcccaacataagtactacttcctttagatacgtcttcagaatttagagagatgatgtaatccgtgcaagtaggacgtctacatttgcgcgctgcgagaagaaatttgccgtcgtctgtggaagctgaaatttttcaggtgaaaccataacagttcagataggaacatatagtaaaggaaaccaaaaaaaatgatgttcttcaagttcaataaacccccacatcaagaaaccacagtaaaccaaaatgtgttaaaccgatacatacataatgagagttagttaccttgatttaagccgaggtaaagatagtaagtttggttgctccgattgcgctttataaagcattgaaggacaaaatcccttggaccaggctgccataggaaaccaatacatttgaattagccacacagagagaaatgtcaacaaattggagaattgcaagtctgaaacttcaaagtgaacaagtttacaaacatggaactcaaacaaaacatctaattttatcactacaaaaaccaggaccagcacattttattattgcaaatggtccttaaaacaattcaaattttcacaaagaagaagccagattagctaacagcatttcccgaaaccttaattttagatattgccaggactgcctgagttttctctttaaataaatccccccaaaaaacacacatataaactgtcttagatcttccgcgaggatagaaaataagctatgattgtatgcaaataacagttacgaaattatcaatataaaactttgaaggaaatgtagagccatcataaactacagacctgcttcaaggagatgggaaatgtcaacttgccagaaaattctggtgatttcactatttctttgactatttccctccaattccggcaaacaccagcacaagaaaccacatgtttacgaggaggccatgtgtcttcagatgcttcaatcctcatcagcacatccctcaaaagctcaggcggcatattagcccagcaactctgcttcatagcatcaaccttgaccaagttatcttgaactaccctttgtgatcttgacctcccaaacttaacatcaaaccctctccttgagatactcccaagctcacctttcataccttgaagcacacttttgaaagacattggtgtttccttcccttcactcctcaactttttttcaaaatacaacaacgaatccgtcc

SEQ ID NO: 185712 - DNA, 1872 bp, Cannabis indica
tttgtctcttattgtaactctagttttttaatcttttgtgcaccgtgggtgaagctacaccatggcccccctacaaatcttttgcttaggaaaattaactttttatttttaatttatttacttaaaaaaaatatacatttttaataaacattaaattgaggtcacctgttccatttaagcaaccttaatttttgaattcttaaataatgggcctatcaaaaaaaaaatatatcttgttatcgtaggttgtatccattaatctatttaagtcctcttcactttaactgaatagtcacgtacttacacaatcttataatcatcggacttcacttttccaaacaatattagattgcacatgcagcttagccggtcgtacggatcataggactctaagtgccacaacctagttataggcatttatatgagatgtgagcttgattcttggattttgacacacttctcccttttatttgagaactatatagtattcacataattttagtatatatttatatatactccagctttgaacacttatgtcccaacataaaataaaaagtagcctagattaataatttgagttgataggattccttcaactattatgattgtgtatagctctacaaacatatatatatatatatgtgttatttgtagtacgaatatatggagtttgagcattaatataattgagacaaataaattaacaagatgtgtatggtgaagcagcatggaggagatcctggaacgttacgaaagctactctactaatgcacaaaagcacctgcaagctgctcctactactctctctgaatcacaggttgatatgtatttatataaatatgtatacataagataagagaaatgttaaaggacatcagtggtgcttaatactcttctatgtgttaatattgctattggtttaactaagtatcggatttcatatagtttaatataataacttttaaggagcattggtagccaatcacaacgcgacttgtcgaaaagatagtagacaccactagctgtttaataacaatgctcgtgtatatagtgcaacttggtattatagttatgaataataaatgaaaataattaatggtgtgcaggatagtagtaagtggacgtttgaattcccaaagctgatgagcagagttgaaattttgcaaaagaacctaaggtacacgtaaatactgcctatgttgtcttcatataaacaactatatatatatatatatttgagaaaatacacatgtatatatatatatatatgcatgttttacacatgagccaactaactatttaaacactgccaccagtaccatgttatcattaatttttcagacactaattaaaaccattcaaaatattaatacataaagattctataaaaatgtttctatgagaataaaatgtgtatgtagaatccaatattattttgaatcaatcaccacatcaagtaatgttgaacaccatataatacgactagtatactctattatattatgcaccgatcgagctgagaatggagagtttatacttttttgtcaaattattattttttatttgttcatgaaaatttgattgagaaagaagcctatatataaatgagaaagatatatatttatatccatatataatgatagatctctgcaggtaattgatatatgtatattattatgtttaattcatgtatgtaggaactgtatgggagaagatctagctcttttgagcatgagagaacttcaaaatatagaacaacaaatcgatgtaggtctcaagcgcgtacgaacaagaaaggtacgtgaaaccatattgacttaattattataagtacttgttacatttcatgtttgtgctatatatatatat

SEQ ID NO: 185713 - DNA, 9691 bp, Cannabis indica
tcgttgtatttatgtatgtatgtatgtatatgattggttttgggctctgatttgtagtcatttactctatgttttcttctaccgtagtagttgggtatgcttactgatttctctactattttgcaggatactgccctcagttctgttgaaggacgggttgcgatggaattttttgatctatcagagggtagtcaaagccaaaaagtatagtctttctgtagtaatagacatagtagtatatacaacaagaagctttaaagctgttaacgttttgctttttattaaatgatttttttttttgcagttttattaggaataagtgctgtttatccatttgactgtttttctatttgcttgatcctcaatttataaatgagggattgatgtgttattttggagaatacccctgtaaatttggattaaatgatttgttttacaattttgtttctcacttttttcccttgcctatcatgcaaactgaaatatccacgtaatgatggtagaatgctctatgatgtcaatagtcagttaattaggatttgcaggctttcttaaggaagcttctatataaaaatataataacttttatgtggtactagcagaccactttttccttttatcagtgttaatggtgtgatttttttctttttcttacaggtatgcattcaagtgccacagaaagtcagaggctggaagggacattgtctatcctgtaaatgccattgcattccaccctgtgtgagttcttattatccttgtgtattgagatgtttaattttacaactgctgggtagaaaagtaagacgccacaaaccagaacttctgataacggggttgttaggacaatcagcagtattacataactgacattagcgcatcaaagatgcttgctgagataacttattaagcctatgggaacgttaaacttgcttgccaataaacttttctcagctgggaaaatgcaatgcaagttcataactgacattagtgcatcaaaaatgcttgctcatataacttattaagccaatggggacgttaaacttgcttgctgattaacttttctgagctaagaaaatgcaatgcaagtttatataggttatgtattgatatttgacggaggtccatatatatgggacaaagacaggctagtctaccaaattcatttgataggcagcggcttaaatggattggtctgttggttgttccatgttagcctttttgtgtttgcccatgaaattcttatcgctcacttatatgttccaacttctcatcccttcaaattttctatctcttgttctaaaaatttcttttaaaaaatagaaattttatttatatttaccttgtatcaatcttgttttgtgcaacatatcatatgcaatggctggcagttattactttagtgtcagaccaggatccaaaaacttttgaagtgtggatggatttgagctgtttagattgacaacccatgcagtttgataatacctttaaactgtgtgcgtctgatcaaattggccaaaccagatcacaaacacactttttgcatcttgctgaatgttttttctatcagtatttgtatgttactttagtgtatattttaaactcgactttcaacattcgaagtagaaaatgatttctgttagccttggaaaaatttccttgaactcaatcatttctatttctttgcatgcatctattatttaaatctttctctaaattcaatatctagatatggtacatttgcgactggtggttgtgacggttttgtgaatgtgtgggatggcaacaataagaagagactttatcaggtaaaatttcaacaaggaccacttgtttcatttcctttagatagaaatattatcaagtgtggaaatttacttttgttttattttgcctcccttagtactcaaagtatccgacaagtattgcagcactgtctttcagcagagatggccgtcttcttgctgtggcttctagttacacattcgaagagggagataaaccgtaagaacaaatcttcacttctcacgcaatctcctaactcaacaaatatttgacataattttgttcattttgcagacacgaaccagattccatatttgtccgcgggataaacgagatagaagttaagccgaaaccgaaagtgttaccataatcatcctgaatgattgattgaaattgtagaatttgtttttgttggacatagtattcatccatagtagcctgcgacgctctcggtctgcaattaagtttgtcctacttgatatgtattttaaatatctagttgaagtggccagacaatagaacaatgtaccttttcatcttatatagtctttgtggtaattacatccataactttcctactcattaaaacagatacttaactattgtcacaaggatacggtgtcaaaatttgcacgaatttcagtcaagtataactatcattttaggcatattcacaagcaacaaaaacgtcactttgtgggataagtcataatattgaacattagcctttgccaaaaagtacccacatctaagaaaaactactgtaaatgcataaaaggactaattggtcgtgaaatggggattacagtatgtctttatagctaggaagttcaataaagccccaaactttaacccacagttcctccatggcacaagagaacacgaggtcaagcatgtttcgctcggtatatcatagtagcctttgatttcttgtgcttcacaccaactacctaagtccagaaggagctgcttgtggactgcctcctgccactcctcgccttgtagctcttgattgagcaagcatctcatcatagttctgatcagacaaaaatgatcagaatttccatacaaagtttatctaaaaaacaaaacttatcatgagcatgacaaagaatacacaattaaattacccgtttctcaaacgcaatgtcacgtgaattgataattttgtctgcaacaccataatctatggcttcttgtgattgtagatatttaggtctttggatatctttagtgatttcttccttggttttaccagtgccttttgctagcagctcaatgtaatactcagtatttgcatccagttcttttgcctgagaagtttacacagcgtcagaacttagagagagacagagagagacagagagaggcgcagtcctaccttaatccacatatctatgacagccccgcttgatcggttgacctttggcagatataactttgctgcgattcaatgcaaggtatcagaaatgatgatagcaatttgtttgccgcgctttgtacacataaagcatggtatattatatttatgaaaccaagtagatgaggatgtaggacaatgctggtgcataaattattctgtgttaattaagtacaatgcagcagatggatgcaaatagccactagttttttcaaagatcatgagtgcattaatttgtggtatatcaaatttcgaatagaagtagaaaccatactggagcagttaggttgcacagcacgataaccctttgctccaagtgatagaagcatcgctgcttgaccataggccataccacagttcaccgtgtagacttctgacttaacatacttcattaggacatgcagatagtgaaaatgaagcagggttaatcaagagaaaggcatgggataatttttaagatagtttcttttactggataaaataatataaacagttgatcaaaactagagcctgaaaaaaattaaaatgggatatataagaaatttctctgacccatgtgaaaaagatggtgggtaaccaattcacttgtttatagtgttgtcatttaacctgtaagtgaaaaaacaatctttttatagatactagtacttacagacatcatatcagctatagcatatgcctccgtttcagatccaacagtctccatcttctcattctaattataacaagaaaaaaaaaatatgacttaagtaacacacgaataataagatagtgaatcattgccatgtgtagattgaggttgtttgtacatgtgtacgtatcctgaacactaacctgtgtcccggatgagtttatgtataaatagataggcttagcagggttgtcataatccaaccacataaattgagcaacaagaagttcagttactgctggaacaatctgcaacaatgagataggataaaatgaatattattacatttcaaaagtgatagaaacataagtatttattaaatcatgcctaggaatttattaagacaagttttagtgacttacaggcatgcccaaatagcatatccgagcatctaacaacaaggaaggcaaatcaggaggagcagtacggggtcttccatatcctcttgctcctccaccacggtacatgcttacactcatactatattttgatggacctttctcgtgcatgcctgaaagactccacatacctccatgattcaaatagttatgagaagatgagatgctatcctgtcaatagattttagaaatataaatgagtttaattaattataaaatcgaggttctttaaggaaaagggagcaagaaaatcgattttaattttgtaaggttacattatacgtgtcttcaccaagccaaagtggaaacaaagataaaaagtatgttaagagagtgtacctctgtcactgcttctgactgacgtcggacagggttatcttcggtcatgaacatgtccatttgagaaggagaaagaccatacagatactggggtgcattcttgaaattatccatcactgtaaacagaagattactctagtcgtcagatgaaacatataagattatgaataatcaatattcctatattctaacaaagagtgcccttacagggagtcccaaaagcacttacgaaaatatgaaaatctgttattggtatcacagaggcttactgaacactcacaaattaccacagaagacaaaaaaagaacataggtctgcatacttgcaatcaagctaaaacaatatgcagatagtaagtggataaacaatcatttgaacaaactattttattcgaaaaatttccaaagcatttccttcattccattccaacctaaattagttcaaatgctctttctgatacagaactcgatatctatagttctccaagcatgcctagaaccttcacttttaatttgcatcacaatgtaaatagaaaaccaacttgaggcctgcagacttatggtcctgtaattattatcatccttaaaatccctcaaacatctcaacttcgggtggaaatttcatgttctgtgctgcaaatgactctaaaaatgaatacaacttttacatatccaacaggctcaaccactagctactttaacaagacagaaacaacaacaatgatggacaatccataagtaaatgaactacaaaaatgattagaagaaccatcacaagaagattgctttgtaacataacttcaaataaaaattcttcggaatataaccaacacactgtatcctcatttgaacaaagtcctcccacataataattaaacattcaccacaaatataaacaaagtagtttgcatcattctaattcatgagataatcactataaattcactcttaagtactattttatcaaatttcactcttcttctcagtaaccagctgcaacccaaagcttccagcattgaaaatataggaaaaagcataaaaataaataaaaacttgcagcttaaataaggttaaattgaaaacctaaacaaaaaagtattgaggttaaattgaaaacaagcgacatgggtatgtttaaaatttgaaaatattgagaaatagagcaagagatactcacagccatctttaagattttcttgcctgaactgtttcggaatatggtcgaaagatttggcggaggcagagacaaaggaccttcgagctgtggtatccctctctgataaaactctgaaagaagaaggagagtaaaagaggttggtggtggcatgaaggaaggaagagtttgttggagccagatagcgaggtgaagaggagggagtggagagggatgagattagagaagtcgccatggattttgaggatggagggagagactcttcgttctcagtaaccaaatcttggacgctataattctgaagcacaggattgcggtcactaaacgacgccgttttcttctacatgctaagctaagctaagctaagagcaattttcttgtcgtttttgtagtatatattaacgaataacacgacatgtagttttggatttttgagctgaatcatgaaaatgacttcaaaaaggaaaattctcccccaattaagaataaccatcactaaatttttaggaaaaattatagcaaatgactccaaatcataagtaaatattttcttattttgttgaaaaatcacaataaacttcattcaaaagaagataaaatagtggtgatcaggtggggattcacctcccaaaacttcaaaaaaccattacaattactgttcaacttccactaagccaaaacatgagcagccttatttaatcttataggcacccaaataacattacaacacgaagtagaaaggatatctaaactagagagaaaagtaaaagaaaccttctagtgaggggacgatgaagaactaattcagttgaaaatttagaggcagacagagctaaggcgccatcctgctcacccctaaccgcgatacacactgcctcgagaccattcttaaaagcaaaatccacattaactctaatcatttctggacctggaatcctccaactcagagcatgagtctcccgcaatacagtaaaagaggacataccagccaccctagcattaacgcgaccattaaactttgcatcattctgccttttaatctcagatcaagctaaaattcatcaattgggaaaattggcatttctgcaaaattagagtttgtgatacaaaattattacaaacaagataaaatctctcttctctatattgatatgaactccgtgagagtcaaatggatttaaaatccaatttacaacctccccatttgtatggaaaatgatttcattaatacgtaccccatttactagtaaactataagaacttggtaatagggcattgtgagaaaaaaaaaatgagaagcaccatcactcccctcaaggccacatagagaacaacttccacagtaactattgaaaatggtcgagagacgagagccaaagggaagacactccttatataccttccataagaagagcttacgtcgatcatgaatactcgacttccatatcttagcacaagtattagtaagcatgtttcaaagagaagctcccattatcagtagattgccaaataagtttattctctttcggaagaagagtcaagtttgcatatagaatagtaatagcagcacttggggtgaataatctagagacaagattgctatcccaatcaaaacaattttccctcaccaaatcctccactctggtcttgtattttatttaaggattacaatatgagggactaatgagtttaccatcacaacaagaccaataacagttttgaatttccacattagagtgtttgccaataattcacgcgttgttatctctaataaaccccttggtcttccaaatccctttagctgacagagaagcgttcccaaggagaatgacgtcccaaaagcttgaagaggaacaatgcttctctttcatcaatgtaacccaaagagcattgttattttcagctataaaccaaccaagcttagccaaaaggcagaaattaatatctttgaaacctctaacaatcagacctccacaacgttttagcttacaaatagtctcccaattcaaaagggaaagatatcaatcttctttgctattgtcggtccgccaaaattttctgataaaagcattaagagaatttgtaattttgactgggagtggaaaaactgtcatggagtaaataggactagccgagatcacatttttgataaaaacgattctggcagcttgagaaaggagtttagctctccacccttctatccaagatcaaaatttctcaataataaaattgaaatctcttgacctattccccttgacaaacaaagaatttccaatgaacttttcctctccagacattaaatcaaaacccaactcctttgcaattcttaaacgtagtggctttccacaatttctcgagaaaaaaattctagatttgtggaagtttatctgttggcctgattaataataataatttgccaaaacatccttaatatgctccatattagagaaattagcttgtgtagagaaaatagtcatcaacatacataaggtgagaaaactgaaagactagagcatttgaatttatatccttggatcagtccttgatgttctttagcgaaaattagcctagacaacttcagagcataaaatgaaaagatgaggggagagaggatccccttacatgagaactctttggggctcaaaagtttttgtcaaaatgtcgttcaccagaatctgaaaactcattgtaaaaatgcatatatatatatcaatatatgtatacatttacgccataaacgaatgatcataacccaatgaaatatatatttgacactcaccaaatgtaaaatataatttaatgaaaataccatatgataaaatactgtaaatacgaatttagtcttaattgattcatgagaaccaaacagtaaataacatagattaacagaagtgtattagagtccattgaattgattatagaaagatatgatgttccaaatttgcagtcaaaacttttagaactttagtctcttgatgatgggaattcaagagtaaaaagatatgatactgcaaattaaggaccgttacattttatattaccaactgccaaaatagttgctgatatttattgactatttataatttaacccctcatcaaattagaaattattcttgtggtatccatatattaaaattatgacaatcataccctagccatatattttattcaaaataaatcacataaattcgactgatttacatgatgacccaatacatattttatatatacaattataatcttaaataaataaatttcgtcaaatgtttaactttgtatcttatttcaagcaataaaattactaaattcatataaaaatgtatgatatttatttactgcaagttgaaaatctttctctatgaatcttgttttaaaaagtcaatacaaagaactcaaaagtttgtaaaaattacaaaacttaagagtgaatgcctttatttatattacaatgagaattgaattaagaaaacagagagttagttaacaagaacagttaactattataattgagctaactaattgcacaaattaactaataactacttgactgtatcattttgagtatgattggacgacaacattaaagaatgacccagaaaacttacttgttgatattgttattattttctgaggatgcaaattgttttagaaaattagaggtgtgtggtttgttataaatgggtattagtcttattcctcaattctcattgctctagtgtacttattaatattcatatatggactattaataattgatgttatagtaatgataagaaatggaaattcccaatcccatccactaaaataaaataaaaatatggtggctatgctgaagtatgcaaagatgtagttgcctagttggaaatgtaatagaaaaaaaaaaaaaaa

SEQ ID NO: 185714 - DNA, 1781 bp, Cannabis indica
agaggagatacaaaggaaaaatcaaatccacaaacaatttattttgaagagatatactatttagtagggatacaggtggttaacaccacactttgaatgcaaacacatggtatggaaaggtatggggaagatttctcattcccaaacaccgattctttgtttggctagctgttctgaaccgattacaaacgaaagacaggttaatacgattcaatatttgtgactgataaaaaatgcatgatatctgatcaagtagatgaaagctcgaaccatttattttttgaatgtcacttcagcaggaactgtatgatagctatcaaaggatggcttggatggaaaacaactgccacaacacttcctcaactactgaaatcagtaaggaggatccaaattacaaagtttcagcagcaagtattggccactgctcttgctgctgcaatatgtcagatttggaaatgtaggaatgaggctttgtggaccaagaaggtcagctcaattccaacggtggtttaccgactaaagaaagaagtaaagctgagaatagaatcaactttactaaagaaaatgaagcaaatagaatggtttgaatacttgtaaaaatatattgtatagctggtgcaaagttgtataacgggtgtaatgatcaagtgttgtagggttgtaaaaacacatgttttgaggtatatacatggttgattttcccaaaaaaaaaaacaagcttactcaaaataaatctttcaaatattcaatcggctattgtttttcatgtgtttcttttccctcaaaacacatgaaaaacaatgagttatttacatctcaatcaatatttaatgatgacatgttctgttgattttgttagtagacaccagttgtcttatttgagtttctccgactagttgtcgtttcatctttttatgtgtcgtttaactgtattttcttcaagttgattctcaaagaattctattccaacatcctggaacttggaactggaagtatataatgcaatgctaagagcttttggaataacaacaaaatgacagtgttttgctattattattttttagttttttaagtttaatagaatagaataaaatggcatctcgtatactcacttgagctttttgaccaaatattgtttattggtttaaaaacattgatattcccaccattgtgcctcctctaccgtccatttttaaagatgttttctttgcttttccacagctacaataacttcactattagacaacttgattttgcttaaatctactacttatcttttctttagttatttggctcagttgaaaggaaaagaaagaaaatatgtgaaaattgagctaaaaggtgtgtttgtgtcgatcttttcttatttcagttttgaaaggtcacaaaaatccacttttattacagttcacctatcgacaagctgtttgtttcaagcttcaaagaagagcagatttcaaagatttgacataaatttcgagatctttcaagacttcctcggaaggtttatcctcggccaacagcttcactatggcactcccaatgatcacaccatcagctccccatccagcaacctgtaacacccacaccaaagtaaaaggtttctttcttaatacatatttactttcttttagttttccaactaacatcattacctaccgagtatgtatgtaacaagttaagatagcaattttacctgttttgcatgctcaggctttgatatgccaaaaccaaccgcaacaggcttatttgttacctgccatttacaaaaaaaaaaaaaa

SEQ ID NO: 185715 - DNA, 2637 bp, Cannabis indica
caaaaaaacaatcaaacatgaagatgaggacgaagatggaggcagaatttggtgggcttttagttgggctcggagatgaggttgctttcacggtatggacgacactcgtagacgaagataactttgttgttttatttctcttctattgtactaaccacttgtctttttttttcgtagacaatatgagcttcttggctactatggcatcttgttggagctctaagaggaaaattctaatgtcgaaggaatctaaacctccagtcagggaagtggttcatggtatccatgctgcttctattgtttaaaacaagaagatcaggaagaggagcagacttgttaatgccgctcctcctgctcaagattctagcagggagaagtctagtactgctagtgctgatgagagatctccaatcaatgtctctttgaactggtatggggcgacatcaggacaaatgattaactttgacaaatctgtagtttgctttagccctaatgttctaaactctaagaaagattacttggtggatttgtttggggttaagagggttgagtgccatgagaactatctagggcttccttgttttgcgggcatagcaagtttgatttgtttaatgccatcatggatagaattaggaaaaagcttgtggaaataaaaatagttctctatggtcggttgtgagatccttatcaaagcagttatccaatctatcccaacttatacgatgaacctttttaagcttccaaaagcttttgtaaaaaatgttcattatgtgtgcttgtcttttgtacggagaaaatgatgtgactaaaaagatacactggtgtacttggaagaatctttgcttgcataaggaagaggggatatgagtttctatgatttacatttgtttaataaaactctgttggcaaaacaagcatctcacatttataatgtcccaaactctttagctggtcgtgctctaaaaggtttatacttcaggacgaggtcatatactgaaatctctagatccaaccgaggtttttttgtttagaaaaatatctctagggtaaggaactctttgaatatatgggagtttggcaggtcgggagtggtttagacattaatttctattctaacaattggattccttcaattttgccgggtcttgtgtcaactcctccccgacttgatggtttggctaaggcctctttgcttcgtgacacctcaggaggttggaataaagagcttattcggtttagttttctggataatgaagatatgactattctctctattccctggtccaataacgatgtttctgaaaaaacttatttaaactttgagaactctggatggtttaccatcaagagtggcaatcggttgacttgtcataacttggctttgactcgtgcctccccgtcgaatggtttttctggatggtggaagaagatttggtccctcaacctccctcctaaggtaagactttttgcgtggtgaatttcccataattggattactactaaagtcaatttggcttgtcatggtattttatctgatggtttatgttcattatgtggggtagaagaggaaaatactcatcatgctctttgggattttccttctttgatacattgtaggaagatttgtaagtttgtgttaggtgacccggggggccattgcatatagattttcttgattttgttcatagatttgttgatcccctccccaaagagatgattgagttggttatggtaatctcgttgagaatttggtttcgacgtaacaggaaagtccataacaatgttgagttgactcttgagctcactgttatctgatgtagaagttactttgggaatttccataacaaatagcaggtggtggctacccccccggtcacaaccgagagtgacttggtctcaggatgttgcttcagttgtaaggttgtgttctgttcttccaacttccaaatgggttcctccccctcgtggtattttgaaagtaaatacatatgctgcacttttcgacaaatcattgcagtggattgggtatggtgattcgtgatgatctgggtgtgcctaaagcttagattatttggcacttgaaagattgttttgatccattaagttgttgaagctttagctattttaaaggctctctcaatacatttcctttgggtatgacaatatcattgttgagtctgactatccgaatgttgtgcttaaaattaaaaataatatttctatcattacttctttgggtcttattttaaataatatcattaagttttgtaataggatccgtgttgttaggtttattcattgtcatagaccttataatagtgttgctcacaccttggccaaacttattgctttgttggcaagtagtagtattatttggtggccagaaaagcccaattatattcaaaacatgttgatagtggatgctacctttgaataaaccctcaccccacttttattgagtgtttgttgctcttatttggtagttgagtctttctcctaaaaaaactagaattattcactaattaaaattattattagtggaagtctatttatttttggctaattaggatttttgtcccctgaactttgacatgtaccaaaacatgccccttgataaggtcgttaaaaatgcccctg

SEQ ID NO: 185716 - DNA, 3536 bp, Cannabis indica
aaagcggctcatcaggttatagagccaccatgacttaccatatactggttgatgaaggtttcccgagccttctcctctatggttgtagcatgaccagagtgatccacccggaatgtttctaaggtacttgaatgtgctttgacagtttcctggattccagatatcgactccctttcttgttcggacacacctgcagcaagtttcaatgggatagtttgcataagaagaacagtaaaattattaagttaaacttaaaaaacttggaacttgtcagaatgttgttaagtttgggactgaagagtgtgactatgggatattgactaatgagcgagaactaattcagactaaaaaacttactatcgacacaatgaagcagatccttgttattctttgctacgtcttgctcagccacttcccttgcagaattgatctcagcatcatgttgttcattaccctcagaagcattccttcaccaacaaattttcaaatgataagttgaagtcacatattatggaatgtttataaaactatgtccagaacttacaccaagagcaacccttcctcttgaatcaatatcagaattaagtgcaaaaagcaaaaatagccgataacaaaaatgtattaaatgaaagaagagcaactaaagcaaactggcagccacctgataaaacgtcgtaacggctgacacatgctttgctcccatctcattcacagactcttgagtcatcttccattgcttgcaagcagatcagcagtgcttacactgaagagaattaagggcatgagcaaattagaatcataagataacatagatcaggactgaatctgacaaaaataaaataaaaacaaaatacaatacaatagaacagaatagaatagaatacttaccattgttgtagaagtacctccatacgacaatgctttgcagcggagtgtacagcaccatctttggcatcactttctgcttgcgttgagaatgaatcccattttcgttttgcatcggttgtaatacattccattgacgaagcatgaccgtccaaaaattccttttctgcaattgcaccatctcttaaaccaacaagccttgcatcaacctgccaacaaataaacgtcagattaatgatcagtttaaaatctaaaagatcaatagagcaaaattgattgataaatcataaatgtaaaagcgggcaaaacataccatttctttttgtcgagacatatgattggtgaccaagcaagaaatgtcagccataagtttctctgcatcagattttgactgttcctgcaatcatacactttgatgtcagttactttcagaaaagtcgttcaaaaagcagtaaatagaatcgtaggtgacctcataagccttctggaattcagcaatactcttcattttaatttcactagcttctgaaacatgagatacaagcctatttctttcatcaaaaagcttttgtagaaacccttgagagtattcagatatgtcctttatttgctcagcagaggcactgaatctctgaaacattgtaaaatcacaaagggcataaacacaaatactcagaggtattttaagaagcacgtgcagacattttaactacaaacagcacagaaaaccaaaaagtaaaagttgagtagcgaagcatttgtatcatgactaaaatttaaataattagtatgtagattacccccacaaacacctgcaaagcattagaacactgctaaacttttaaataattgaaaagtggacatagaaaagccgacactgaatgatatgataatgtgccttcaaatattgctatacaactttaaaatgtaaaaagtaagaacataaaaacctcccgcaactcctttgcaaaaagagccatctcgccatgctgtgttgaaagagaactctgaagatcaccaaatatggagtctgctttaccagcctcagatgctaggaactgaattacaaacaaattgacacaacttagaaccaactatctggatgagaggaacggaaagaaaagcctaattaatcaatgtaagtaattggtaaaactaagaagaatcaaccaaggcacacaaactatttctacgtacttcttcaacagaatgcgcgttagaagaagccaaagaagaaatttcctccaaaccagcatcagagcttgccttgtgcaaacgaacaacattttgcatggcctctatatgagaaagatacaaagcctttgaagatttaactttcttcttcaagtcattaacagcctgagaaggaattaattcatcatgcaaaagctcattaaaaactatacttgcatcaagcagcttaagttgaatgagcaagtgttgaagacattcacaaattaccttatcatgtgcatctaaaaatgttttacaaagtttttcaacacactgaatgtgtccttcctgattagacaatgacttttcaacataattgcaaagagattttatttgattcccaagctctaattggtaattattcaccaacgatctattatcagaactcattttgtcctctctatctggataataataaatcaaatcattagaaaacaaaacaaagaaacatcatacaaacacaattgttgatagttagactactaactgattttctgaaacagcaaagcattatctccaagtgccttctccaagtcagatcgcaaaacgcatgcctgatgggccagcgcattttctgaagaacacatttgacaaaactaaacattacaaaaataaaataaaataaaacttaccacaccatacagaatgaagccataaaaaattaagagtggagtataatgtatacctgctttcttctgttctgatataataaaatccctctcctttagggaataatggcatttccttaattcctcctccgtgttagcaagcagtttggaggtttgatttaagcttttctgcacattatacatataacctaattatttatagctaaacagaaaaaaaaaatcataggaaacaatttacttcaactcacctctgtcccttcaagtttgctactcaaatcattgcattgttgaacctggacttttatacttttcttgctaagtcctcaaagttctgttcacagcatgacattgaaaaggaacattaatatattaagggaactacccagccattactttatcatataaaataaatatcaacaacaaaccttctgatggttttctatagtgacccccatttgctcaatttggtcagccatggcctattaaagaaattggacataagtattcactagacaatacaagaaattatatctgcataaaaatatcctggaaattgccacttgcaatatctgcagagtaaattatttgccgacataaattctactaaaagtactagattagcttgtgaaaaaaatgtaaacaatgtaagcaataccttctttcggtttcctcctgaaagtatctttcttttgggtatgtagacaccattttttctcccgtgcagcataaacctctgaacataatcagaacattcataagcagtaaagatacacaggatgtgtgaaacaa

SEQ ID NO: 185717 - DNA, 6244 bp, Cannabis indica
aagttgttacgttttacttttattagttcgtacgttaagtaagtaaaaataaaacttatacgttttagtttaatttttaaattttaaattagtttagtttacttttttttacgtttttttttttttttttttgtaaacacatcctaaacttttttggccaaaaacttttttttttgaaagagaaccacagttcattagattaagcaagaattaggattgacagggggcaatccatcccctaaacagatagagtcaacgactcccagcactctagcttggacagctagatcattcacaccaaaaatacattcacgcttaacatgtaaaatagtacaggttctaaaaaaatttgccagctcaagaaccttgaagaaaccatcagcgagcttccaatccggcaagcttctccccttcaaagcattaactgctaccaaacagtccgagaaaagggtaatagatgaccaattcttgttgaccgcccactgcaacgcaagggctattgccttaagctcagcatccaacgccgataaccctttagtgctgctgcaaaccgagtaccattccatgttgtttttatctagaccaattaccgccatcccgcaacaaccgtctttaaaggatccatcggagaacaaaacttttgaattaaagggggctccacttggaacctgctgcaccagccgagggggcatcatcgggtcaggttcatcagcagccactagttcagaaaaacggctgagaacttcagccattaagcaaggaatgtcacgacttcttcctccatgcaagatcgagtttctatagtgccaaatcgtatcccacacaacataaccacatagcagaattctgaccctatcatcccttttgaaattagaacaaaggttcatgatcctagtcttcacatcttctccctggattaaatctattctgacgggtaagggggctccaaaccataaagtctttgccaagtgacactcaaaaaagacatgattcgggctttcgatattatcattgcagaagatgcagttcaaattttccccactaccgatcttgtcacgggttggtaaggccccactacacattctccaaagaaatagacttgctctcggatgcaactccttagaccaaatcatcttccaagactcatgaatgcaaccaaatttgtgctcattttcctgccaataagcctccttaacagtgaaagttcccttaggagatctcttccaaaccacaaagtctttaccaagcccgcccgctatatcaatagcaacaatctgtcttcccacagtttggccaaacagaaagatcacataccctgtattccattggttttggtcatgaagaatcaaatcagagaccgttctcaaattcggagccttgattctaacttcttccatagtggcacgaaactcgtcatagcccatccacgggatccatggttgccaccaaatattagtatctctcccgttcgcgataaccgtacaagagccttctaagataatctgcggagcatcaaggatagacttccaaatgctcgggtccgatgccttcttctccactgcccagaaactgtcccaattgcagaatttctcacgaaaaatcttcacccacaacttctcatcatttgaggccatctcccaagccaatttagagacgagggctttattaatgtcttcaaatttatgaaagcccagccctcccctaaccttcggctgacaaagtgaatcccaacttttggaggcaaagaaatgattcttctcaatgcccccggtccaccagaacctccttacaagcgcatccatcttcctgcacaaagttaggggaatcgtgaagggagacatagagtacaccggcaaagccaaagccactgtgttaacagcagtcattctcccagcataagacaaagtttttagcctccacccttcaaggcgcttctttaacctctccaaaatgaaaccaaagtcacttgatcgattcttggaaagaaacatcgggtttcccaagtaaaacccgcaacctccgaacctttcatttgaaggattccttcaatctcacttcttttgctacttgagcatcttttagagaaaagtatgctcgatttctctttgctgcatagctggccagaccagttctcatacttgtgaatgcactccttgatacatatggctgctttcttactagctcgcacacaaaccatcgtatcatcggcgaacataagatgtgtgattggagtgactcctctcgcaattgatatgcccttaatagtccctgccaactccgctttttgcagtaatctcgaaagcacatcatgacaatacaaaaataaaaagggggagatcgggtcaccttgacggagaccccgagagggcctacacttctttagaggtttcccattgagcaggaccgcataagaggcactggttacacaggtcatgattcgaacaatggcatcattagaaaaaccgtgagctcccaacactttcctcaagaaattccattcaatccggtcataggccttgagcatatccattttgacggccataagaccgccactactcttgttcttctaaccgagttcaccacttcctggcccaacaaagttgcatccgagatccaacgacccgggataaaggcagcttggaaaggcgagatcaccctatccattatccctttaagcctttgagagagaatccgagagatgattttgtatacaaagttgcatagactaattggtctgaacaattccaccttctccgcattcgggaccttcgggatcaagcaaatataattgaaattcaaatcctgtccaaggtggctgatcgaaagaattcttgcacacactcaatcactttaactcccaccgtatcctaacaatttcgaaagaaagtacctgacatcccgtccggcccgtgctttgagcggtgcatttggaaggcatgacgggatatctcttcaccagatggaatatcgcacatgagcttgttttcctcctctgatattgacggggatatcaacccctcgaggtcttcaggtaagctgggattagaggacttaaataaatccccaaaaaactcattaagaacggctcccttctccctttccttttctcttctcttgttctccttatcataaagagcccaaatatgattccgtttccgtctcaccattgtggaggcgtgaaaaaatttactattccgatcgccatgcttcaaccataattctctggacctttgtttccacaccatttcacttctgatccattcttcggagattttcttttttatcatttgttcttcattcagaaacttttcaaagtcatcttgagattgaatccaagccagcctattctccaaaagcttcaagtttgcttcattgtcaccgaaagattttttatgccacatctgaagcgcacctttagtagccttcagctgttgaaccagagagttccttccactacgcttctcactctgcttccaagattccataatcacctccttacaagaactgtctctcagccaggcctcataaaatcaaaacacccgtgaccctctacccttattcatcttcgtgtcaaggatcaaagggccatggtcagaggccacaataggtaagttaaggactccagccttggggcacaccgtgagccattcagtatcaactataactctatcaattctttcccgaactaagccaccgttgaatctcttattttaccaagtatacttacagcctttgaaacccaaatccactccgcctgtatagtcaaggaaagattgaagaatttccccatccttctccgagaaacgcctccctccaattttgtcctctctattcacaatcacatttagatcacccaccaccacccatggttcttcttccttcgacacataattagtaagttcttcccaaaaccacgccttctcttcaatataaggggggccgtacaccgcaaacaaagtccaaaacctttgacattgaggctcccaaacccgacattcaaaggcagttctgtgaattctcaaaacattcacattaaaatcaattttccaaagtaaacaaaagccaccggccgttccttccgagggaataaattcccccaaatcaaaacccaactccttacgaactaaatccatatggtcccgcccaattttagtttccatcaaaaaaatacaatcaacatgaaacttacttgtccaagccttcagagcttgggatgcctcggtccgggccagacctcggcaattgcatgaaaggataatcattgagcttgggggggcttgataagggccgcctcctcgctcatctgaaaatcctgttgaattgtaatgtccacaaaaacatccccagtattgccaatttcctccattcccttatactcatcgcagcaagcagtttcatggtttttctggaggttggagataactccactctttctcggtctccctctcttcttacttgacgaagagttaatcttgagtctccctcctccttcacgagcctctttatcattttttccaaccacaaaagcaggtgaactgtctggagcaaagattctgtcggactccttatttctcactaaagcctcagggatgggttggcccttttcgtcaatggggatgtaatgaactgaagctttgcgtttcttttggcctggcccaaggatagcatggccttggattccctccttatcatggctaataatcatgctctcagccgaagcattgtcaccattacttttagcaatatgggccatattttcctcaaggcccagcccaatgttccactcaatgggcacaggttcaggatattgatgcggggtcctggacttgcacacattatgatggggatgatcaagcatttgggccgcagaaggcccaacattgggcattagggacagaattacttcatcaccgttaggattcttttccaagtttgccattctttggttatacgagggagagtcaccttcaccacattcttctgagattcttttcccgatttgttggcccttgtacgaccagtacgattaggagtggtgacactcccactcatcatcccttccttacgtggccccccagccccactcgtacctctattcgttattccgccgtcgccacctccggcctcctggatcgtcagagattgaaggtcgtgaaccactctctcatggtaaggaccgtctctaccaataaaaccaccactctgacagtcaaaacagctccgttccaccgaattagttttcatccagacaccataaagaggaaccgcttcccctaccggcggataagcaaacttcttttgtcgtgaacattccctactttcatggaagagatacccacaattaaagcataacaaagggattttacaatatttaaattgaacccattctttccgtcctctgttaatgctaaggtgaaagcacggcggtattctctgagtgaggtcaatctccaccatcaatttcaaaaaacctcttctagcaataaccctggaatccgcagtatcaaacttgacaaaggtccctaccttggctccgatgaccggagcattctggacagccaaataaggggttggtagcccatggatttgtacccagacctttgcaagtttcatatcaaccgactgccaacttccctccttaggccattcttggaagttcaaaacatggccccccagaatccctggtctcccatcgagaacgaacctcaagtcctcctctctgtcaaagaaaatgccccagagccccgtttccatggtcttcatccaccattttcctttcaggttccaaatcccagataggatctgcttcactctgtttctcggtagaggggctttcccaaaacatttagccaaagtccctttcttttccaactcttcagatatctcaaaaaaagcttccaattccagggatgattcctccaaaaatttccttctcagcatctccacctggtctgggagttcggagcttacccccttctcgcccaaacccacgacttctgtcagcctctgcatgggttgttctgtctccgacgacaccgttattgtttcagtgagcaaagagtttgtccccaacattcctcagtctcccttagctcgtccatccctttaccgttgatactcatcgtcaaacgacacacacctcactacaacactaaaaagtttgataaaagacactaggtcaatattggacgagccaacttctcatacagagaaaagattcattatatttatttatatatgtata

SEQ ID NO: 185718 - DNA, 2168 bp, Cannabis indica
gggaaaaaacatccagaacttcagaaagctatccagaattatataggttatgcttcttcttaatttgaaattgataatgtcgatttttcgattactttttgtttgtttgtgattgaaattagaggtggctgttattgactaaaattagcaatgaacagttttgttttggtttgtacgttgcaccttcatcacaatcatccgcttattatatcaattgtccatcaagcttgagatgagaaaattcatggtgtaactcactagtttgttttgttgtaatgttgtttctcagatggtacgaaggaggtcaatcaggttcagcctcccgcttccagtgagacaaaccaagctgcatctgtggctggtgatgagaggtttgtagtttgtacttctaagattaatataatatattttttttgatgcaattatgtcaattaacacttctttaacatgcaaaacgttacctatcaaattctctgtaacaccgtgatgtcctttaatttttgtgtcttggtatccctttcggttgcagttcacttgaagatggagcttcaaaaacagaaaaggagcaaagccagtcacaaacagttcctcatgatgcccatgctattcctgttgctaagccagtgagcataagtgcaactatttcaactgtcttggcaagtgctgggaatactttggaggggtctgtggcggaacttgtgttgagtcctcttcgacttgcatttgagacaaagaacttgaaaatcttagaatctgcattggattgtcttcatgtatgtatttgtcatgtttattttatttcttagttttttattttcacgctctcaatttatcggttctttgtttaagattttcccttcggttcttgatgtcagttgcgtaagattgaggagattaatagatgggaagtgaattttgagtttgattgagagatgtaatatgggaacagtaaatttgcaagacaagcttgaattattggtttttgatatgcatgatcatggaaataaaaatatatgaaattttattttactagagaaagagatacaaatttcaagttgtttcattaagttatttgcaatagaaaaggtaagaatattagcattatgttgaaagtggtcggattgagaaaagggacttttgagagggaaatatttgatttttcagaatttacattttaggatatctgcaaggttatggggtattgaaggatttacatttgagttctattagtgagtttgatgctgttgtttgaataaattgttttgagttagaagaactaaggcatgctattcaaactcactttcttataataaatattctgtagtttgatctactagtgtgtcgataatatgtgatccttgataaggtgcaaaaagtattgtgaaatcatattcgattttagaatctccttaactaaacttttccacagttttttaattacttttcgtcagttgatctccatttgaatacattttgtaactgctaattgattctcaaatcatataagcacagaaactcattgcatatgatcatctagagggagatcctggtttagatggtggtaagaatgtaccaatgtttacagacatcctgaacatggtttgcagctgtgttgacaattcatcacctgataggtactattacaattttttaaaccctgtttatgtcatgtgttacgcttgtttacttacaaaagtaaatatgcagcactgttctccaagtgttgaaagtcctccttactgctgtagcatccacaaaattcagaggtatgttacttgagagggtttatgttcacacttataaaaggtgtcttctatttctccatcgttttgatatttgaccctgaaaggctgttaagagtgacatgtgattatgcagtccatggggaacctttacttggagttatcagagtatgctacaatattgctcttcacaggtatttttcatatgatcacagggtacttgtattaacttttagggtgtcgaccttaagtagtactcatgaagtctagtttgaatttgtagcaagagtcctgtaaatcaagcaacgtctaaggcaatgttgactcagatgatcagcatcattatcaggaggatggagactgaccaggtttatgatttaaatttttcttacctctgactgatgcagaataatctctcttctctct

SEQ ID NO: 185719 - DNA, 3012 bp, Cannabis indica
ctctctctctctttctctctattaaactctgctactgtcctctatttctgtgtctacatgagtaaaaaatctcccttcttttggctgtgacagtgttttgtgaagctgaaaaaaaaataagagaaagattaaaggaaacgggtgtgtttgaacacaccaacccaaattcaataaaagttcttttctgtgagtaaaaagcttgaatggaagggagactaccaaaagtagcacagaatctgaaatgggtatctttctcttgctacttttagttgggtctcaatctctttctctctcctctgtgtctcagagctggggttttctgatgctttctgactagggttttgaataggtatttattatgctgaaatcaatgttctttgcttttaattttgactgcttcccatagactcttctttttttcttttcttccggctcttctttgaactatctttttttagtttctgtcttgggagagcatcctttgtgtaacttggtacttcaagttcagtgttttttggctttggaaatgggagcttatataggttcttgtgatcgttggtaacagttgcttttgggtacaatgggttttcttgtttcagagctccttagagtattaagctcattaattgaaagtggttcttccgtttactagctccttgtgtgctgtttctcttgggctagttagcttcagttcaaattactttaggtgggttaagtttttgatggaatatctttgataccactatgaagtttcttctattttgagtttcaaagattcaggtttgaagcttgttggtgctatatttatgatgatttagtgtggttccttgtttctctatgactatacatctgtcttctctgccatttttaattctggattattactgtttgaggtagcagggtacaactgagagtggtcaattttggaggcttttattggattttgtgtagatagctgggctgagttattaaattcagttattagagtggaaactagtggctgagtttgttggtcttgtcaagaagtaatggatatgggagagaaagataaatttgagttggataataagaatgaagatcatatgagttattcatctggcatggcctcagactggcggtttgatggctctaatcttgcaaatacatctatgggtttggtccaggctgcaaattctatggcaatcggcaagggtgatctagttggttcttcttcctgctcctctgctccaatggtggactcatttgtctcaccactttgggaccacaccaccaccaatcctcagaacttgggtttttgtgatatgaatattcagaacaatgcaagcaacttcaactcattaggcattaggaaaggtagtagtcctgcctcaatgagaaatggtgttgatagatcacatgatatgtgttggaatccatcgactccaatttcaaaaggaggtatattcttaccaaatatgcctggaatgatcccacagagcttgtctcagttgccaaccgattctgctttcattgagcgcgcagcaaggttctcgtgcttcaatggcggaaattttagtgatatggtgaacccttttgcaattcaagacactgtgaatctatatccaaggggtggaggaggaatggtgcaaggtggtcaagatgttttagccggaaatgggttgaagcaagtaatgtctggtgtgcattctcaaaagggtcagctcaatatgagtgaagtttcaaaagatacttctttaacagctgaactggggtgcaccgaagggagtccgcttacgaatgagagaaaaaacgatagccttgcgagatctcatgatgaagcaaaacaatgtgttggtgggtctggaaatgattctgatgaagctgaatttagcaatggtgctggaggtggagtagaggaaccctctattttggagggtaccagaggtggtgaaccttctgctaagggacttggctcaaagaaacggaaaagaaatggacaggtaaaacgaatggtttgaaaagtttccttttgatttgttaagtatgaacttgcattttccttaccaatgttcctggttctgattgcgcaggattctgatcctgatcaagccaaaggagcttctcagcagcatggtgaatccacaatggatcataatactgaacaacatcagaagggagatcagaacccaagtacaaccaacaacaaggcaagtggaaaacacagcaaacaacaacagggttctcaaggttcagatcctccaaaggaagaatatatacatgttagagctcgaagaggccaagcaacaaatagccatagtcttgcagagagagtgagctttcaactctgaagtttgtttcttaccaaattcatgataactctaaaatatagctgtgtaataaagctaaagtggttattgtctgtaggtaagacgagaaaagatcagtgaaaggatgaagtttcttcaggaccttgtacctgggtgcagtaaggtgggttttatttcgtttagggagtcattggttgaactcttggcgaatttaggtggcattttttataaattggttggtctttgcaggtcactggaaaggcagtgatgttagatgaaatcattaactatgttcaatcactacaacggcaggttgaggtatgagattatgtataacatcacaatctaatctttcacatgggcgcaattcaatttttatacctttcctttttttgatgtcagaattctgtgctcttctgattagttaaaggatgcaatatgtaatacttctgttttccttgcttgcagtttttgtcaatgaaactcgcaacagtaaatccgcgactagaatttaacattgaaggtctccttgcaaaagatgtaagttataatttgtgcatttcagcctgatgcattagagattgtgaatgaaagctagtctccaattctttacagatgcattaccattcttatctccaattcttgacagatgcttcagtccagagtcggtacttcttcttcactagcattttctccggatatgcat

SEQ ID NO: 185720 - DNA, 6000 bp, Cannabis indica
gcttggccttaaaggatcaaatccattttctccttgatgccttggtcatgggcgttaatcttctcttatattgaattccattcttctagaactggtgcttgtgattcctcatcccctgctaccaagtgaaccgactccactatttttttttaacttcgagtatacgtcattcaccaagattgcctgctctgataccaattgataagccttaagatcacaattcaatagcaagaaattgaagtaacagtagattacaagcttagagccctataggacccctgctgtaaagagaagtcctcaatacatgcataaatcccataaacctctcgaacaacaatataacagcttgcaatctcactccacaattacaatcataccttcctaaagtaaaaggcccactaccctttgagcagtagcattcttacctctcctagcataaataaaacgcaccttggtcctaacagaagtgtatgcatgatcttttgatcaatgttgtctgcttattctctctattgtgatcagttatggttggttttttagtagacagtgatttgttggaaaactggttacaactttttcgtgtcttagcttttcagttagtttgagtattttttttatacactagctttactgactaccgagtatgttcttcattgcaatatgaatttagttgcaagaaattgctttgctattatatctaaggtattgaatgtgtcacttcgtcaaattatactattgatttctaactcttccttctttgcatctataatagagagagtgtcatcatgctgagagaatctccgtttctaagaatatgcaactgagagattttaagaaatcatgtgctgctgaagctagtgcatcacctgcatcaacagttgatgagatccatcaagacatttcagtttgtgccacctttaagtttgaatttatatatatatataaattttagaaagttctatctatattttcaataatttcttcgttgttgtgagatgttttagaaaatccaagaagagatacaacaaaaaaagattttgcttgaaaacttcaaagtccgaatgtgtgaagctgaggataaagccaatgaacttaaagtatcgttcgaaaatttacgtggtaagtttaaggtttttcttttatttctttgaatgatttgactctaccacatgtaaaaatgggtttaaatgtctttactttctctgtgaaaaaaaatagagtccgcaaaaggtgaagttgatgctaatgagaaagcggagaaagatcttatggatatcgaagaagaactacattctttagaagaggtgttttaccatcttaaaaaaatctcagatagttacctgaactatttaagccattaccatgttaatcttaacgttctaagtcacctatttttcaggagaaaaattattatgttagtgtaatgagcaaggagtttgatgaaataaagaatgcagaggccgaatatgaggaacttgtccttctccgcgaggtatcatttatgtcttttctttatgatatgctttgtaaatttcaggaaatggtttcatgaataggacttttcaagactttaagaagtgtgctattaagaagatatgaaagttagaagacttctctgaactttcattcatgtgaacctgtcccatgattttaattcttcctttatactctttttctggctccaaggttgtattattcttttagctgtagctatgccacataaattaatttctattgtaccaacgctgaagcttgaagttaattactgtaggccagtgacaagaaagcttctattatctgtcctgagagtgaacttgaagctattggtgggtgcaatggtagcaccccagagaaactcagtgctcaaatcacaacactagatcaaaggcttaagcaacagatccctaggtatctgtacaatcaatctgtttttatatcttatttttctttttgtaaacaagaggcaagctttagtttaaatttaaaataatttgctttttttcattgtggtttatttctgcagattttctgaatctattgatgacctaaggacaatgtatgaagaaaaacaaagtatgattttggggaaacaggaaaaaaatagagatttccggaaaaagattgatgtaagtacaaattaacagaagaaaagattactttaaagagaagtagcatgattattcaatgtttggtcagctattttcttatgttaatgcttggcttcacaataatattaaattaaaaccagcaatatcttctatttgatcctggtctgcaattttgtttcttctgtagcatgtgatgttcttagatttcaaaagttcccagctgtaaagtataagtttaatggggaaaacaggataaataatttgagaggagcttctctaaagattaatttgaattaaatgtccagtttgtgtaccagtactgtctatgcttgacctaccttgctgcttatcagttatcttattattacagtatctgtattgtatgcttcatttctttgtaatcggttgtgtttactgtttatgtcctcttgttttccagttaagaaaaatgatgctaaataagaaaatattaatgactaagttagcctgtttgtgatgttacattcccaagtaggaggatggtttggagtctttaaatgtcatgttgcactgttaatgtctattgttcttttgacaccaagctgcagtttgtgatagtaaattaagttatttatagcatagagacaatgagttgatggtacttaaatactgttctggtttctcaatgtttttttggataaatttcagtcaccacacgtagcatttatccaattaccaaaaccctatcatgggtttatgctggatcctcaatgttattatcgttttcctcttctgcttttaagtttttttttttaaatcaaagtgcccaacttattgcaagttactgtcccattttaaattaggtccttggtcataaatcttagtatagttgtttttgttaaaataatatataaaaataaatcttagtagagttgtttgctaaaataatatatgaagatatggaggattgttttattgttgcatgaggtatctgggtgatgccaatgattaattagaataagtggataatttactggtttgcactaggacatagatgctattctgaggaaactgtccatttcttttagatatgctttgatggaatttaaataaaagctgtcattgggtttcttatggacttttctttacaatgttaaattacaggcccttcagaaagccctggacacacgtcgaactaagtatcagacaattgcaaataaattgagccgtcagataacatgggggtatgaaataccagttcccaaaagtaatttacataagatatatggtttaatcccactttttggttcaatgatattaacatctttttttttcctttgttccttttcattttttttttaaaaaatcagtttcaataacaaactagaaaataaagggatctgtggacgtatcgatgttagttatgaggatagaaccctctctgttcatgtaagtgtttttacttcaataatttggcagtcttccattatccactgattccatctttcagtaaaatactttatgccaaatacttgggcagctttatatggtggtttgccactgtttttccttttactatcttctctcgaacttatcacgtgctttacaggtaaagatgccccaagatgcatcaaatagcagtgttcgtgacattaaaggactttcaggttttcatttattatttttgctcaatgctttatctagtttttttatttattttgaagcttcactgtgtacttgaaagttgcattagtgtacagaaaggctgtttaaattactaatactttctgggtttgatacactaataatatttataccaatatcatacccttatacgatatccctcaactggaactactttaacttagcttcctaagaagggctatggaagtgattgtcacataatggagttatggtgtggatagtgttaggttactgttgtaacaataagtttgacaaaatgcgaaggtagaccatattcattttttaaagttaataatttattgtgtctgatactgtttttatcttacaaattatatgattctgtttagatgtcagattttataaattggaaaaccaatgtgtctcgttgtaatttttaatttttgttttgattctctagaattcgttgtagatgtcaaattttataaattggacttgtcatttaactcctggtgtgtatcaggtggggagcgttcgttttcaactttgtgcttcactttggctcttcatgatatgatagaagctccatttcgagcaatggacgaatttgatgtatttatggtaggaacttatttcttatatatatatatatatatgtgtatttatatatatgctacctcatccttcatgttaatagttgaatgcctaagtttttgttttttggttatatttttttcactttgattgttctcattgttgtacttgacgctgaaatttttgaatgaccatgttacattactactaatttcaagctttccccattatcttcaggatgctgtaagtcggaaaatcagcttagaaactctagtggactttgccctggttcagggatcccagtggatatttattactcctcatgatatcaggtaattcaatacatatttgatgtgatataacctgattaatattcggttgattgctttgtgcatgtgtacagatgtgacccagttgatcctgactgggtcatgttttaatatttgaaaaataaaataataatattttacttgtgaattgaacctgtttgaaactgagtcatagtctgtttagaaacgttattgtaattcaacgtaattttctcctcatttttagtgagtttcaccacatctttgattttagatattaggattttttccctttttctttttaaaaataaaataataacttgatttctcaatctcggtttttctcgcctttcatcctgtttttaggcctatctgatatatgtgtgatcttgtgatgtctatatggtgaagttaagctctctggtagacatgtatttgatcatttgtgaagtttatcttgggaaaatttacatgctatttgaatatttggccgtaagggtcaaaactgattacaaaagttgatctaatccaaatactgattgaattaaattggatattacatgtaaattagattgtgttcagattagaattttagcactcattctttgattggattgtatcacattaatgaatgtatgttggatagtgagtatcatattgagcgaggagattcgtgttttgttttgacaatattttggtttcaagtcctgcaatgtagtttacccaaaaaggtagttcaaatggtcagccatgtcttttgttcccacaagtttttagatttgagtcctaatggggtacctacatagtaattgttagttatagtttcctggtttccaaatattttaggcctagcgaggatcctagtttacccaaataaggtcttgcaatttagtttgtctcaaatttacggattgtaaaatttgtggaatggttcttttcttttccctctgtgattttgatttatagaactaacttgttttggttatgatacagcatggtgaaggatgatgtgaatataaaaaacagcaaatgccggccctcgtcttgaatcttgagtattcttctttaccaatgtgactgctttgtgcacttatgtttaaaaatctgcgtttattcttcatttaaatctccctggaatgacaataataatatcatggaagaatgaatgttttatttagattatgttgtcaatttcacattgaccatgtacttgtctggtgatgatggtgtcaatatgtagttcaattcttcattgacttgtcagtaaatttattactaaaggtgagagactgttatcagtgatgatcaccttagccaagcccatgatagggctctttacttgacatcat

SEQ ID NO: 185721 - DNA, 7623 bp, Cannabis indica
atcaaatattccaaaatttgagaattatgaattagtaccaaatatttatgaataggcaaacatgaattgtgtcatttcaggaaaattcatttttttttaaattattttttttttttttaatttttccgcttcataaatccttattatcctagatctcgagttgagaagaagacgaagatgatgcttatttttttgtttgagataaaagatgatgcattattatacaaagggaaattttcatatataaaaatctttccttaccaaataaggaaattatttgaatttgtgtcctataagccgaccactaacaacttgccacgtaaggagttcctctatctgcctgatgctaagtaagacgtatatatactctttcccgccgatgaacacttcatccacatctttccatcaagatagggacgcaaactattcttttcttctgtttgtttcttaataaaactctttccatttccccaaaatgtctaaattccaattgatttgacctaagaaagagcccaatgttctggaacaacttctcgcaacggagactagcgtctctgctactgccatggctccgagaccaaccggaattggaggtaaaattgggtatgatcaattcgcaggctatcgcgaagaatctccgcttcaatacttcggttttcaatgatctcatcgaagatttaagtggattttcctttactgatgtcaccattgatcagttaactgttcgatactcgaactggtccgtccctgccatctcgttcgaagttcatggcttccatgtcacactttcagctgagtgagtcacctattttttccatttctggtttactgttgcagtaatttttgtccttgttgtactaaatgatcgagtgatttggtgttttgttttttgttccccttaatttattgaaagggacttggagaacgagagaagttcggtgccgatactgaagcagagagatacattcggagaaagcgtaaagaaaaagctttctcagattgatcctgaggtattttctctcagttttaaagattaatttgttagagaaaatatggatattgatgtataagcttactctactggaatacaaaaagaaaagaaaagtggattttagtaaaagcatcagatttaatgacaagaaggtttaggtaatataggtattccttttatttgtagcgagtgaacaaattggtaaattaagatgatatattattgtgtcctagaatggaagttatgtttgtctatgttaacttatgaatatttaatgtttctcattaggaaggtgaacattttctcaatttatcaataaatttgaataaatattattgaggcaatttattcaatgtcagggtagctatttgcataacattcttgagaggatgtcagctgctactccttcaagaagtaaatataagacagctcttttgaatgttgtcctcaaacattgtcagcttcagatacataatattgatgtgcaagtgaagttccctacgatgaatgcttcttgcacattgtgtttgaaggagcttaatgcaaaatctcagtatttgaatttcggatgtttcttcagggggctttttggagtgccttttctacctttgaaagagtgctcttttgttataactgtcattgaatttgagattgtgtttaaattggtagatcagtcaaatcgcatattttcaatgacagatttattcacttgcatcaaattgaataattttcaactcgtagacttcaatcttcgggttccagaattaattgtttctttttctccacttgatctttccatgtgtttagcatttggtgagacatcatctaaagagtatcagtgtccaagaaatggtagacatttatggaaactagctgcaagcagagttggccatgtgacatccttccataaattagttgttattgttggattatggttgcgttatgtcaaagcttatgagaatctgttacagcttgttggatattcaattgatcatatcttgaaaggattgcctacaaaaatgtctgaaaataaattgttttcaagatctttcaaacagctttggaaggtggttattgatgctgagagagagctacctgctgagtctattgcacaggcacggcgaatagcacgttatagagcagcagccaatgtacagtctgttaagttaaaggaatcccatgtcgatactcgtctcagactcttttgcatgatctttgcacttcttcaacttatctggaaacctatatgcaagttatttcattttatcttttacttcttattttttaggaggaaattggcagaagagttgactgaagaatacctagaaattgtatcagatgattcatctatgcagttttgctttattttgaaccttggaaaaattttagtcaacatgtctcaacctgctgctattaaaaatttagattcgcatattggaatgttgccccccagttttatttcactgtctctgtcaatcaatggattattattattatacttgaaagatgtatgcgaacagtctttgactgtatcttgtgggcaatttgaggttaaatcttcatctttaatggaacctcttctaaggcaatgcagttctaaagatcttctcagtgggaaaagacattggcaggagaatcataatgatatgaaatctatattatggtgtgaccttgcacacaagtttcccttttcagaaactagtaatactactgcaattgataatgctgaaggtgcttgcagctcgtctctggagaaatttcttggagaaatgtggttaaattgggaaaaaacttgcatgaaattagatggaagtgagatggagttttctgaagacccgtgccttctctgtgaaactaaaagttttttgacatatccagatctaaggaacttggattctaggatttcaaaatgctttttcactttaggaaggttgcagttagatctggggtcttcatctatattatcaatttctgtgctcctaaggcagatagaacatgctctttgcaggactaaggacactgggatatcagaggttacttcacatccaccaagaaccattgaagatccttctgaaatcaaatgggagaatatgtacaagtacttttctaatagtttgagtgcggcggtgctaaaaattctcccagagaaacatattcaaattggagtgttcattgctggtcctttcattaaattgtgtctggaaaatgagtttagcagtggcaatgaggtcacaagtcatgaggagaatccagataaatttcaccttgcatttgatgtaaacaacattgaggttgcattttggccatctttaaaacaaattcatcatcagttgcgggaagctcagataataatgatatagaaccagagtgcagtataccaaacaatgatgcagggccagaataccagataatttatattcctaaatcaaataatgaaaaatttatagctgactggtggatttttctttgttcttacttacgaatcaatggtttgaatgcttatttgggggacagtgcagagaaacaaaaacatcaaattttgtgtctgcagccattgactgtccacttttcgtcgtcaaggtaaaactttatggtcacttccttctgttaactttattaccttgatttcagggtacccttttttcttgtttcattaagactattttatgtggctccttagatgaaatgaagaaagcatttgatattcttttcatcactagtttttttctcatatacagttttacataaatggaagtaatgctttcaaatgatctaggacgttttgtttcctccaaaatgaaatgaaataacataagaagattactgattgaccttaccaaaaaaaaaaagagattactgattgagatgagactattctttgtcaatttaaaggcttcatcttttgcaactcttacttacacattgaaaacactagtgaaatctaccttttaaaggttctgaaagagttacaaatcatcacaactgcataagttgaagtaaagaactttcttttttttttgatttggaaagaaaaccatttttttttctctctcttaacttcctttgctagaaccatcgatcatgccctgatgttaaatgaactatatatgctctgcagggagtactttcactcgtttagcacaaacattagtgctatttcagcctctttgtgcgttacagctacaagattgactattttgttatgtatggatgagctatatgctctttctcaggtattgttttcttttagtagtgcatatcgatatgatgatttataaggtattctcaaaggcagataagcataattacaaactctaaacaaatagacataaacagaataaaactatacaccactggaaatataatatgtattttctctatgcccactaaagctcaggagacccaagaaacttaattttttctcaccaagaaaagaaaacaaatccgtctctttctcttcagtccattttccaccagcttgaatattaatggttcgaattaaactattgaaaggccttttgtaagaacatcaactttttggagatttgttgaagtatggttgggactaagtataccatcctcattcttctctttgataaaatgttgatccaactccacatattttattctcttctctgtctgtatctattttgcttggctacttttgtgaatatatcacccaagctcttggtgattgtttgagctcataaagggattttcaaagtttgcacactttgtgggcattgttcttggtctcaaaacctggtggaatctccatctatatttattcgtttaggtatgcattttaaaatgcatttttggcatccatttgatgtaaggcctagtcaagagtagtacactagtgagaggaaaacacgaatgatatttgtaagtttgagcgaatccttttgctaccggcctagttttatatcgacctacatttccatctagtttgttttgacattgaagtgctattttacatcccacattgttttccttgtgacaagtcagagagttcccatgtgccattcttctctgatctcttctctaatagctgtcctctcaaattttcttcaccatgttaccaccaagttgccccacaataaacttcagtaactaaatgtagattttctattatcaattgatccagcccagtttgcatctgtcaatacttttactttttggtcatcaattttcttgaaaaataaccctttgcttggtgtttgcttctaatatctcaaaactcgatatacaacattgaggtgaccttggtgtgggtcatgcatatactgacttgctagacttatagcgaaagcattgtctagtctagcgtgtgagagacaaatgagctttccaactaattggtggtatcttctttcctcaactggttctcctttgagcatttgatctttgtttccaagttcgattggagttttgctggcctcactaatctagcattccagtttcttttagaagatcaagagtatactcagaaatgcctttcttactcctaaaaatatccatgcccagaaaataacccaacattccaagatccttgatattcatatccctcaaacacactctggcctcttctaatatccttagaacattccatagcaaactacccactcactgatcgatacaaataggaggccatctttctcccaacctagaatcccatttatatttgttgtttctcaacgtacaaagaaagttccgagatttatacttgcgttagttcttatcataccatttctcaactaaagatttgtctttttggcaggtagttactcatttaaattctgcagtttcacattcagtcagcagcttagatttcattggttctatgcattcagaaagtattaagcaaaaatgtttagttgccaaatctgtaaatgaggacgcagttggtaaagaagcaccttcaatctgtagcagcattttgtttttggttgaggggatcctcaagattaagtctgtggatgtatttgttcaaaagaccaggataaattatgatgtggaaagttctaagaaaagctttaatgccttaagtagtggtacttttgctgatcttgatctgcctgattatggaattttaataactattcagcaaacaagtgttgatttatcttgtgaagaagagagattggaaattttaactggttttggggaaattcaatctctgatattcaaatatcagaaacagagagaatatactgatctatctgaatttagagatctattgctgcaatctcataattgcttatatgaaatatcagtgccaaattgtacattttccgtgtcattgtttctcttgcaaaatgcctcatcttctaggactatgcacagcaaactatcaggctctagttataaatcatatatggataaatcatcattcgctattgattcagaaaggtcaagcagtcaaaattcaaaccacatgaagaagttaagatttgcatcaaatattccagcaccggatccaagtcactggttatttgtaaatctggcacttggtattgtttatgtgggaagtttctcactgaaaaaagctttgtttaaagcacatgatttgaataagcttttgtcatcactttatgttgggggtgaagttcagacaatatcttgggggattcaggtgatatgtttactaacattacacacctatatgatatgtatattatatttttggttgctcataattgaccattggataacttcattttttttatttttatttttggctggggaggtgggagcagcagtgagtagtgctgtatagatgataatggatttcaaattggagttatatatgttgctattgtgcagggtggtactctgtccttgaaacaactgctttggagcattcattagttgtgctaccgcaaatctttatgctattgcaaaaataatgtctaatgttcagttagcatataaagggattggaaaagcacaatgcaatgtggatatgcccagagtggatgatgactatgttactgagaaagtcgaagggactcttcaaacacctttagaagttgaagggaaccaaatgcaagggttaactgtaaatgtctctcgactttctactattgttgtaatcaaagatgagaaaggtgtgttgatgtagatacctattagataattagtatttttttaatatggatatgttagaaatattacttgattttatattatttggcccatttagagagtttttatcttttcagttcttactataagtttcctagctgatttaggattatttgctagataagcatcgattattagttggattgtttatggttttcatgaaatctatctcattttctattttattttagctaaattgttatctttttatttactgctccatcttctttgtttttgatttacatgccatgttcttcctctccaactatactcatgtgctgcaccgctaggcctacattgtatttgaatcgtttgttacatgttgcagggtggtgttcgagaacttgttcttgaatttgatagtccatctaaaatttgaattgacaaatatggaaagaaaattcatgtttagaccttaagtcatcaatcctttctcaagtcctccgacaaagtggtgaaaatgaatttcaataaacctaaaa

SEQ ID NO: 185722 - DNA, 2560 bp, Cannabis indica
ctgcatggatccatgcattttcattctactggatttcatctgtcattgtcattgtttacactgcttggtcctggccggaaacttattcttgatggcatgaagagtctatttagaggggctccaaacatgaacactttggtcggtcttggagctttgtcatcgtttacggtcagcacattagctgccttcataccaaaactggtaattgttgttctctattttatatatgtacttttatttcatattctttaatttttttagtcttaaatattttgtttggttggaacgcttttatcgttgaatcctgagtgttaattctgagttgtagtgtcaattgcagaagactactaatctaaaataattattttgttcataaatataaaataagttaccaaggggaaccctctcccaatatacaaaaaaaaaaaaataagaaaacaaaatcaatcttaataaaatattaaatttttattcatgtgactttaattaaaaacatattcattaccagtcatgtttgacgaacaaggactctcttttgtttcttttcttttcttgaaacgatgtgagtacttgttaacaaaaaaccaagaaactcagcatctaaatgaaatgaaacactggtagaacttatctgtggataatttgcgtgcagggttggaagacattttttgaggaaccaattatgctaatagcatttgttttgttgggaaggaatcttgaacagagagctaaaattaaagcaacaagtgacatgactgggctcctcagtgttttaccatcaaaagctcgcctcttgctaaataatgatgatatagaatcaggttcaacagttgatgtaccgtgtaacagtctctcagttggagacctgattgttgtattacctggtgtaagtgaataccttattctcattctgttcaatgatatacaaccgaaagtttacagatgtggatttatatagatacatatatatattttgattcatcatttcatatgttactcttttaagatatgttttttttcattgttataggaccgtgttcctgtggatggaattgtgagagctggaagaagtaccattgatgaatcaagttttacaggggaacccttacctgtgaccaaactaactggggtatactctcaaatatggttatatgctatctttattttccttaaaactgaataggcatctaattgtattgttctcgttcatagaaagggaggttattgatttttatgtttgcctcgttttttaaagtattccttttttttttaatatgcattttatcctcttctatatatttttctttcactgcaagaaatgtacaactgcaagctctaacattattgggattttatctctagagccaagttgcagctggaagcattaatctgaatgggactcttactgttgaagtgcaaagacctggtggtgaaactgccatgggagacattgttcgtttggtggaagaagcccaaagtagggaagctcctgtacaacgcttggctgacaaggtgttagattcttccttagatttcttagatggacacttgatgctttagttacagtaaaaaaaaattatatgaattcaagttatggtaaatttctattacatgttgcaccatttttttccttttaccttatgacttggaatataaagactactaaaggtgtacaaagcatgaagatgttctcttagccgaggaggataatatgaaacaaactaaatgtcttgaactaactaaatgctgtgtaatgtctatgcataataatatctgcatttgaagatgatttgatgtttatttctttgtgtgtgtgattttggtttggaaagcaatttatttaaattttttgtgtctaaccgtctttttattctgcaaaattctttttttctcagctacctttttttggtatagaaagtttgcttcttctaatcttctaaaatggagaacatgaaagaaaaattgttttggtggtagtattatagtggctgtatatcctttgatggttttagtttcaccaggtttcaggacactttacatatggagtaatggctctctctactgctaccttcttattctggagtttatttggtgcacgtactctacctcctacaatatttcaaggaagtccggtttcattagcgttgcagctttcttgcagtgttctggtatgatatttaattcatatcaactctgaagttttaatctatatataaccccaacaaatgtgtgttaatgaaataaaggctttttaaactatagtatcttttatttttgttctttgcaggtggttgcttgtccatgtgctctaggcttagccacgccaacagctatgctggtaattttattttatgttttgctactttttaagcaaagaacaaacctgtatggaatgtctaaatttagtctcaatatataataaattatcttgcctctcttaagtgaaacagtggccccagtaggcaactgtctctgtgatttggcagattggggtcatggtgtcatgcataatgaatgcattgacaaactatttcttcttatgaagatttttttttttttt

SEQ ID NO: 185723 - DNA, 3441 bp, Cannabis indica
gaaagccacttaagtactaaatggaactaggtaatgccattaatgtgtgtatcggcaaacttaattgtagaccatagaattgttagttttacgcattaactgactatatagctagctctcaatttaatattggtatttattgatagataatattaagatcatgtcatctcacaaaatattatagcactctagtctctactctagcaatgctcttcttatttgccccttaaaaaatgtcttaaacaatattagtaggaatgcatgaaaatgatggcacactattagtattagtggcatatttatgttgaggcaacttcaaaacaagtcaagatcgtatatttgtattttctgtgcaacttttcggcttagcatgtgaggatgaataagccggcaactcctcttaaacaagtgggcttattatttatttgttgtctctcgtcacaccaatatatctatctattcttttctctcatatattttttggtccgttcactaaggataagcaaatattttctacagccaatggaaaattgagtgctccttataacactagtgtctcaatcgatcttccccaattattccaatgtaatttagcatacttgaagatgatgccctaactagctagtctgtcttatgttttgggaaattgttggagggtatactacaagatagagcatctcgctcaaagggtgtttgcatgtgtttttagtttttatttttcaaaattatgatttcaaaagtaagaattgaaaatattttttttgttcattttaaaaatttaatagtatttagttttaaatttttttttttacttaaaaaaataagtttaatattctataccataccatgacatgaaaaatcttaccccgagcctgacccgaacctggaccctgacccgaacccaaacacgaactaggactcggaactagacctagacccagaccccagacctggatccagacccgaacaccgaacctagacccaaactcggcctcgaacctagatccggacccgaataccgaacctccaacccgaacctcgaacccaaactctagactcgaacccagtcctggaaccaaacaccaaacccggacccaaacccaaacctagacccgaacctaaatgccggacccggacccaaacccagatccagacctaaacaccgaaccctgaaccacgaacctagaacctaagacccggaccccaaactccaaccctggacccgaaccccaaatcccagaccctaaacccagatccaaatccatacccgggggatccatttcattttactaactatattattaaaaaccagtagacaatcaaaagatatcatggttataatgttgcacattcaatagcaatactctaaagttatttcaataataagctgcatcacatgaatatttctttaatttgctaaacttcttggtgtgctcattaattcattacaatatacatcaattattaactaccaaaccgtacgtatgaaacgatatatatataaaaagagacattggcctcattaatgaaaacaaagtgcaaccagctaataacctatggatttgacaagaaataagtttatttaggtttgcatcttctgtatagctcgtgatcctttgtgagcctattgactattcttttactacatatatataaattttcaattttaattatctttttagaagtgttgggttggaaaggaagtgttgactattctttccaagtagtactaccacaagtctatactctactactacgttaatcacttcactcccacccttttaatttcatctatatatattaacatttgttttccacattgagaaaacacaataatagtaacacaaacatgagaattgcttcatcattactcctcattctatgtatagtaatactactactcaatggagtgcgtagtagtgatcccacatttccccaaagaaaaacaatagaaataataataggaggcggcggcggcggtggcggtgacggtggcggttatgctcccgctcccgctcccgacaccgaagactgtccccctcctcctccaccacctctttgtgagccaccggagtcgcctccaccaccgcctccgccgcctccgccgcctccgccaccgcctccgccgcctccgccaccgcctccgccccctcctccgtcgccacgtccgtcgcgaaacccaagggccagacttgacatagcacgtaaaaccattcaaaaattcaagcttcaaatcgatgtaaaatcagctccaaaaggcgttcttgaatcatggaaaggtaataacgtttgcaaatacaaaggattcatctgcgacaaacgccctgactttgggctacaagcggtagccggagtagacttcaacggattcaaattctccggcaaaaatgacatattaagacttaataacttccttgacggattacctgaccttgctttcttccatgtcaactccaataacttcactgatggagtcccacgtatcggccctgacaaaatcaactaccttttcgagcttgaccttagcaatggcaaactttcagggccattccccaatgaagttctcaaagcaataaatctaacattcttagatcttcgtttcaatcaattttatggggaagtcccagaaggagtgttcaaactcgatgttcaagtaattttcctcaacaacaacaatttcgagggtgaaattccttcaaatcttggaatcacaccagctctttacctcacattcgcaaacaacaaattcacaggacaaattccttcaagcttaggaacagccaacacttcaaaaaatctccgagaagttctcttcctcaacaaccaattctctggttgtttaccttaccaaattgggaatcttaagagcttgactctgttcgatgctagcatgaatctcatcactggtccattacctcagtcctttggctgcttgtctaagattgagattctcaatttcgctaataacaaattgtacggtgaggtaccggaaagtgtctgtaagatacagagtctcagtaatttcaccttatccgataactatatcactcaagtcggtccattttgccggaaacttatagatcggaagcgtcttaatttgaaaggaaactgcattagggatcttcccaatcagaaatcgaaagaggagtgtgctgaattcttctctaaggcttatccttgtcccaatatgaagatgatgaattacattccttgtaagaatcagttttaccgtaagtcttcgtccttgaccggtgttactgatgatcaccagtctgagtctgccattgaagaagaagcaccttctccggcgccggcgccctctaagtcggtgacttacggcgctttatcacctcattgatcctaataataataataataataattatattattatagctttgattaattaatggtaatttcaggggatatgtggattagtac

SEQ ID NO: 185724 - DNA, 2147 bp, Cannabis indica
aaaacagttatttagttatgatatcaatacgatgattattttataaataatttaattgctaatgacacatggcaattcttaataggatagacaggaaattagaccccctttgtggacagaggatccgcttccaatattatatacaacattggctttttaaaaaagaatattacatacaacaaactgcgagcgaagtgtgttcaatacttctctctcggctccctccaaatctaagatggcctcttctccctaccgagatcgaaccgtcgagttccgatcacttaccgatactctcaaaaagatcggaggaatctcagccgttaataatgcagaaaactattcgtctacacctgaaacctccctacatgcctcgccttctagttctagatcccaattcaataagaaagcctcgctgatcgggttgggcatccatgaagcctctcagaaaatcgccaagctcgctcagtgtatgtactcgttgctccttttttctttgttcttatttttctgttactacgtaagaaaatacaacggaaaagataaagaattggttgttgaattttcaattcaattattgatttatgtgaaaatagcaattgcaaatttacatgtggactcacttttgggatttatttgaatccgactgtgattgataacaagggtagaattgaatatgagtaaaaacttaattaagaagattttataattcggtgttgaagatttttcgaattcaatttccatagttttcaagtttctaacaatttttcatttcggtggttttgcacttttgatgcttcaaataataaattatttactgctcgccttaataattatccattaattggttatttggaaacaattttgtgtccctttagacgaacagatttcgtttccttgttcatttttacttagggttattgcaactgggtggtctggatgaggttcagattttgagtgcctgaaaacattttcttttgtggttatatgcagtggcgaaaagatcatcaatgtttgatgacccgcttgtagaaatacaggagctaactgtgatgataaagaacgacattacaacgctcaatgttgctctcactgatttgcaaactatacaaaacatggagatagctgatggcaattactctcaggacaaagttgttcactccacagctgtttgtgatgacttgaaaggcaaacttatgggggctaccaaaaagcttcaagatgtgttgactgctagaacagaagtcagttctaacttaattttatgccttaaatgggcaattttgacccctaatccttgtttaatgtatctattatcttccacagaatataaaggctcatgagaatagaaggcagatgttttccacaaatgcatctagacaaaatcctttcaagaatcaagcaaaaactctgaatgaaccactcccgtggtcaagctcgtccaatgcacctggcagttcccaaccatcagtgtgagtatctttctagtcatagtttgtgtgtgtgtggtcgtaacttagtacatgctccatagtttggttttcaaatcttggggacttctgctgctttattcctagtaactgattcatctatttctctttctctccctcttttagcagtttaccacctaatggagctcaagctagcaaccaattaaggtatattaatggtcttaaacattgtatcttccccaactttgctgcttttcgttgtaactgctgtgtcacttgtaactactttgcatactggtatttgtatacgcctcatagttaagcttaacaaacagatgtatcattcaacttctgtacatttcgagggcaataatactcgagatgctgtggtagaatttctgacatttagatatttgaggttgctattaaagtgtgttcttcaataaaaattccagtgctttgccctgtgaataatcagagataattttttttgatagtacatagctgcttctgaaatattttttatttcagacgaagattagcaggggacagccctccaacccagcagatggaaatgtccatgctacagcaggtagttccacggcaagagaatcatatgcagagcagggcggttgctcttcacaatgtagaatctacaattactgaacttagtgggatctttacacatttggctactat

SEQ ID NO: 185725 - DNA, 970 bp, Cannabis indica
taaagggtgtgctaaaggagctgaataagtaggccttttaagacattcagatgtctacacaacaaactaaagatgttcttgcagacagtcaggagaaattgcagcaggagcccttaaatcattcattgcagaatgaagaattagaggccaggaagaggtatgcagcattactgaaaaattatcaatcgtacctgcaacaaaaagctaagattacatagattaaaaatggggatgaaaacaaaactttattccatgcgagtatcaaggccagaaggagacaaaacaggatattgtcaattcagaaccaagagggagagagattagaagaagattcaaaaatatctgatgcttttgtgacttattatcagagtctacttggcaccaaaaggcagggaagaagagctgtattgtcaaatttggttcagctagggctattatttcaaatcaacatgctacttggcttacatagagctacacctgtgaggaaataaaggctgcagtatttgcaatacatggaattaaagtgcttggaccagatggttacttcgagttttttttttgttttttttttttttttttctcaggacagctaattcaaggggatgtgtgtgatgctgtttaaaatttcttgcattcgggatagatattaaaggagataaattccacagagctcactctcattccaaaagtcaaatgtccaaacacagtaagtgaatttagacctatagcttgttgtaatgtgatctataaaattgcaactaagttgatgtgttcaagattgaaacatgtgcttcccaaattagtggctcagaatcaaggaggttttgtcaagggaagattcatagcacataacatcatgatctatcaagacctaattaggtactatggaaggagagtcacaaagcctagttgcatgattaagttggatttacaaaaggcttatgacaccattgattgggatttcttagag

SEQ ID NO: 185726 - DNA, 2285 bp, Cannabis indica
cacatcctataaataaattaatatataattttaacttttcatgttttagtagttttaatttaagaattataatattcagtattatattttagttttattattattttaacttatttataattgataaattcatatcttattattaataaattataatatcttttaatatgtcgtgtcatgcttttcgaacttgttctgtgtcgtattttttgagttagtctattcgtgcttacgtgtcgtgcctttcgtgcttctcgtatcgtgttgtacttaagaaaatatttttcgtgtcatgttgtgccaatttgtagcatcgtatcgtgttgtgccccagcctataatttttcgtgtctagtcgggcacgtgccgtcaaaaagctgagcctgtatttacatcatttttctgaattctgaaaatcacaaattttttatgtctgaggatatatttgcgatggtgtcaagagaatataattttttggcaacgtctaacaatgtatttgcgatagtactaaaaagcatacttttgggggaaaattgatatcaaatgatgcattactgcatttacaatggtgtccaaagaagtctgatgatgcatttaccaatttttggctagaaaaaaaaaaaccccaaagcatttacaatgctgccagtaaaacatgatttatatttatttttggtgaaattgatgtacaacaatgcatttgcaatgcacttgtgatggtgccatgaaaacatgttaaatgatgtttttttgtgatgatgtaagaaagacatttttttggcaaaaaacgatatctaacgatgtatttttgatgcatttacgatgtattattgtcgcatttgtgatgaaatatttttagaactttgatgatccagaaattttcacaaaattctttaatttttatatattttctcaaatctatacattttcaatgtaagtccaaatttagagtgttggacaatagcttcaatgattctttaatgagggcttatttaatagtgttaaatgtatttatttattttccttattaagcatccttgtacgtataattttcttatgggccatccctacaccacagttaaattatgagcatcattttttgccttaaaattcacgtcttcacaagactcactagaccatcgttaggcattaataatcaaatttttatagtgaaagaaaagattataagtggtttagggagatagaaagatacagtttatgagacaaaataaagaaagtgtttgaattgagaagagcaattttatcaattgtataccaaagtacagtttttagagagttttaaagtttagcatactaattatggtataacttaggcatcaaggtttactatttaattatggtataataacatgcatacttaaatttccatataacacctgggcccagttaggtcaccacaagcacacacaaatagtaatcaacagaagaatacttgtataaataatcaagattgtttatcaattatgaaaagaagaaaaacaaccatgggttatagccccggtaaaacaataatttacataatctcgctaactagtaatatcccccttccctggccaatttgtaaccttatattcagtaaccaaaaccgtttcctacataatcctcatcactactaaaagactccaccaactgactatcatctccatcatcatcatcatcaccatctgttacaatctccagtaatccagggccccccccgaaatctacataatccccatcgtcatcatcgtcatcctcaagacccgtcaaactatcaacatcatcgtcgtcatcagaatcattgctcatatcatcaatgtcggtatcccaatcccaatcaagatctggaccaagtaagggatcaatgtcaccatcatcatcttcatcgtcgtcatcgtcttcctcttcactctcagcatcatccggatcagaatcatcatcagttggtcttcgacgaccgacctcatacaccctggctgcagcaaacatctcatcctgatcatccattgtaatcaacccaagaaaagaatcagtaggctccgcagcaaagtcgaggacacaacgatccacagggattgtagcaatctcagagtagttaactgcgtccactgtcctgaaagcacaaaacagaggatgcttcatccgacgtgtgttgaacgatgacattcatcctcaagatttctcctcagaattgcatagattcaatcaccacgtgcgttaaacgtaattgatgtttggtcgagtgaaggaacactacggaggagtctatactttctaacgatccc

SEQ ID NO: 185727 - DNA, 3950 bp, Cannabis indica
atttgttagccgattgggtagcaacactgtctatcggtgtactttcaaatttacaagggaacgaatcagaggatgactcttccacaaggcaaattttcactgtaacatcattttgggctccttttcttcttcttcacttgggtggcccggacaccattacggcttattccttagaagacaatgagctatggtggagaaactttgttacgcttgggggacagctagtagctgttctctacatattcctcaatgcttggtccaataatatcctcaacttactttctattccgattcttatagctgggctaatcaagtttggtgagcgtatttgggctctaaggtgtgcaagtagtgaatgctttagaaaatccatgttcccttctgctgaagcagggccaagttacgcaaggcacatggatgaatatttgtctaagaaagatgagggctttaaggtctctatcgagacaacatttgaagttcccacgattggtcacactcatcatcatcatctccgcactgtcatccgcccaaacagcatagtcccaaatgcgcataaccttcaacacgcgcataaattcttcaccatgttcaaaccccttttcgcagaccttatcctcagcatccatgacatagtacacagtcaatctttcttccaagaaacatcttgtgatgaagtttttagagtgatagagattgagctggggttcatgtacgacttgttctacaccaaagctcttaaatttaactctggtcttggttgttttacatgtttagtcacatgtggttgtgtggtttctgtgtcagtgtttttcttgtacattgacaaacgacattactatacagtagatatagtcatcacctatatattgctgattggagcaattgttcttgagatatatgctgttgttttaaaactctgctctgattggacaatgctttggctgagcaagctcagcagcggtgctgttgtgacttatttataccaagcaatttctttcatttcatcatctacaaaacagagcaagaggtggtctaataaagttggacagcataaccttataagtttttgcctcaaaaagtcagctgataagtattggttttccagctattatgacaagttgatgttcaagtactggtatgatagacctagtattgcaaaaaataataagttgaaagaactcatctttgagcagcttctgacaaaatcaaagagagacagtgctgactgcaaagattatgtgatcaaaggggtgaatgggttctcaagaatgagaaatgtgacaacatatttggatggagcgttaaaggagaatttgacaagagtatccttctttggcatattgcaacagatctttgttatgatgaagatagtgagagcttagatggtgattctcgtggggagtgtcttttaggggagctgagcaagttgatgtcagaatatatgttgtatattctagacttgagaccttttatgctgcctaatggaattgggcaaatcaggttccaagacacatgtgctgaggccactgaattctttaaagaaagaagatccatagctaatgaaggtagggctcgaggaggattgttaagagtaagcactgaaatttctccttccaaagtgaaaagaggtagaagcaacacggtgttgtttgaggcctgtaggcttgcgaaagagctgcagaaatgggagagtactgagaagaagtggagtctgataaacaatgtttgggtggaaatattatgttatgcagctaatcaatgccaagggaatcatcatgctcaacagctaagacgaggtggagagctgctcactcatgtatggcttcttatggcgcatcttggtatcaccaaacattttcaaattgcagatgatcatgaaaagggtgttaagatgagtttttattgaaacagaacttgtcatggtgaaacaacttgattttcttagtgacagattattatttgtattttctttttagtcattaaatcccaatatcttttgacaaataatttggtcatttgagaaaatataaaccatttattagcaaagacctttgcctgtgtagaaactggcagaggtaaaaaattataatagtgatatcatgaaaaaaaaaagtcaatacagaaaaataaataaataaacttacatttaaacgtaggctacaataacaggttaagtcacttgaaatccacataaacctatttcttttaacaacattttgttacatttctggtccatcaggccatgtgctctatattgtgaatgcttgtaagttgtaacctaagtaaattaaggttccatgtatttatactaaaacattataaagtacattagtgtcaagaaaaaggctaaaattaagacaccagattataagcaaaacatatgtttatatttaatatattatgcaaacatgactagtctagttcatcactgcacaaccagcctagtccttgcatggccacgtgtaacttgaaactgtttggttatgccaagatgagccataagaagccagacatgagtgagtagctcgccgcctcgccttagctgctgaacatgctggtttttctggcattgactagctgcatatgacagtatctccacccaaacattgcatatcaattcccacttcttttccttttcccactttcggtctgtttcaagggtttgtaggcttttcacaaggcgacaagcctcgaataacaccgacttgcatctgtctcctttcacttctgatggagaaattttggtgctcactttgagcagtgcttcacaagctgtctcctcatttattgctatggagtttctctcttccaaaaacttgaccgcctcggcgcatgtgtcttgaaaccggatttgtccaatcccattaggcagcatgaatggccgcatgaccaaaatatacaacatatattctgatatgagcttactgatctctttaaaatttacaggccgaactgtgttcaagccttggttcggttgagaatcgttcaagccttcatccacatcagtattataacacaaatttgttgcaatatgccagataagaatgctttcatcaaattctctcttaacactccagtcaagtgtgccatcacattcctcattcttaagagcagtttcacctctatgatcacataattccttacaatcactaagctctgaagtacctctagatttcttctgaagttgcttaaagatctcctctttcaattccttgggaatgttacacctcttgaaatagtacccatacaccagcttatcataaaagcttatccagtccttcagatatttagcgcatttcccaggcctatgagcaaagcaaaatcctattaggttgtattgcccaatgctattggaccatcttttgtttctgggtgtcagaaactttggaatataggaaatgggctggtaaaagaaatcagctatagatttcttacgcttgcttagccatagcattgtccagtcagaacagagtagaacaagaaaggtatatatctgaagaatggtagaaccagtgagcagtatgtaggtgatgatgacatgaatggtggagtgagcttccttcttagccacgacgaaggccacaaacacagaaataacacatgacaaactcaagaaatggagaaagacacctagtttagagtagaacgtaaccattttcgtgtagaacacatcgtagataaatccaagctcaatctcaatcaccctgaacacttcatcacatgatctgttttgaaagaaagattggctattgaaaatgttgtggatgtttaagatcaggtcagcgaaaagtggcttgaacatattaaagaaagtgtatgcgtctaacaatgtttgtgcattgggaattgtgacgtttgctgaagcagaattaagatgatgacctactttaggcatgtcaattattcttcttgaagacaccttgaatccctcttctctcttcaaactaaac

SEQ ID NO: 185728 - DNA, 6790 bp, Cannabis indica
ctcgtgatgattgaactatttacaagtttggatctatgaaggaaaggaataatgtatgaacatcatttccttgtgggccaaacaagaatccagttctcttatttataagttttgataactaggaacttcatatataacactaaaaaaaaaaaaaaaaaaaaaaaaaaaaggaaacttcatatataggacctacatcaacaaccatttttcatctcacatgattctttgtttattggaccacttgagatctagagagtacctattatttatctatttttgttttttcctttctattttttctacatatagaatggttgaagccccatacaacgtggaataaaaattatcaacataataaaactccctttcaaagcttaaaaaaaaacccatgtgatctatggtttccttgcccaacactccttccttcacacttctttgcttcctggcactgttgcttgctttaaggcctaaataaaatataaacgcagaacttttaatagtgactggcatcccaatgtatgagtttctttaccaactaaaaccttttatagagagagtatggttgggaattggagccctaaaagatttagctactttctctttaatcaaatcaaaaccatgtgcaacatgccatgcaactaactcttttactctttaccccacaattccaatctaccttttgctgtaattttggttaattatctaatcacttgtgttgctttcgttttgccccttttttaaggctgaaaagatgctccttcataaatggatattcctccacgtgacttccattccattgcctcctccagccttggcataactcacaaggcaactatcttatagaataggaaatctcatttactatgaaatgggctacacccagcttgacttttggctcagtcctattccttgttgtgagcctactaaaaatcctgtcattacagctcaatttatataatttatattaatgtaatactaatagtgtcactcacagctcttccaggctgaaatcacttattaacttcatgaaaatgccatataatataatacgtggtactcatttcatttatagtacaaacacaactaaattttggatcccgattttaacaaaaccatagagccatatataaaattaaatatcaccaacttcaagaatgcaataaaattttagcttgctttctaatggagtggcaccaaaattactacaacgctcagtataataaactattaggatacatagctgagtcaatggcctaggacaataatagaagccacaccaaaaatgggaaacgaggatttgggtttgaattagtattcattgcgttagctttactctgcaccaatggcccgatcaacctggcgatggggcctgtccacccaaaatttgaatttaaattatgttaaacagagaccaaccaaaaatggcagccatctaatttagtcaagaaaaaatggctgccatctaaaaaaactagtgtgtctcttctcttctagatcacatatacctgcattttcacgtgataacatcgttatcacacacttgagcaacatggaacaccaaatggtagaaagactgaattgttaactaaagattgccaaaaactagatttcccgttagaaatcactcgttcggatcaaattcttggaattgagccttgaagtcgcctgccatcttcgtctcttcttctttgctgcaagtacaattcctccaatcagctctctttgccatgtccagcagacctgccagaacctgcaaatgttacatgtaaaagacactcaacgaacagttaaatagaaaggaagatgagtatgtcacatactggactatactgaactaatcgttcaatttccatgccatgatttacatgttattttaacacattaaatgtcaccaggaaaaaaaacttgaaatgaatttaagtatgagaaattagacacaaacagattccaaaattgagatggtttgaacccatgtcttaaaaaaatatgaagaaagttcacattaaaatgaaacaaggaaaagagttggctgtagatgccatgaccaaattagcaatggcaccaacttattgaatacctcacgtccaaattgagctgggaatttctcattttctccgaccacatgtgataatatagtgccatcagggagttcaacgtagaagaaactaagattcttgtcaaactgtgtcctcagactatttcttccctccaaattattattgactgcaatcaagagataaagtagcataaatctatagaagtgaaaaactattaatcgtcagatgttacacaaaaccaacaccagttaaaacaacattcatttggggaaagactcaataaagatattaattagaacttctagtttaaactggacaccggaaacatgatatgaagacagcttggactacacaaatgtaaatcagattgcatagttcaaattatacaaaaaaaaaaaaaaattcatctttgtaccaaaccaaggaatgtgcagaatccaagctaacaatttccaccaataagaacagaaatacacagcacaacattgacttacattttgtgacttcaaatttgaagcccatcttgtcagcagcaaaattaaatatattttgaacagcagctgccttggatgatggaacaggaattacctacacagttgtacaagaaaattaaactgcaagtgtgaaaatgtgattttgatgtaggagactataagtaagatctctgtctcttcagacttcatgtttgtgtttgcccacaaaacaaacaaagcacacttcacacaacttgtgatataaagaaacagaaaattctccgcgttaatataactccaactaagacacttataagaccctttacctggagattagcatgtgtacttcgttttgaaacccactcgaaaaatactgcttccttctcttggttcttataaaacttcttgagactattttgaaatctatcaagctcactttcacattgctgggatagagcaatagtattaggcaaatgttccactggaatcaccaaaacatggtctttcacaagtggccctttagccaatgcacagtagaaattttctccaatactgatgatcagatgtgactctacattggcgcttgatatacaaaaccagcactcttttgatctgaacacttgtgtacataacagcattgtcatgaaaatgtacataattacaaacaaaattaatcaaagacaataagacatagcaaaagcatgttgagtcaaactaaaaccaaaatgaacagtgcacccaataaattaaaggaagatttgaaataataatttttaaccaacctagctgaagcattatcagaccgtcgtctcctgtcagcattgccttcactttcttcctgtaaactatgcttgaagttgcaatctggacctctttcacatttacccttattaataaagtcaaaacaaacacccctcataaattgctcccttgcagccatatcatgttgaaagtgacaattttcctctcgtggacaagtgccagaggatacaaatttaaaacacatcttatcaccacttccagcaccatgtttctgccgttttgtggagacatcatatctccagtattgtgagtcagtgacactatcactagatctcttggaagcttcatttccatcaaccatcagtggtgtagagtaaggagatatggttgtgtttgttgacttcatactaatctcagaagcagacataattgatgcaggagttggagaaattgcatgaataaatttctgaggcagatgtaaaactgaaagttatgaaatgtcaaaggccaaagctaagagcagtgtaataatctttattataagagggagtttatgtacaacatttaacaaatgaaaacacctgcttatccttatttccaacagcagaaaggccaatgaagcgggtcacatgcacagcatcaacattcgagtaaggttcccgagcatagaacacacccttggtacctgcaatatgataactaccacagacaacaaacttcaatcagaagaataacaacctataatccatacagaccttatatgctaagatttggttagaatatacaggcttgaaagcagccagcataaggtaaactcactacagcatacaatgccattgtcaatttgcattatgaaatataggttgactaggatcactcatcatatattattttcaagcagtgaaaatctccgaaatcacataccgcggcttgatttcagatactaactctgcaactgttgagtcactaccagtagattctgagatttcagcaggaatgtcagatgctgacgcgctatttgtaaccccagttggccattcattagtgatgattaattaaggaggactctataaagacatcaaggttgaagacacaaaaaaaaaatataagtgaacgtgaatttaaaaagaaacaaaaagacaatctatactcctaaaaaaattaaaaggatatgtaaggaatatatcaacaattccaggatcctcagcaattgcgcgcaatgcatcaacatcatcctgactgtatgtcccaaattgttgaccactcgaagaatgcctaccagacaagtaggccacacataatcctatataaaagttcagtaattcagccaaacaaaacttagcaagttcctgggaaaacaaaactacaaataccaatgtcaagtatggtcattactcattagcatatcaataaacaattcaagtcgttgtgtcaaatttgtgtctatgttatgcaagttgacatctctattttttttttcttttgaaaaaggttgacatccctaattgatcaacactaactcaatctgtcatgatcaaaatgattagtatcaaaaatttgaatttatatgtatttttaattatatcaattttatttgactcatttgaataatacactaaataaaaatatattaagttacaaataaataatttatcataaattattataatgaacaatgttcttaatatcaagtgtaaataagctatcctaactttagatttaactgttttatgaaataaataataatataactctaattaataattttaatgatatatagaacataaacagatcaattcgaatcaattttgtgtcacataagttgactctaacctaactcaaataattatagtgtattaccacccaatttcaaattgcttctattttttattatcctaattcctaacccgcaatatttagtattgagtttgagcttgtatcttgacctgaattgccaccctaagcctaagtgtattagccacaactcaaaacaacttctgcctctacaaaggtgtttctaacatgcctactttacactacacacatctcaacctcataactcgcgcagggagtaaaaacttgttgccaatgaaatgggtattcgtaaacagtaaaatagaatttaaaactacttgaaacaacattagtaagcacccattttctcagtaaccaaacaagcaacaagtaataaagcatataccttggagagtgaactttccactgcctttcaaccaatagagattcttacaaactttcaggccgtccatcttgaatccttggttcccggactcctttgaagcggctaacaggactttaggggcaccaacgccataatcgccgatgaagtaagtgggaataggtatttcggaacggccttcaacgtatcccgtgaactcttcgagcctctccggcgagtctgggaagaactgtcccacgcatagtaaggcgtcgaatggacccgccgatttattgacctgccccaagttgagtcgttgagatcacaagaacctaaaatggaagcagaacatcctagagaaacaaaaagagagagagagataccgcagcgaatcgtttgaagagctggttaaggcggccgaagacgtctccacatagtagaattcgcggaggtgccatgagagggaaagagtcgagctcgacgcttgaagttgaagatggaacggaagctagctatggccagagcatggctctgttcagacttgagcccggtcggtatgggcctggcccaattctttatttttgagtctaataaagatggattagaagcccaatactgcccagtggtcattcataacactgttggagtatataaacgaaaagaaaagaaaattttttttttttcaaaatctctcaatattttttcactgaaggacggatttttttttaaaaaaaatactgtgttgttctttaaaaatactatgtaagttttatactgtgtattgtgttaagttttcacagttattccaagactattttttagttgttctactgttgtttaaattgttctattttgttattttactgttattttataaaaagataataaacttttgtccaaaattcaatatttttcgtaaaaagcctaatattttttcacatcattgttaattttaataattattttaatttaatttttaaatattttaaattaatgtataattttttttaataacatttcatataatatttttatcttcatatttaaaacatattttatttttattttatatgtattttttaagaatatcaaaaaaaaaaaaaaatagcataaattaaaaaatatatattttatgtaaaaaaaactatattaaaatagagagcttttataattttttaagtaaaactcccttcaaaacatgcaatactcaatattaaattatacgtttaagaaaattagatatcatttggtaacactttcgccttttaaatttttaatcacaaaataaaagtaaaatttttgttttttagaaaaacaaaaaa

SEQ ID NO: 185729 - DNA, 1924 bp, Cannabis indica
acatgggttgtgagagactttgagccacaccacaatcacaacttagtgttgcccatagaaaaccaattcctaagatccaacaggaaggtaaccacagaaattggtgagcaagttatgtctacgagaagatccgggatacgaacttgtcacatactaaatcatttggcacaagaaagaggtggtcaggattatgtccctttccaaagtagagacctttataattggattggtgataaggcaaaatcgactgaaacagaaaccgactctgagggagcattaggatatttggaatgtcttgcaagaaaggatgaccaattctatggaatctacagcatagacgaccagacaaggctagcaaatcttttttggtgtgatggaatttcaaggcgagattaccaaactttcgtagatgttttggcttttgacacgacttacaagacaaatgcttacaagaagccattattgatccttgttggtgtgaaccaccactttcgaacaacggtctttggacttgctttactatgtgacgagagtgcctcaacttttatatgggttctacagtgcttccttgatgcgatgtataacaaaccaccttcagtagttatcacagatggtgacaaggcaatgcgagaagccattaatgttgtaatgccaaatgcggtacaccggttgtgtgcttggcacatatcaagcaatgcctcaaaagcagtcccaaatccctctttcaaaacagccatgaatcacctcttgtatcattactattttcaggaagaagagtgggaacaggagtggaaatcagttatggagaaattcggtctgcaaacaaatggttggtgtcaggctcagtatgaaacaaagagaaattgggcagaaacttttcttcgcggtcattttatggctggatcaaggacaactcaaagatcagagtcaactaattcatatttgaaccaattcttgtcaactaaactcaagctaagagactttattggtcaaattgataatgcattacaaaagatacgacacaatgagcttgaagatgacttcaaaagcaaccactcatcaccccatattccacgggacgtgttgagtgtgtaccatgaacaatttgcaacgtactacacaaggaatatgtacgataaggtggcggagcaaataaaagacagtctattttacaaagcaaaggaaattgatagaaccactgactctcgagaattttatttggaaagatttcctactggtttggtacgtcactcggtgaccttgaatgaaataaacaaccacatgaagtgcacttgtttgcttttcgagacagatgggatagcgtgtaggcacttgttcgctgtcatgaaaaatgaaaatattcaactaattcctccgtcactaataaaggaccgttggagaaaggatgcaaagacaagaataaatctaaatgtcactccccatttaagggtgcccacagatgtattgcaaaccacaagatggggaactttgacgtccgcattcaattgtatggcccaatatgcaacaaaacacgaggacacttacgaggatgcgaaaaaagaaataatagcattgacatccaaattcaaaaatttgtgtcaacaacgtcaaattattattaatgatgatgaaataactaccacaagaggggaatacatacaacggagaattgtacaagacccagttatagttaagacaaaaggtcgtgaggcaaaaaaaggcaaagcaaaagaaaatgacaacactattgaagaagatttttcgaggaagcaaaaaaggtgtcgcctttgcaatcaattgggccacaacaggtcaacttgttcatacaaagaagaccctttgaaaaacacagaagatacatcccttcatgtttagcgagccccaaccaatcgatactaacaacttttacaacaataaggttgat

SEQ ID NO: 185730 - DNA, 2321 bp, Cannabis indica
gagagagagagagattaactttggtaaagccgaggtcaaaagaaggaaagtgaactaggttctctgttctctgagtttcagtccaaaagtgaaaaattaaaagagctctttcttatctcttattagcaaaccaatgaaaagcaattgttcaaagatgccaataagaggataacagaatttgaaacaattttttttcttcttcttcaagtttgagtaataaattttgtaactttttcttttcatgaatgacaaatctcataatacagtcttttgacagtgtagagaataatagaagtctgattaagttacattacagttaagccatcactttcactctctctgtttcctatacatatcttcaagtatttctaaacctacaatatggtttgtattactctaactcacaatatggcacaactatgtatgtcaaagataaacaaaaggaaaaacaaaaacactcaaaaagaatataaaaaattaaaccagaaaataaaagaaaccaaagtcatatgactggtggaggtggagtttcccatatatcaaacacattttcttcactgtggagagcaaagagacgatccccaccaatggaaaaatcacaaattgaaccaccatagctatttctaagcctagaagttaaaacccaatcaggaccacaaaacactgagatacaatcatccatggaagagaagagttgaccttcatgtaaagcaagttttggataacaaggctcatcaggcattttccccttcattagcctacttcttgagctccacctaataccgccacccgaaattcgaagatcaatgaaacccaattcttcatactcattcacaacacaaactgagttactctcctccatagcaatggcatctctaactcgcctttcgtctatagttaaaggcgcgccgatatcagaccaattccaaaccattctcttcttttctctgaaatcaagcaagctaatgtaacagttatcttttctagggaacaaagttgctacaagcaaacaattagtaccatttaaccattggagtttgtcagcctcaccaagtgaccaaccaggtggttcatagtaaaaatcaacttgttttccactcacttgatcccaaacaccaattccatactcattgcttctacctttacagcttgagtaaatcttgtaatcagagctaaaactcaatggcccagctgtgaaactcttggtctgttcctcatgtctgacctgaaatttgtacctaagctcaccactagaagagctaaacaagcccattccgccatcgcctcggctcggcctctcgcacacactcacaaccacattctctgaatcgacccaaccgacgtcgtttactctctggtaatctagattgattggagggtgttcttccatcatccaatcatagacgtgaaccatactaccgtgagcaacgcagcagccgccatctgggcctgcccgaatggcggttccgtcgccgggagcttggccctttactgaacgggaaaggcctaatctgttgccgtcgaattgaccccatttcgctaaacgaacatggtctaatagaccgtagtacaaggcttctctgtagagaagcttttctgggatgtttgaagggagataaagctcttgtgttcggagaagatcgaggagtacagagaagcaatcggggtttcgatcaagaaagtactcgccgccgccgccggagttaatggattgttgttgaaggttccaattttcgtcgaacatggctccgaacatggaattacgacccgcgttggctaacgttgtggctgttgtttcgaagattcttcctcccacgttgaatctaactctgtctctttgaattcccatggtcgaaaattttcccggaaaatgaaactattttcccggaaaaaaataatttaaactccaatatcgataaaccggaattgggaattgagaaactcgtttatataccagaaactgtaatggaaaacgaagatttgtgtatcaagaagttacatgaatgagcattttaaggttaccttgttaataaacagaggaaaaagaaaaggaaaaacagaggagttttgattgatcaatatgaagaatttgatcgagttctgagaaaaatgaagatctgggtattggagaggagaggctaatggagatgggtttttaaattgtgggattggtgaagagaatttggagcggttggacttcaaaaaattaaaaatacaatcttttttaacttcttcttcttgctgtttctctctcttaactctctctcctctctttactttgctctcttctccatgtttttctctctcttcatttctttacc

SEQ ID NO: 185731 - DNA, 4367 bp, Cannabis indica
gtgactaattgtgttttttttttagtttgagaggtgaagtttggggttgggctttgttctatgctggaattacaggtgtggcttttgggtctgcttattatcatttgaagccttgtgatgatagagtcatttgggatactttaccggttagtaataattaatcatatcacattttgttgttgttgttgttgtttcattcaatttttgctgatcaaagtttgaatatcggaagtaactgtgtaattatactatattgacattgtaattacactcaattttattttggggcaagagaattggagagtgtaattggaacttcttaattacatcgttgcagtgtaattatatggtgagacaaacatgttaaattgtctaattatctctaatgacactctaatccattcacatatcgtgactttggatgaaacaattcaagaaaaatgtatgatctttttgcttgtgatatatactcggtccattaataaggtgaaggcaattctaccttaacgggtcggttttgttaggctgaattaggccttataaacttctcttttaaattgtcttttcaaaaatctctttaggaatccattgtactgtaaatctctaagtaacaaaggtgatcaaagaacctcaacaacgaaatcaaaacagagttaatatgaacacaaatcaaacacttagattatgtttagaagttggattttggtggggaaaggaatagaaagataagaaaatgaatgccgagtgtctatcatcaaacctacaataattgggcatactattgttatttggccatttatataacagatcgtttggaaggcataaggagaatcactgagtctaaatttccggttaggccataaaaaaatcttgttcgatatgaagtttttttgttgaatcaagtttcttgttttcctgcgttttccttacctttaagggatcaatgtgatctctactccagtttcggaacactatctttgtatctttattaattgagcattaatacaagtacacaacattcgagagttggatcttctctcgaaaatctctgaagtgttcctctctttcttacacactcacccgagcttacacattcatctacatatgcagttcaatacaaaacccttttgaaccccaaaacccttttgaagaaggttatttataagctgtgtattttagcaccgagaagtaacacagttaagttagttaactgttatgaaaataacagatataactaacaaggttagttaggatttattaggaactaacacaatgttgccctgttgttttatgtttttttttttttgctttcttgctttgatgtttgtatagaaatcgttgtaataagttgggaaaacgcagatgatgatggcatattcctcacttttttctacttgcctaatagaaagagtgggtgaaaagatcggcttgacttttctgtttgctctcattctcgctgctttcctaagtaccgctcatgaaaggttagtttttttactatgttcgaatgcctctcttatattcttgtgttgtttttacgatatattgttaatatggtttggtagttggttgcagattgtataatgatcttaggttgtgcatgatgttccagttgattccgtctatagcaattccagctatggcatttgtgtatagaccgaaatatactcattcaagatattggttttgggcaacaggtacatccatctttttatttagtcttgtcaagatattcattagattatttcttacaactgatttattttggtcaaccgaatttttcatgtgagttataacatcggggtttttcgttggcattttcatttgaattggtttccactgactggttaagtgagaaggatattcggaagagcatgattcgaatcctttacttttattccttccgggctaaagatatctgtattcgggtagcttaaatggtcatgtggtttagttgttacaagtcttttcttggcatctacatagcattcatctgtttttgcatagctcaattttgcatctaggcttactaaaaagctatagtgtgcgagtcgtgtttaggtggggatgaaggggagcctagtttctgataagaaccgagaactctaaattcaagaacacatttaaaccgtaggaatcgtatattgaatgtatgagaaaagctagttacaaatgatgggagacctttaggctcctttgatgcaaagagttttactcagtacatatagtatctcatatatactattgtatttcctccgaacacaactcttaatacaataatgacctaaataggcgggttaggtttgtgcttagggtccacctaatccaggctcttaagagtatagtagtgtggcggaaatgaggtttagaaagtaagatgaaggtgagtgtatggtaacatgtacggggttttatctcgaaactaattggcaatgagaaaagtaactcatgcatcctaagtgtccgtacattattaatatgggactctctaccgagctcattatgttcattccatggctgcatgcaggtgtttaccttttctcgaaattcgaagccatagcagacaagaaaatatacaattccaatcattatttcatcagtggacactcgttggagcatttgtgttcagcaatggttcctgttctgatgagtgttatgctcatatacagaaccaaaaaatgtcaaaggtataatcaatcaatctatatccttctgcattattttcttctaacttcaatctctctttccaattctcatacatgaaattcgatcgatcttgtagactaggcgaaataaaggagcgcccttgaagtaggttttcgtaatctaaaaccttttcgatcgagttttgtatagtcattacactacaaaacttacctcaaatttctcgatttggctatgtggggtttgatctttttagcttccatttcgaagaacattcattctttttcttcacaacaggcggcagcaatgattgctcggtaactgaaatgatgtaggaaagtagaaaagtagatagtgttttttaggcatttttgttgagatatgatgaaattcatcaatgtaaagatcttttgtaaaactcaattcaattcaactttttgtccctttttcaaatgtagtgatgtgaaagtttcatatcatggtctcacatgcacgctttggtttttaggattaagtttattatatgattgtatatttatatatatacaggtgcacatgcatgtgatgtgaatatgacagcaaaagatgcatacatgtatatatgataaaagcattgttattaggcaccaatagtgtttagcacattctataagtagtgtttcacgattagttagtgatattctctaaggatttgtttggttagtcgtattaggccgtattgtattatattaaattaaattatatatcatatttttatataattatgttaaactttaatttatactaaaatattatatatctaggtgtccataaaagttaatacaacatataattttatataaatatattgtatgaaatacaatttaatttaatactataaaatacaatacggtataatacggcgtaccaaacgaattctaaaagttattttttttaagttatatgagactcgatacttaataatatgtttagtaataagtaatgaaaatcaatgataatgaagttatttccttatatttattaaatttaagaaagggataacttgattaaataaggaagaaaaaaaaaagaattttttactaccaatttttttaaaagaagtcattaagggtaagattatttttatttttattttattttttaatattaaatttgtagtgataattttattttttaaaatatgtcttacaaaataactactttataatatagtttaaccgaaaagagtaatttagtcaatttaagtattctgattattttttctgataaaataaacaaaataaatcactatcattctatttttaaaaaacagtatattacaaatattaattctaataattcttcatttattctattacatttctccattagtttattctaattttgaatactgtgtaataaacgtgctattataagggtatgatactgaggaaagtgctaggcagtattgtctcttaacaattctcaatgtgagacattaaaagacaattattaatttcaaagcaaaatgagaaagtgcacgtggattggttttttcctattgttttggtgttattcttcttcaaattgcatttgtttgtgtcaaattaattgaattttatggcaaaaaacttgggtctttaatgtctatatgtatatgcattctaagtagggataattacatgaataccattttttgtaacaaaattacatttttacgttta

SEQ ID NO: 185732 - DNA, 3176 bp, Cannabis indica
cgattcataaaggagctgatactccacagaagaaatacataccatatataggataaaccaaatgatcaaaataaaaaataaatgaaaaaacaatcttatttttctgcataaactgacccgatcacataaacaagtaactattctttaaaatcttgatctttgatgaagacaaagatctatgaagcaataggaatctgaaaatgaaatcaccaatttaccaaaaccgaaatctttaatcacataagcagatcaataatctcatctcactaacaaattaatcaaaatcaaattctcaaccaatcgttcatgcaaagaatctaacaagataaagatccctaaaatcgaagatcacacaaaaacatagcgcaaatttccaacaattaattcaagatcacgaatttatgtacataaacagtacaaaccgaatcaaaatccaattaaataacaaaaattacgaagacaaaacaatgaaatcaaacccagtaagatgatcaacaagaaaaggggggaaaaactcacaggggggagaaaagcgatgtaagatcccgaaagagaaacagaaatgagaagtttgaatgaaatcgcggaaaaagcgataggtttaaattggggatttttgttgtttgattgaatttgatggattgtttttaaaggtgaaaaaagagagtgttacttagttgcatgacaacacggtcgttcgttcctttgattgggtttgcgatcctaactctactgcttaaggcgctgtttggttagtgggtcatattacctgtgtcacccaccagtatactaatttattttggaaaatttctatttatatattgaatttttatttttacatttatgatatcaatcccatattttttttacaattatttgaaaattaatataaatatatatattttttggtatattcatcaaatatacagtatattttgtggcagattgttttggtagatttttatttatttcgttttaaattatattgtattttattatataatattatgtcaacctttaatttatattgaaatattatatatttaggtacctataaaagttaataccacttatatttatacataaaaatattacatgaaatacaattaaatataatataatgcggtgtaatatattagttttaccaaacataccctgaaaagttttttagtttattagcttaaacttgtaaatttttttaaaattctaagtaattactgtgctcaaaataaatttaaataattactgtcttatcttaattcttctgaaaattctaacacgcaatggagcttgatctacaatcaaattgcttctagagtcctcgatccatacaacctcaattctgatttacactattgaaagtatggaacgatttgagaattggcaaagttattttgtcgtgtctttgactctttaaagtttaacttaattattaattcattatttctaatttacacatatatttttttataattataccatattcttatgtgagatatctgctaattgattgtaagtttaaatattataatgctaacatgtaataaatatacagtggaaaattgtatgataaaaaaaatccatgttaaaatccaccaaaaatatttgtacatgttagatgactatattttttaatataatacttctcttgaaaatcgcacatgtagtacataattaatttaatgtgttttacttggtaacttggtgtaatttaggctaaactaatagcctgaacaaaaccataatccatttctctgttattaacctcaaaatagtataattttcctatgatctaatctgaaaagataataaatgatatgatacagaacattctacatcacagatgagagttcaatctgtaagatcacatgaactggaacaagaaacctaacataaaaaaacactaattacaagtatcagaaaagtgatggtacaattacaaagaatgaacagagtagaggtttatgaacacacagaaagatttatgaatagtcatttggggggccatatcttaaaggcaaaacctcttgagactttggtttaaactttgaacaattgcagcagcttcaaactctatctatgatcaaagctgttggctaataatatacactgaagaaacaatccatcatcttcaatctatctcaattcaattctcaacctcccaaagcgcgctttagtcctgctcgttgctcaggagtcagccttgttggaaacttaatctcaaacttgaccctcaaatcacctctgttaccaggctcttttgcaattggcataccttccttggagacaactagctcatagccagggctcacaacatctgacactggtattgataggctgcgatgatcgagtgtggtgagatttagagtagttccacccaatgcttcggctagtgacactttttggtttacaatgaggtcattgccatctctgctgtataactcgtggggtttctcatcaattacaaacacaaggtctgctggaagttggtttggctgttcattacctttatctgggaaagtaatcttggttcctttcttccatcctggcttcacatctatggtcaatatttccgactcgggtatttgccgcctgaaaaatcggatttgagttaagaatcaatgttcgaaaatcttgtctaataagcaaaaactatcttacttcatccatagtcaaagaagctaaaccagatgattctaaagccctggttggctaatcttttaaaaactgcttttgggcttctgaagctctaaaacacttcctctgcttgattgggtaatagtaagtttcaacttttagctttcaaaactcttttaacagaagccagctttaggcctgtttgactggacttcttcttctgattttagcttttcaaagagttcttcatgagaaagctactaaagcttgtttctgttaaaagagttttttagagccgaaagctgaaactcacacattactcaaacaatagcagaaatgcttttggaactttggaagcccaaaaatagttttaaaaaccccagccaaccagggactaatagctttctggaagagcttcctaagaagctaaaaacagaagcagaagcctagccaaatgactaatgtttttctatatgacacttagctagatatgatattcaaagatttttatcaggcggcaaatacccgagtcggaaata

SEQ ID NO: 185733 - DNA, 6075 bp, Cannabis indica
attaaatatatatttttttataatcagtaataaataatgagttggatttaattaaactttatgcccatcttttcagctcgtattaaatctcctcttcttttaatacgaggaaaagagttactaccctcttcatccatcacactcccctcattcatccttctagttctcctttcttcctaccaaacataaccttaatgtgcatcatttagcaacatcatctcaggcaaggttttcaaaagtggttgacgtggcacaccttgagaagaagcagttgaaaaagcttgtgggcttaagctttcatatgcttgagagacttgacgttcactctctttggccttttggaccttaattaattaggccttttcatttcaattgcttttagaatttaggacagtgtttgaaagtatttttaatagtattagatctttaaattatctcaaaaatagttaaattaggccaaaaatgaaataaataatggatcacttcttgaaaaataacaagcttacagccacatcagatgtgtaaatcataagacacttcctccttattcgtcttcttcgttttacttatttttctttttagtcccaaattttttaatagtgaaatcatcagatctgtcgaaacaccaattgacccctactagacaactggatatccaaaaatagccagcatatagattaagaaaagactcaattttggaagaaatgaaaagtacctttcttgctgcaagttttgattgatgttcacttttggccccagtacacacctatactatacaacaccacaacaaataagcaagcaagtaagatacatactaatatatattcatataatatatattagtatatactatactatataattatcaaataagcaagcaagtaaaatgaaatatatattcatataattaccaaatattggaagaagaaaaaataatataccaaatactggaaagaaaaaaaatatcttcaccatatggcctcatagatagatatgctttacgagaatagcgaaaagtagaaaaggaaaaaggaagcataacttgaaaagatgaagcaaaagtattgtcacaaaaacataatacgaagccaaatcaatttatttcaatttggatgacatattgactacaaagacggtttactcttctgaatcttaccatcttcccagatgcaaatatcaatgctgttgtttttggttctcttattctcataataactgcagcaaaacgctgcaaggaaacaacaaatcaaataaacaaagtgacaataagaaataaagtttcttctgataatgttgggacttaggaatagttgtactgaaccatgcatatcgtaactggtcaaacattaatagaaaaataacaccatgaaattgaagctctaaagcctcacgtaaatgagtctttcataatgcaaaaatgtgacttgaaatacaacaaagaaaattctcattcctagcaagctatatgttattaatgcagttgtatagcatgaaacaaataggtcgtagaaaaataaaagaaaaaggtaggtacaagaggcaaaagagaatatcacataccttaggattatattctgcatttctagcttggagagcaatggccttaagatccaacttgcaatccaaattaacagtggagacaatattcctgagaccacaaacaaatatgatgaaactaaaaacttactccaggttaatctcgaaaagtattcataattcaaaagataattcacccaccacagcacgaacaacaatctacctaattactgaaaaagtagagcagcaagcagtctatacagtaacatgcttcagcaaagttgcagcttaaagagctgatttttgtttccaagaatgcatatatagccaaatgaaagtaaatttttaccgattctatctcattatatcaattgcccaagtctataatagtaaattacaagaagaatgaaattcttagcattaattaggaattgatcaatactccacgaaaataagaataaaaaagcccataaatatcatcatccagttctagtagtagtacccctatctcattttcaacgacaattcatattgtatgcaagcagaagcatatctttctttcttttatacatagagaaagccattcatagatttaccttttattttggcagaatattcatagatttacaaatataaattaaaaaaaccattctcacatccatttcccacatttacaaaagtcgaatacaagaaagaacaatatttacacaatatccgcagcactaattgtagttggcttttcttaaaattacaatagcaaccgcgtatcaaatcgagtgaacatataattacataaaagagactcactgtagggtcggaactattcccgaagggtgcttctggagatcaaccggttggctcccttccaagacttgttccgacattgttaccttgatatcaaccggtctccttgatatcagtgtgattgacaactctaatcataccaacataatcgtgatacaaaagaattagcttcacctcaatcagaagtaaaagatacactcttcaaaatcagaaccaatataaaactcatctttagttatatataaaatttcaaagccctaaagaaaaacccatcaaaagtatgaaaaatattttgtattgtaatttaaattcagatcatgtattgtccagtacgtatttatttgtggcaatatatattaaaaaaaaaatcaacaattaattggataaaaaagaaatctagggtttcggtttcgtttgggttcagagattaggagatcggaaaagaaacagtaaggtatgaactttatggatttggttagagaagaagtgcgagtggatttgaaaacgggcaagtgagaaactacaaagaggaatgaaagattcaaaaattacgaagtgaaattgcaaagagagcaggaaccaccgtgaaagcgaggagcttgggtttagtgatatttgatttggggtctccacaagaagatttagatttaagacgaccgttgaatgaatctggttcgtgcttggcgctgtggcgattaacacaggaaggaatgagaaactcgggggatagagagagagagaaaaaaaacaaaggaaggaaaaagaattgggagcgtttaaaatagagggcttatattcacacccaggccttatataggctacccacccaccctctcatctaaattgatactattttatttatttattttatttataaccccctaacaccgcaccgcctttttttatacccaaaataccttttttatccttccccaaagttccagccaacttgttttccgcttcttctcttcttcctacttcctccttcctccttcctcctccctcctcagagaaaggaatcaccaatagcttcgactcagggtttctgaaacttgcttttgaatcgatttctaaggtttcgtttgcagggtttggttatatgtgatgtgagtcgaagccttttctaaggtttcaatcgcgaacatgggtatgactgaaatttcctattctctaaccatgagattatatatatatatatatatatatacatacagatatatacatagttattgggtcatttaatatataattgtttgtttagtttgcttctacatttgttgccattacttttttagaaattttagtatattgaattactattacaagatctcattgctttgaacgtatacagatagctgcaaacttgtagagccaccatgagtatagttcttgagttttattgttgataaggaaattttatattattgctttcagatggagctgaatcgagctttcatggggcttttcgtagtcctctttcggaacctgagattgcggatagggggcggaaattggaagcttctgaaaggtttgtttttgccctttgcatgggggatagagagataatgttatttgaatactaagttttgattcgtaactgcatttcaatgattcaatcctttcatttagtttgtatttttcttaaagtagcttcggtttcaatggtggtgtcaacttgttacaatcttactaagttttaagtactgagttttggatggtgttttatgcgagaaaatgtctagtagagtgagcacataagtaacgtactgcttaaggtcttgtttggaccttggatttttaagagggaataaaaatgaattccaaggattctttctcatgtttggattgaatcaataaattcagatttgttttttttaaaaaaataataataaaaagataaaacttgagtgtagtataatcctaacaaagtctcgtataaaatttatggaaaacattttcctttattttttcatcataaaggtagctctttggatttggaggatactagaactaacattatgtggtaatgcagctctgttgttgtgactaatgtggtctatttaatatgagagttgtaagatgcgtgggggtgttaaaattttctgtgttgcttggaactaaacatactttcatgtttattattattttatttttggtaattgatctttatagcggtttattttactgctatgtcagcaatttgttgggacttgctgatgtattgaatttcaataatgaagtgaatgaggtttccaagcctgaaactgaggtttgtgtcctgttggtttctgttgattgggatcttgctgttctttagtgatggagttgtttcagcatttaaggttttttttttgtttagactattggacaagcgtgtgatgatatgcagactcaaaaccaacgtctactacagcggactaagagagacgagtataaaatgaaggtgaatagattgacttttctattttcagttgtaattagagaataattagtgtattattgaagtaccaagaaagatgattgacatagaggggaatgccttttctatcaacagttatgttgaacggagttataatgtattacagcaatttactgagagatatgatatggaaattatttgacaagcatactctctgctcaatgttcaatttttattttttctctccattgctgcaccgccgaaacagaagaagaaagaataatgctaatataagtttttattattgtcggcagaaattgaaatctaaaatgggagctggaaacccaaatcaaagtgcgtcttccacgcagttaacggtatatatatatttcataagattgttttattttctctactgtaatatgactttttgtctttctactttggttttagtttcttactgagattgacaagcctggccattttcaaattagaataataaagtataaagatgcttatttttaaaaataaataaagaaagcaaagtaataaagatatttgcattatgatcttgcataattaatttatttatttgatgatgaacaattgggatttatgtttattgcatgaattgttttatcaattctcaggctcagagtgatggtttaggaaacgatgggcttatccctcagcttcttacgtctgtcccatccctaaacgatgctgcatcttatcttgcacaaacaacatcattcataactggatgttttaatgactattctggtcagcttttttctctagtgctgtatttcttatcatttgtttttgcgtctcatcttgccctgagtttggaagacttttctggatttttatattttttgtctgcaaaaactgaaacatatatgtgattgcgtattttatccattttgtacattactaacctggaatatccaaaaaaaaaaaaataattggttaaatatcctatgagtattagggctctgttaagattcaggttgtgtgtacatgtttgggagaggaggggtctaaactcaggtgtcccaaacatgaacacacacacctgggctctctttatctggcagtatttaataaaataaaggaacccttcaggccttcagtggtattttaacaaatggttttatttaaattaaggttaagacattggctaactgttgtctccctaagcttgttgatatatccaaatctgcaattttctggatttcatgacaacaccgcattacatcttatgcctgcataaagaccttatttgatctgatctatatttctttattagaatt

SEQ ID NO: 185734 - DNA, 3344 bp, Cannabis indica
gtatgtaagagaggaaaaatgaaggagaaatttggttctgtaaattttgcttgcgtatatttatcatgtaaacttcacacagtgcaatttcttctatactaatctagttagttatatttagagagtaagtatgattaggaaacaattctgaattcaaaagttatattaaatgtttacttttcagaaagttgtggtcacaaactctagcatctctcttaaaggtttcattcatgtttcagtcttttttcccttgtgaatcgctaggaagtttttttcccccttggatatgactaagacatgaattgaagaatttatcaattcaacaactacaggcattttttggttattagctctctaccctggttctgaatattctaatttactgaaaaaccaatacaggatggaatcatggcaacccatgatgaagaaactcgccgatttttcaagcactcatcagtgcaagtgctactatgtccccgcagtgctggaaaaagacacagctggttgaagcaaagggttagacttgacttgatgcttttcagtatctaattcttatactttttgtttcaagtgacaatggaaaatggaaattaatcttccattgtgctgcttgattattttttattttcaggaagttgagacaatttatacacaccatcagaaaaatgttattgttgatgctgatgctggcaataacagaagaaaaatcatggcttttgttggaggacttgatttgtgtgatggacggtatgatactccacatcacgctctatttaggacacttcaaactgtgcataaggacgattaccacaaccctacgtttacggtaaatgctagagcaaaattgaaacaaataaagaattttcaacaatgcttgtactaaaatctaactgtttattatgctgttatcattatcttgtaagttcttggtgatggtacttaactgtcattatgcttacaacataaatttttagaagtcaagaaatttgttttaattggtgactttgttgttataatcaaacctacactgactaattttactggctgattatcttaacagggtaatcttgctggttgtccaagagagccatggcatgacttgcattctcgaattgatggccctgctgcttatgatgttctgacaaactttgaagagcgatggttaaaggcttcaaagccacatgggatgtccaaattaaagagaaaacaatatgacgatgccttgcttagactagaaaggattccggacatcattgggttgtctgaagctacttgcagtagtgagaacgaccctgaagcttggcacgttcaggtagtatttacatttaactaacaataatttttccttaggctcaactggtaaatcaatgatataagtttgacggggtaatttctaagatgtaaatcttctaatgccagaaaatgtagatacaaagttctgcatattattgtcggcctatagtggagatttaaagatttcaatgtatcttatagctggattttgatgcagatattccgttcaatcgactcgaattcagttaaagaattccctaaggatccaaaagatgccacaagcaaggttgaataaaatttagtgataaaatcttctctttttgtataattatttggtgattctgtttatattactagattgtggtaattgaacttcttctttacagaacctggtgtgcgggaagaatgtgctaatcgacatgagtatacatacggcttacgtaaaggccattcgtgcagctcagcatttcatttatattgagaaccagtattttattggatcttcttacaactggagttcccacaaagatttaggtgagaaattgtctttttatacggagagaattagaattatttggaaatttcacttaattgatcttacagtgagtatataaaaaaaaaatgcatgtcttttgcagttgaataaatttgactaatgcagtagggagtgtatctttagattgggtccacaaagaaaatgagtaatgatatgtgcacacacaaacttgatacacttatgtagaaagtaatttcaaccactcgtttttatttaagatgaatcgccacataagtgtgtgtgtgatttatgtgtacacatgccattactctaaagaaaagaatctaaatgtctaattttgatatatgatctcttttggtgaaaaagagtttagtttcattaaaaaacaaaacaaaatcccaggcagatcccaatgtataatctacgttgaatattcaaattctggcaacattttctgggattgaggtggagatttaaaaaataaaaaagaagagaaccccccttttgtaatattaaaattaaacaatctgtgtacctcccaaatcaatagaaacttatttcatcatttttacagtttcacaattttaaatgtaaatgtatatattattgtagaacaagtgaaacattttgaatgaaggttttatcccttttcttcgattagtttggcataagttcatttgatttatcaattgttttagaggattgtctgttctctcatcttttgtagtgattcttgtattagataaaataaatgctttttttcaagtctaataaaataatatattaaatagatttatgctttatataacaaatctcctctatcttttgtatttattctcactataattttttaactgtgacacagtatatcacagattcttctccactctagttggatttggattatgctcattcaattctggtgcccttcccttgcaggtgctaataatctgattccaatggaaattgcccttaagattgcagataaaattagagccaatgagagatttgctgcatatattgttattccaatgtggccagagggcgttccaactggtgctgctacccaaaggattctcttttggcaggtatttagccaccctcttgtttttgaaactcatcagtcatcattaccagtttatctgtcttgataattctgagtcatttagtgtggctatgtctggaagcagttgtagaaactgattaatcaatttagttacacttaattttacttagattatttcaaagtagagatgtctcaaaaacttaggtgaaaggacatataatcaaaaagtctggttgacctgtattgtcatttcttattgtcctttaagaactgcttcctgataggtaaaggtaaatgatgagagcaattgtttcaggaaaaatgaacacgtttttctttaatagatttcccccatttatttcaagtgttatgaaatgatctgagctctaagcttagctcccattacagtggtggaaattggtcgtctagcaaattacagtgtcaagaatttggaaaacctttacctac

SEQ ID NO: 185735 - DNA, 3536 bp, Cannabis indica
ttcctagtgtcaccacagtccaaagtaagcattaggaaataaaaggattaaatgtggaaaaaaagattatataaacaaaaaattataggcaaagacaccatcaacaaatgatacttagctataccataaaaattccgatgacctaccatgaatttgggttgagatggttccttttctttttctttttatgcaatgggtgaaagcacctttagtcatatcaaaacattcatatcctatagctatcaagggtcaaaatcatggaatttcaatactacacagctcattaacattgtaacttcatatcaggcaaagttcaaaccagtcgccaccgcatggaacaaataaacacaatcaatttctttttgtaatcgatctcaatatactctgttgccgatggtttgataaagggatttcagctgagtgttccatttatctatagcagcatacttcttcatgccctttgatctgtgcattgtaataagttgccaataatgagtaatgatatgacacttataacaagcaatcgagataattgataatgtacagcaatgatccgaacacaaacctgtctccacgttctaatagccggttgacttgatcaatatgtccgtcgattcggttatccaaaatcagcgaaaccaatagctgctccacatccttctctggcacattgagttcctggaattcaacacaggtcaggtaagtaaaattattaagacaactgatgaccaaaatggtacattggtgtgaattttaaagatttataaattttaccacttgaagtacaagaaaatctctaccattaataaattactgtaggaatgagttgccataatttggaagatttaaatggaaagtacataatttaaactgaagtaactaaacacacaagaatgtgatcttagcaaaaactaacgtgtaccttcgaaataaaaggaattcgaattcttgtgtaaggcttgataagcttaagcagcacctgggtccgtacattcttcaaaagatcttcaatgtaatttcgaatgaatggatcatccattatcgtcctcctattactctaatgcaagcatcaatagaagattagtaacaggaataaggagatagatagacacaggtacagccaaacatgcaaaggaaagaaaaaaaaaggattaaacccattacattgtagcattgtgggtacagctataccttaagtattttctcaaattccaaaatctcatttctttgatatgctgctatcagatttgtcattgctagaatctcaggatcatttttatacctgtaccttactgattagaacaagagcaaacattcgcaaacacaatgaagaaaattgtcaggacttacggctttgcttcttgaccatcaaatggattaacctcggattccatcagcatgttagctagaactaaatatctgccacacaataaagaacattgtggagattaataaaagaacattgacctttgtgcctatacaaactgatccagcgaggataaatatttgttaaaaataaatttgttaatgcctaatccattttaagacaactataaacaaaagaaccattttatggaactatgacaagagttttatttcacatatcaacatacaaggataaggggaaatggagaaagagaaaagggagagaaagagattgtgaggtcatctgagaagtaggtagagtttaaaaagtagaaaagtgtaagggcaatgtgaacatacttcaagcattgaatgcgcctctggttgccagcttcatcataattcttaaacgcttcaaagaaatccgtggcagcatctgcccactgaccatctgccatatgcatcttacctccacactcacgaattattcccataattcttggatggggtattgctgactttatggcaagagctttctgatacaattgctgcattgaatgacaatgttagctttactgctcaactaagtgacagatgacactgaagtcatccagtgcacaaaaacaatagaagaccagaaattaattgcactgcaaactcggtcagtaaagcacaatgttctctcttaaaaaggttttcaacaaacaatctttataaaaatatcttaccttaagctttttgttattctttgtctcagtgtacatttgaatctcaatagcatatacctccagaagttgacttcctttcttttgatcatctgaaccatcttccttttgacaagatttatggagctccttcaagatctaaatatgttctacaagttattcccatatttccacattcttaattggaaaaatacaggactcacaatactagatatccaaataaactaccttactcattcgcccatattcccccatatcaaaccagatcttgcaaagcttaagatttgtcttgaaccaaagtctctgcagtacagcaaaacaggagttaaaacttgacgtaaaacaaaatgtggctatagagagagcggattaccacaagcctacctcattctttgcatcttcaagtgccttcagagtagtctggtaaaattctcgaagaaggctgaagttctggctagctgaaccagaaacaaagtccataatattgtttatacatttctcgctgtaatttcgagtcactgctgatttgatgtatgtcaacatcaccctatatgaatccatcatttctttgtaccttcccaaacggtaataaagcttgacagtttgctttagagctttaaagcccctagaaacatgcggcataaaaaataactcagccaatatttagaaaagcttgcttgggaattgttataagagcattgatgcagatcaatgcattgaattacttaaaatcataatcaagaacataaataaataaatttaaagtggaaattacaactgaaaaataaataaaactggaaacacctaacatctctaaagtctagtagcctagtctaatagtagaagtgatgagggtgtccagacattttttgctgaataatgtaatatagaaagtgcccagtggccataagtgtgtgtgtgtggaatgtttgtgtaaattataaggttttagttttaagtttcagttgtataaaccaaaaatatacatgtctgaaaacttgaagaatgcccaaaaccaaaatttggtaataaaagaccatgactgattaaataagcatgacagaatctgaacattgagacttaaatgattcaatgtaaatggatgcacgtgcaaagcaaagaagagactgaattcaattctgaaaaggtttagaagctcagctaaaatgtcattgtcaaaaatttatttcaatcgaattactcatgatttaactataagggcaatgaaaaagaaaacaaaaacataaaatgtgcaataaagacaaagttctgtttttggaattatgatgaaaaacaaacaaacaaataatctcttaacttcacagtaaaaagcaatggctgaatatgatgatgatgatgcaatacattacataattcctttaatgaccaactcactaaatcactgtccatgtgattattctgtatcactcaccactcggccttttc

SEQ ID NO: 185736 - DNA, 2427 bp, Cannabis indica
gttatgggagggtgtatgtgtggggtcttgggatcaagttccaggttgtgtaatgtaatgtatatataaacccttcaatcaagaaaaaaaaaaaaaaaataagaaatgcaagagtcttggcttcacagtgcaaaagagaagatagacaaattttagtttaacctgataattctctggtgttttatgtagatatgtctctagatcttagaagttattatgagactttggatacaagcttggactctctttacatgtaggtggcaagggacagaagtctttgtagtttagaacttaatgagccatgtatacatgtagtatttgttatcttatgtgtgaatgtttaacgaagatagcttggcacaacgtatctgtgcatgctttgccgttctgctttactctattagtggtgtgtctatttggtttgttctatggtatgttgcatagacttgttctcatttgttataattgcttactataaggaggctcaaattttaggactgaactcagaatcttgagcttagttagccctgacccgcttcaaaatgataagattatacattcactctcaaatttgttattaaagtactgttccttggctcgtgaatagtacatgtttgctgaaatctatgtgtatgttatttgtagttgaatctatacgtgcatggatttctgatttctgctaacttctatacttcattattataaataaatagaatcttacattgtgggaatggtttccaactataaatttcaagataattagatcttaatactttgggtttgcacgatgtctaaatttctacttgtttaaagtgtcaacttagtggcccttttaattgagagcacaataaaaagaacatcttcaagagtatagaggtgccatcttcctccatgaattgttttagatcaactttgttggaacaattatgaactggaataccatgtttctacttaatctgaagcacttcaataccacttgcaggttgttttcactccaataagaatttgttttaaaatagttatagagagatgttaaggggtgttactgcaaagggtctgtgtcattgtcaaattgaaaaggcttcttattctatgccctaaaaaatcgatgccatcttggttgacaaaaatggtcattggttgcggtttgcctagttctgatgtaggataaatttttgttagtgagagtgtcatcagatatttttttcaccaaattataatattgcttggttagaggtcttcaacggcttgtatttttatttttcggtcagttgttcagtcattacttagaatagatgttatactgttttatgtgtcacaagcagatttcagcttgatgggtaaaacaaagcaaaggcagcttgtggcagtccctacaaagctaaacaacacctcaaggaagctcattgatacttcaaatcccaatcctgatcctgatcttcattcagaaactagttgggtcattgtaaagaaacagaggatcaccatcctggttccttcacttcctgttgctgatagatctccacagctaaaccttgaagcaagtcagtcacaggctgtgcctatgaaaagggtagataatggtctagagcagccaactgagtggtggaagaggtccatgccaactgtttctgaaaagggtatccaagttaagaaagcttctggtgctcaaaactttacaacatcaaccaaaccatataggcaagaccgaagagtggaatcagtaaacccacaccaagttcatacatccatgtctcacagattacttggaatatctaacacctcaagaaatatcatggcgccaagactattactccatggccatggcagttctcatgctggtggcacacccttgcatcaaaaattgagggcactgaatctcgagaggaagcttcagaaagctggtgggttgagcaggtggcttgcctctctgggtctggaacagtttgtgaggatctttcagaggaagggtcttagtaagtttcacttggtgaacctaaccatgaagaagctcaaggatatgggtgcaaatgctgtggggcctaggagaaaacttatgcatgcaatcgattgcatttgccagccttactgttttgagaccttgtaaagtgtttatttttcccctaggatttagaagctatgttcaactttgaaccatttgtataaacaaacgaacttttgttataggttttcattgtacatactagttcagtggtatgttattttatttatattactcgttcacacagaaagtatatctcactaccaaaagagaaaagaaatgatgactatttgtgcctttccatcttctatctaccatggctttatgcacgtttttatgagacacgtgtatgaattttggagataaacaatctaaagttaacatgccaccaaatatgagtttgcttgctaatccaataaaggaaa

SEQ ID NO: 185737 - DNA, 3202 bp, Cannabis indica
tggaagagctaacaacattaacaatctgtatttttagaaaaaatctacaattccaattattacaaaaaaaatccaaattaaattaaaaccaaacacaaagtttgggactttggtagctgcacacacatcacaaaaataaaactatttaactgaataaatagtgagcttcaagtccagatcaactaaaattataatgaagacttgaaagagcaacattttgcagtgtgtgcttaactatattaatgtttctaggataaatattatatttatcaatttctgtagaatgtacactgtagtacgtagataaccataagtatatatttagtattgaatttgtaattgtattgttgtgttaaactagttaaaatgtttagtctcacacacttgtgaaaagaaaaggtaggacatacattcaggtttgtttgagtccatgcatatgtacattaaaaaaattaatttatttacttcttttttattattattaataataatacaataccttcaataatgttaatcatataaaaatattatatatattccaaggtgagtggatattgttgttttttaaatttattctgcttaacgcatcgcatcgcacgatagcgctacgtctaaaaaatgtacttaacttacattgtagagaaaatgaacaccaattgcaaattatgattgtttttttggaattattcatatttggaaaatagcaaattatatactagttttatgatgattattaattgttcaatttttcaatttattgagtaattagtttcataatttgtgaagtaaaattatgtttattacactattttttttccacccaagctttttcaatagtagagaacaacaaaggatgcataattttttttcttcttcttcaagtaaaacccctttccgattcatggatttttataatatattggattgaatattgcttttgggaacctaaatgatacacctggaaaaaggttgggaatcagaggtgctatttgttcattttcaaatggtttagattctaagtacaaacataagaaattgcttagtttggattttgccaactgcaagcttcttgaaaattaatgttgatgttgtacttgaaaaaggggaaaaggttttgcggccttggtgcagggtcgcgcgcatgatcatcgaagaggagtcgtcgttgcttaccaaaatgatagcgttctaagatctttaaaatgtgttaataactgagctccttgctattaagttgggcattggttgctccaactttgagattgaaattgatgtgttatgattgatttaatataatataaggttgttttgtacacaaatttgtgcaaaatatttaacgttggtgatgcgaaatttaactttttattatagaaatttaaaaattatttttttgggcttaaattagtataatgagatatcgaagtatacctaaaaggtttggaaataagttataggtgtttaaagccacttttaaacaaattaaacaggttttggagcaacacgtcactcataaaagacgatgcattgtacgcgccataaggtcgtacttatctatagcaagcaacatgtcacttagcttgttccataccataatttgtttcagtatccaaaataatcacccatacgataatacctatacctatatatttataagaaatgtaggaacacctattttgtaatcatagcatagagacattttttttattttttaaccattataaatatgacttttgaatttacccttcatctagatctaatatacacttgtatgtaaacaataaataatttataaaaaaaagttctgacaagtaaataaaaccacttaagataccctaaatcttttatatctctctattatttgatccctaaagccattaaaactctttaaaaaaaaacaaattcttttttccaattgcatttcatagaacaaattattgaagttgtcccttgcactactcattctttcatatacattttctcatatcaattcaaccctttttttcctctcattatccgaaaattggactgaaaaggaaagttcttgtatgtagtgatatggttatttactattgtccacctcaagtttagactctagttcactttgtgaattgtttatattcaatgatttggttttagtatcaataaacgtggaaagagcattttttctctaataattaatttatgactatttagtataatgaaatgtcatttacttgatttgttttatacagttccagtaaattcaactttatacatgcatatggataaattgaagactttatttggtgtgaactgataaagaatttataggtacaagaaattcaacacagctaaaaactcacctcattatttattagtggtggaatgtcaacaaataaatttaacactcagtacttggtagacaacaaaataagtatatatatatatatatatatatatatatatatcttaacttcaaaaagagaagaaaatatgaaccaatatcaagccagatgatttaatagtttatacatttaaatatgaaccaatatcttaactctagttctgaatgattctccatatctccttctacattaccatctcccataatagggtttgttgtcatattcagttcgccctgcagaggctcagtttgttgttccatctcctttagcttgttgtcctctattacattcacatccctttttcttggatatgaataagttattggacacctttatcgaagatgaataagcactaaaatttggtgttgtagagtaaaatttaggccaccaaatttacttactgcaatcaattatgcagatccaactaaccccaataactagtctgatcattgtaatggtccctaaactcccaaagtaactagaagccttccaaagaggaaaaatgattctctgagtgagatgttggaataccaacttgactaagtgttagtctaaccattttcttttgttattgagttgtgtaacttagaagccttccatggagtccaagaaaaagggatgtgaatgtaacaataacaaaccctattatgggagatggtaatgtagatattttgtagaaacccaactgattgggaagattcatatttcaagacactttagcaaaatcttatgccctttatgtcatatttttgaaaaagaaaatacttttgtctttgaaaataattgacatgttctctttgaaaaattaaaatcccttt

SEQ ID NO: 185738 - DNA, 1973 bp, Cannabis indica
tgggtggtgacatgcctaatgctacttctggtggcgctgctggtgctgggccgaagattgaagaggttgattaaacatgttttgaagattattgaagttctatcttgactttctgctgtctgtttttaagatgaatttggtgtttttgtgtctttttgtttgaaaactatataatgtacaagtttttatctttgttttcttagatcaacgatgtaataattttttcgaaagtttgtttgtcttgattatcaattgaaggcaaatcattgttggcaattagttcatttcgaagaaacaaaattaaagcattatttttgagaattggaagcaaagtaagaaactcaattatcttatgacactatggaaaactcatatataaatcaacgattatttagcttatgaagattacaacagaaacagtacacacaaaattataaatggttgtgaaaattttgaatattgaaatccatgttctgaatttttttaggaattttctttttctctttctttctagtcaatggtatatttctatatcgaaaaaaaataaataaaaaaatcagtgatataatactcattttatattttacattaaagattaattagtaatatcaatcatcttaaataagagacaattaataaccaaaaatagtttggcatcttttccctttgagaatgagactggcccaaagtctttatgtatatatggttatggatatgggcaatactctatgctaattgattgatcttagggacataaaagggaactttcaatttaattagcaactaatctatgtacatttaccttaacgacaacactcattcgtattttatagcctttctcatcatctaaagcattcatgttactcttgtactatacagtaaaattggacatgaacaaatatgagaaatttacaaaaatactgtaatttgtattaacttttacaaaaataactgtcacacgcgaaatctttcaaaaatactgtatttttataaaacaccagtaaaatacaaaacagaacaactcaaaacaacagtagaataccagtgacaacttaacacagtatactgcagtatgaaacttattaaaaaatacagtaaaaaagtaaaaaatacagcctgacattatttttgtaaaaaaatgacaaaagatagtataccatgtaaatttcccaaaaaatatcatgaaaaagtagcggtttaatttaaagaaaacaattagtccaacaagtgacaagtccaagtaattagaggaaattagactctataccctttttatattgacttcttttatttttaccttttcttattaaagcctatcatttttacctctttttttaaacactttactaattttacccctgtcacctcaatatactatccatgtgactcctttatgtcagggtattttaggtacaaatacatataaaaagaaatatgtttcaattaattataaaattagaggtagatttaattaattgataaataaaaaaagtattttcaatataccccaagtaattattcaccaaacaatactagtgctactcaaaatttgaataaccaagtaattatcataactgtttactttttaataataataataataataataataataataataataataaagtatttaactaacttgatagatcatcactttgtctttctttcgaataatttgattgtagattaatttatgagttatgtattattatgcatgttccctttaaaatagtctacgttgtatctataacttatgtatattgttgtgacttatatttatgatgaatcatagcaatactcaaaataaaacaaggaagacagtaaagtggagaagatgaactcaactgatcactaaataatgcaattcttttaattattaattaacaaacttaattataatcatatatacacttgcacaggtaattaattaacttcaaaaattaagattgattaaggtgatatagtaatta

SEQ ID NO: 185739 - DNA, 6229 bp, Cannabis indica
aatctgaagccgttacatggacctgtatcaacgtgaaaaccagtcacttactaagataaaagtagttaaatttaagcgaagacatttatggaaatcgttttcacttgtcatgatgtgcatacctgagcaatcttcaccgttgttatgcattcaactattttaggcgacactgactgatacacctgaacaggaaaaccaaattcaattgatccaaacaagcagtaacacatatacaggtatggatggataatttgggctcatattaccttttggacaaagattgctaccccagcatctatggagggttccttggagtcatccaaaatcttctggagctttgagcagagttcttttattgacgaaaaggctgatattttaactagaaaaacagtgaaaatgcatgagataagcaacaaaacaaatcaaattcatcaatgataacagtatattatacataaagctcttgcaacttggttaagagcaaataggaaaagaaaggttacctgtccaaggaagcccaggtgaaagggacataatcagcaagtgaagtaagttatcctgttgctcaagaatatcagttaattgtgctacatgaatgcaagatgtcacacattccaattgtttgtcattcggaaatgaaatctcatcggcatcgtctttttctgtccacaaagcaaagatagatttgtaagctcaaatgagatagaaattggtgttatatttgaaaggtatattgaaattttgttatcaccagatttaacagcatcatttgtcaaagttagtttcccagatttgttgagagttgcggactggcacatctcaaatagcattggaaaagttaatttaaagaactctggattaccgaaggacctcacaacctgaaatcagaatatgagacaataatggatgtcaaagaagacaaaatgcctactagattggatgtaagaatgggaacatgagaagcacaactttcaacaaaaggaaagcaaatgcaaaacaataatctctagttatagcaatattaccgaagaccttgtacatcagatatatatatatcatttgtgaaaaaccaattgaatatatcaggaactgacagtacgtaacaaaagtacatgatatgcataaatgaaatgaaatggaaaaagaaggcacaaccatatggaaaaaacgggggaatgaagaaagaagcaagacatatttccaagagcatttacacaaacaaaagaaagctttcaacgataggttgtggctacaaaatggaaataaatacctgttcaagacaagatagagctgcttcacggtattttttcgactttttgttacatgcagaggaaactacacttaaaatggcattaggagtggtaggatcatcaaccgaaattgctttatgacatgacttggagagagcccctatggcattaagtagagtttccttgccctgtctcattcaacgttacgttagtagactaatgtaagaaagggaaaagataatactattttgacagatacaatatattgcctaaatatattggctactacattcaactaatatattgtgtttcatttcaatgttttgttcctaatgcacttgttttctttgtctgcacaactcctcttagttccacatatggttgactgattataactaactacagaagcttattagaatgttgtatgattaggatggaattagaaatagtattcaatttttagtttccggatgaacttttcatataaatcatccactttattaataacattttattttatttttcatttcatcaaaaaacatttgagtaattagttcattgatcaatgattatacctcccacaaacgcccaggaatttctttcataacagcttggagtaacacacgatgatgagaagccaaggattcacctaaaacttcacctagtttgcaaattgcaagaccagactgcaatttatgtaatgacaaccatgagccaacaattataaaagtataagttgcaaaaataataaagtagaaattgtaaggtgatgaaagataatgagaaactaaaataacttcacttaagaggggttagaagaaagcttaccttctttttacttgaccatgaagatgatgtaatgctgtcacatataagagatacaatctctcccaaatacaattggagggctatgctttcactgctagtattttcttcccataactcctcaaacagtccagagacattcttgtcatcctcgaatctgtgtttgcgaacattaaaattccaaagcaaacaaaacacagcaactttacgcaatattcaaacaaataataatcagttataacaataatagaatattacaactttcctgcaggttaagcataaaatattatcacagtgctttcagtttcttaaatatgagttcacactccagttatagaggtcagcacgttagaagccaaaggagattaaattgcaaaggtcataacaaataaggtcctgcaaaagattatagcaacttttctaatgcaaggagaccctgtaagagattacaacaaagcaatggagttgagcctgtcttctatagtcaccttgagtaaattacttctttacagtgctagatctgccttcttatagttgtgattagtctcattggtttgccaagatttggtgataaaaaataatgtaacgctaatttaaggtaaagtccaaagtcacaccaaagaagaaagatacgaaattgaccttgagataaaaataactggaataattgatgtatgatatccactcagaacatctgaggccatggatgagtaacttttaaatagaattgcacacgtgatttgagcattcctatcaccagtatgcaaggctgcagtatcttcaattaacttctgggcctgagttggtgcagcatactttaaaactatggcacaagcactggcaaaggcacgtttggctgctgcacttttctcctctttaacaacaggaaacaacaacttcaaaagcatgctagtgtatggtttgaaatcagggcccactttttgaacaagtaagctaagaaagctagcaacaccagccctgtgagaaaacacaagacaggccatgtcaaagaaagcaccagacaaataagcagatttctaatggtgtagtcatatttcatgtacacttgcttctctttctttttaattgtttttgtattatcaatgtaaagagagaataaaaaagaagaaaaaagaaataaagacatgttgccatttttacatgacaatcacatactttagtctctacttaaatgacctgcacatttttgagttgctcactatttttttttctattggtatggttagtacacttggtgcgtacaacaaagaaataatgaggtcccagattcatacctcccttaccactgagctagctagtgggcatggagttgctcactaatgaaaatagaataaactcagttcatttcaggattcttgtaaatcctaacagtgtatgttcaggtttgatacaattttgtagatttctttttcccatcctagtattatattaataatataagtgaggaatctctctttgggcttcagtgacaagaatttttgctttctttgattactcatttcctttcagtttccctatttacagtggatactttatggatcattaatatcttttccatatctcaaacgatcaattgttaactctaaaaaaagcgaacatttggagaatattccacaaaagatctatgtatctgaagcgcacaaactaagaggaacaagacaaaaagttaacaataacaagaaataactaaaaaaatccataatatctggatttgaaataataatgtaattaatagatacctagtattgagaccaactcctgatcggaccaattgagcaagacgaggaaccaattgatctaaggattcagaatcaacaacatttaagcagagatcgagagtttcccacattggagagccttttgctattgagattctcagactttcaagcttctctatttgtattccggcatttgctgcatgcaactgggtgacaatcacaaacaaagagataatttaaaggaaacaataaaaaattcctgaaagtatgaatggcatatagttatataagtttccaacctcaacgtaatttagaccttggtcttcaaggctagataaactttccagcatgcagcagactaaatcagacaagtgtggacgaagagcaagtcctgcaccctgtaaataaattggagaaacccagaatacttttgagatttaaaatacagatagaagaactacaaacaactgaaaagaaatgttaacctttgcaagcttcattacaacagcaatggatgccttgcggatattgtcaactttactcaatatgccttccttgagcagaacaggcagaacaatgttcatggcctggctagcataggctatatccgttagagaaacatcacacagtctaatagttaacgaagtaacagcgcggcataacttttcaccggaatttctgacagtctcttttatgtcatccatggcacggaaagctgctgaccataatgcctttaaatgctttccaacctaaaattgccgaagaggtaaatgagaaatataacacaacagtaacatggatataaagagggggaatgaatggaaaattatatgccaacacatgattattttcctatgcttagaaagaatgctatcatactcatcttttggtcatatgtcttgtaatgactcccttccaagtttattataacttctcatttatggtggaggaaagccatggttacaaaattggggaaaattacaaaatttataaattgaaataaaacataaagcacaagacaacataaggaaataaaactagatagcttgtaacatcagttcaaaagattttcccaaccaaatccgttttgggggatgtgtgggtgggattaaattatgtcatcaactcatttccttacctagcaagataagcccaaaaagaaaccagagcatatctaagtttataggaaatctcaactcttaggtagcttggaatttcaagttttacagaaacttgcacgagagggaaattccacagctgatgcagttgttggacactggaaagggtggaaaatgtaagtactgcagaaattaaaagggtgcgagctcaagtctattctcttgtaaatctggtttttacttattgaggaataggaagcaagggaggcaattaatttagtccgatgtcatttggaaaccagcaactccacccaaagtcaaaatcttcttatgttactgatgctgaacacggtgaacatacataagattttgcaaaagaagaagccctcttttgcattatctccaagatggcgtgtgctctgcagaaagaaaaacaagactagtagacacctcatccaacactgtgactttgcattacaatttttgtacaaattgctgaaagaatttaacatgcagtggagtatcccagacggaggaaatcttggtgttcagcattaaaggttgtaccaaaagacaaactctatggcttattctggtcaaaaatcctatggaagagcagatgtccttccaaagtgaaagttttttgttggctggtggctctagaaaaattaaaagtgcacgctgtgatgcaaaaaaaaaggccatttttgtgtttgtcgccaggctggtgtgttggtcgtaagaaaagtggtgaagatgtgggacatttgttcttgaggtgtagctttgtacataggctgtggattaaattgctaaatgaatttgaaattcagtgggtctttcctgaatcagtcaaccatatgatagttagcaaattgggtggaagtagaagaaagaccagcttatggagaaccgcaattcttgcagttctatgggctatttggttagagagaaatgacagaatttttcaaggtgtggagagctcactagatgtcttatgggataagattagattttggacagctacttgggtatataagacaaagttctttgagtagttctgtttctagacttaagtagagaatggagagccttgtggtaatttattgtgattctgggttattgtttttccgtttactagttttgtttcggctctggtatagttttgatgtttttgtctctttttgctttgagctatagtggttgtatccatggttttccttcgtcacaagtgagactttcaataatatattgggggtggggctagtctaagagaagtgacctctttctctttttt

SEQ ID NO: 185740 - DNA, 590 bp, Cannabis indica
tgcgtgtattgtagttaagataaaccattacctacaatatattctattcaggtcttcaactcttcgaagcaccctcagaaagttttaatatcttagtgaattataatatagatatatttaaaacagaatctagaaaacgttcaatcttgcatgtaaaaatagaatggatttcatagttttgcaaagaagataaactatgttaaattttcatttccactacaggtccttacaacagaatttcatggaggacactgcaccaccccaaatagatgatgaatcatttagttgttggttaagcctaatcaatcaactcgaaatcagcaaagaacccagggacctgacaaaagaagatctactcaacaaatcgctaccaactaacagcctatgggaagctttttactatagctactcaaggtggattggattcagtgttagaaaacatgacgttagaaaggacactgaaaacaatgaatggcagcgtgtttgggtttgctcaagacagggaacacgaaaaaataagtggataaacttggaaaatcgaaaaagaatagctaaaccaataacaagagtgggttgcccagcacgtatac

SEQ ID NO: 185741 - DNA, 4511 bp, Cannabis indica
aaaacggaaatggttgtggaagagaaagtcttctgagaggagcccttgtgaatccgaaagtactggttctgtatcttcccattccgagaggttgtctgatgatcaggtactgaaaccttagctcaagtatatcaagattttagagatgttttactttttgcaattgttttaatgtatttaatgcactttggcttgaacttctgctttggttgttgctgctcattgaattgacctcttaaaaaagaccttaatttgatttcattggaattttttctctgctgcttttgctctctcattgctgctgttgtattgtacaacagtttagccctatacttactatatgaagaaacctgcttttactgatgaattttataggctgtagtggttgaagacctctattgctactctaaaagattgcttcgtcaaactaagttgtagcagtgaaaaacaaataacttttctaaaactaaatatttgagccgtattcaatgttttggagcctttataaatattcaaggcttagtttagatgatttgagttcaggtaagaggtttcttcttttgtatactacttaagagatttttgtgcatctaagaatatgaaaaattccactctgacaaaaaagaaaaagaaaagggaagaaagactgaatatttaggttgcatccctttggagcttgatccagctagacttcatactttttcccatatgccaatttgttggatctcggttggcttgatatggcattcatgtcatttcttatgttaaagggtagaaagatgttgacagagaagatgagtaagaggtatatagcctcactgagaattgataaaaaaaaatgattataatgtcaatagattcaagttggaaaatcttcatgactagtttgagtagattaaaaccacttgagctttgaaagtgttcttttatatcacacctgaaacgtagtcttatagttatcctttcattctgatttctgagcactgaaaagtactatccgtcatcatggtgtaatcctgttattatttgcaatttcaagctctaaagaaggagaaaaaaagagtagtttattatgggaaaacccacttgtacaacgtttgtacttatatgagaatatctgaattattgtcacaaaatcctccaagttctcctcttgctcgatgaagtgtctgctttagtaaaaacatggaatcgaagttgtgttttagtctttgttcatttttctctaattatagcaggatgcaattaaggggtctcctaatcactatactcagtcacttgagcccgaggtatcatccaaagctgtagccgttactgaaaattcggatgacagttcattaaaatcagaagacattaattatagtgtgaagactctgacggagagattatcagcagctcttgtcaatgttagcgccaaggaagacttggtgaagcagcatgccaaagttgctgaagaagcagttgcaggtaaagtgtaaggtgtaaagtgttgtacagtggcactgaaaatctaaattttaattcttccatttataatttcaagggatgtcatattttttctattccataaaaactacacgactcaggaaaagggaaaaatctgtttcttgtttatgcatttgtaagtacacactctttcccccctttcggtggaggtgcggatggttgagagttaaatggttgagaatttgtagtgaataacttaaggacaatggattttgccaataatgtctcagacttgagattttctgtaaactgcctcttgtccaaactattttctttagtttaacagtgatttttctatctttttctgcatttcaacatactcaatggttaaatgtcaattgtcattttaggctgggaaaaggctgaaaatgaagtgacaattttaaagcaacaacttgaggctgcagttcaacaaaactcatcattagaagatcgagcaagtcatcttgatggggcactaaaggaatgtgtcaggcagctgagacaagcaagagatgaacaagagcaaaaaattcaagaagctgtgtcaaagaaaactcaagagtgggaatctacaaaatgccaacttgagaacgaacttgtcgaactcaaaaacaaagctggagataataaatcttctgcccgtgtggatcctgatctttgtcttaagcttgaaattttggagaaagaaaattcagctcttaatcttgagatacaagctcaaatggaggagttggaaataagggcaattgagagggacttgagtactcaagcagctgaaacagccagcaagcaacatcttgaaagcatcaagaaggttgcaaagcttgaggctgagtgtcgaaagttgaaagcaatagtttgtaaatcatccttgggtaacgaccacaaatccacgactgcttcctcaacttatgtcgagtcttttgcagatagtcattcagacaatggtgagcgcctaaatggagtggaaagcaatacacgtaagctccatagctttgaattaagcaaatgtgacctcaattcttcagattcatgggcgtctgcccttattgctgaacttgatcaatttaagaacgagaagactgttaataaaaatctcccatcttcctccattgaaattaatttgatggatgattttcttgagatggagcgacttgctgcattacaacccactgaaagcagttggctggaatctgaagttgttgctgatgaacctaacagtaatagagaaagtgtcctaagaactgaacttgatgccatgattcagcaaatagctgagttggaagagaaattacagaagttggaaacagagaaggctgaactggagactgccttaagagaaagtcaagattgtattgaggctaatagatccaacaatagggagagtgtcctgaaaaccgaacttgaagccatgaatcaacgaacaaccgagttggaagataaattagtaaagtcagaaaaaacaggctgaactggagattgctttgacaaaatgtgaagacttcgctgatgaatccaaatatgcagaaagtgtccttagaagcgaacttgaagctatgattcatcgtacagctgagttggaagagaaattagaaaagttggaaatgaaaaaagctggactagagactgctttaatagaaagccaagactgtgctactaagttgaaacatgaagaaaataaccttagaactgaacttgaaaccatgattcatcgaacaatcgagttggaagagaatttaaagaggttggaaacagaaaaggccgaccttgagactgctttaacaaaaagtaagcattgtgctaatgaatccaagaagggagaaagtgtcctgcaaactgaacttaaagccatgattcaacgaaatgttgagttggaagagcaactgaagaagttggaaactgaaaaatctgacctggagattgctttaacgaaaagtcaagactgtattgaggcattgcgacttcagctgattgaagctgaaatgaaaatggaggagttgaaagaggaactaaatattgcaaaagagtcaaaggagatgattgagacacaactcatcagcttggaagcagaaacaagtaccatgtctgaggcaccacgacttcagattgaagcagaaataaaattggaggagttgaaaggggaactaaatattgcaaaagagtcaaaacagatgattgaaactcagctcatcagcttagaagcagaaacaaggacaatgtttgcaaaagtcaaaatactagaagaagaggttcaaagagagagggcactgtcagcagaaattgccattaagtgtcaggacttagaggaggagctatcaagagagaaggacgaagttcaacttcagcaaactgaatgctctaatagcgagttgaagataaagcaggttggttctcaatgaaaaacatatctgcatcttgtatttcttgtctgtttttgtccacactatcactaattccgatcctttaactgatgttagcaaaaccattttgtgcttcatgtgattttatattacaggaagacctggctgtagctgctacaaaacttgcagagtgccagaaaacaattgcatctcttgggaatcaacttaaatctctagcaacattagaagatttcttgattgatgctcccaacataatagtccctgcaggtgcaccactgattcaaaaaactggacaacactggaagatgcactctaatcagacattttcaccaaaacgagattctaattcatcaaaagcagcggaggaaagttctgctcctgcacaaagcaaaaaccatgacaatccttcaccaccttcgtcttcttcatcatcttcatcaacttcagctacagtacagtcaactcatgtcagctctgagaagaacagaaatggttttgccaaattcttctctcgaactaaaagtgggataagactagagatttagtttaagttaggtgcaataggaaaaaaaaaacaggggacatgcactgatagcttgtttttgtaaaaatggatttagattgtctcttagtttttttttt

SEQ ID NO: 185742 - DNA, 2952 bp, Cannabis indica
attagtttggtttggtttgttagtttttttttgtttttttttgagttttctttttttttttcctaagaaacatgagaatggaactcggatatgatggggtatgggttttgtcgaatggatcttagttgatatatattgggtaattcagcaaaaaagaaaagaaaagaaaaagagtttataaagtgaagcctgtgaaagcagacatgcatcgtttttttcgattataaacagttgatatgtagttagcatgttgaaggtctttctgtatattgcgttgtgtttgtggaaccagcaaattttagtttggagagcactatatgagctttcaatgttttcattttgctagtgtttttcacctgaaatttccctgtggacgcagttcaggtacgatcctaacggcataggttttgggcacacagtggttttgaaggcctatccagttggtatggtccctgcaatgaatgatgttatagaggatgaaggggagtctagattagaaccatatgtgggattggagtttgattctgcagacgaggcacgagaattctacaatttgtatgctaggcgtgtgggatttaagattcggactggtcaattgtatcgctcaagaacaaacgggacagtttcttctcgaaggtttgtgtgctcgaaggagggatttcagctcaattcaaggacaggatgtccagcattgattaaagtgcagagacgtgattctggaaagtgggtggttgaccttttcttgaaagatcacaatcacgaacttggactagctgctggggaaagtcctcctcctcctccattgctccagaagacttcattaacggcaaagtcagtagttactatgccccataggccaagaacaaagttgattgaggaagctgaggatgggagaccttctccctctggaattattaatatcaaacgccttaaaagggatggagaggaactgcaacccaaagtcgaaccattttctggtctggagttcaactcagctaatgaagcataccaattttatcaggcttatgcagctagtaaaggatttagtatcaggatcggtcaattgtttcgttcaaagcttgatggatcgatcacatctcggcggtttgtgtgtcaaaggaaggatttcagcacccatcaagacttggctgtggggctttcatgagaattaaaagacaagaatctggaagatgggtagtggaccgtcttcagaaaggccacaaccatgaacttgagcttcaactagaacttcataaaaaaagtgttattgcttcaaaaaggttgttagaggaggagagtggtggactagaaaatgaggacattttcaacataagcaatgctaacattgtcaaaagaagtcgagaaaatcacataggaagtgattggtaccgtgtgcttttagagtattttcaaaccagacaagctgaagatacaagtttcttttatgctgtagaagtggataatggcagttgcatgagtattttctgggctgatggaaggtcaagattttctgctagtcagtttggtgatgctattattcttgatacctcttataggaaaagtatctatttggtgccatttgccacttttattggaattaaccaccacaagcaaccagtacttctcgcatgtgccctaattgctgatgaatctgaagaagcttttacctggttgtttcaaacatggctgagggcagtatcagggctccatccgctttctataatagctgaccaagacaaggccatccagcattctatcaagaaagtatttccaagaacccatcaccgattttcgttgtggcaacttaaggctaaggaaagggaatatctgaatttgatggaaggctctttgcggtacgaatatgaaaagtgcatttaccagagtgagacagtcgatgaatttgaagcctcgtggactatgcttttaagcagatttggcttgatagagaacgcttggctgaaagaaatgtatgaaaagcgacaaagttgggtcccagcatacttacgtagcaccttttttgctggcattactctgaatgataatgttgaatcgttctttggggcattcctgaatgctcaaacacaactagtagaatttgtttcacgatatgaaagaggtgttgagcgacgtcgtgaagaagaaagaaaagaggatttcaattcttataacttgcaggttctcttacagacaaaagaaccagtagaagaacaatgtagacggctttatacactttctgtgttcaagatatttcagaaagaacttctacaatcttatggatatcttggtttcaagatttatgaagaaggggccattagcagatatttggtgcgtaagggtgggaatgacaatgagaaatgtgttgtgacctttagtgcaaccaatctcaatgttagttgcagctgtgaaatgtttgaattcgaaggtgtactgtgcagacatatcttgagagtttttcaaatactggacataagagaaatcccatctcgctatattttgcatcggtggacaagaaatgccgagtacggtactcttcatgatttcgaatcagcaaggagttctcaagaactcaaggctctgatggtatggagtttaagagaaacagcctctaaatacatagaggctggagcagcttcttttgagaagcacaaacttgcctatgagattatgcgagagggtggaagaaagctttgttggcaaaggtaaagtgcttggttgaataaggtcagctatctctccaaggataactttttgtagctgttaactccatatgtgtagctgctctgcttcatggggaccttagttatgtaactgcagaccataaatgtacccatttggtaataattcttgcccttatcaaaaccaagatgttgtatatatagtgcttgatgcggaatacatttcttctacatacccagttctccaaatctcatccaccagtcagtggccagtggc

SEQ ID NO: 185743 - DNA, 9788 bp, Cannabis indica
  modified_base (9778)..(9778): a, c, t, g, unknown or other
aagttttttacactatcgaccattttgcaacaacacttatgatactttcaagtacacaacaacaacactaagcaacaaagcaacacgttttactttataaaaaaataaaataaaataaagaacccaaaatacagttacaaactataaaaggtaatgttttgtaaatttcatttggtcgattagattatttgattttcaaaactattaatcaaattaaccaataaaatatggtactcccaacacttgggaaaacagagaaatgatattggaacaggggtcggttccaggcttttgtctgaaaaaaggaagcctaactgtaatttcttaatgcttctggtgtgccttcgaactgatagcaattaagatcaaactcaaagtatcagaatttagcagaaaaaaagagggaaattgacccaatgccacagttaacttcataagctcataattcagctccaaatatagtatataggcaaaagtttacaaacaagggtataccaagattatttataatgaaggagcgtacaatactgtgatgatagctcaaaaatacaagaataatttatcaataatcaatctgctgttctcgtacatgcagatgttgtatagagcataaaacagaagacaattaatggtcagcattggcatagttgtaagtaagaataaaatgatgaaagcacaaaatcaagcagccgctacctggtctgtcacttgaggctgattggattctgattgcaaatgttgttgtccgtaagactctgattgctgaacatatggtcctgccaattgagagggtcctggtggagagtgttgcggtgctcccatacgccattcactcatttgatgatgattatgattatatggtcgtcctgtttctgactgcaattgttgctgtcctgacattcggtaagagtctgattgttgaccatattgtcctggcattcgtgaatgtcctgatggaggaggctgcgatggtgctctcgaagaccatccatccatttgagaatattgttgagacatttgatgataatatggtcctgctggttgtgggtattgtggcatttgagactgctggggactcatttgagtggatgctgaatacgtgttttgtggggatgtcatttgggcgtgccggggactcatttgagcggatgctgaatacgtgttttgtggggatgtcatttgaggcgcaactgatgacatttgagcccctgatggaagattttggagacttgtttgagagggtgctgaataaatgttttgtggcgctgtcatttgaggtgccacagatgccatttggtaaggcccaaccatctgagcaggctgcgatggttgctgtggctgtggctgatgaaatccattccttggaggatatcctgaattctcaggtactctaacttgagctcttccaaatgactgctgtcgtggtcctgtcattcgagagggtggtgtgtgtccccatcgattcatacttaacactctttcgatctcctccgtacgcccagctttgccaaaagcctcatttacaaattgttgaagagtaggattaaccccaaggcgacatcttatcatctcctcaagcaactcccgacacgaatcaaatgattcttcattacaaagtcccttaatcacaacctcatagcagctgacatcaggcttcggatctttctctcccattttcttcaaaatctgagcacagtcaactgctttaccatttttaataaattcctcaaacaccctattacaaaaaccggcaacaaccctcaaaccagcttcaaccattctacacaatgttttcaaaccatcatctatcctatctactttcagataagcatcaataagagtcttgtaagtattcacatcaggagacaaagacttcgaacacaactccgaaaacaacatctcggcctcggataacatcccgatttcacaatatctagtaatcatattattatacccagcaacatccatagcaaaaggtttagaatttaccttactccccacttttctaaaagtagcaatggcctcttcaatctccccatgcttgaaacactcattcaccataatgttaaaagtttccgaattcacagcctgaaaattgggaggagtgtgattatccaacatctgatcaaacaaagccaaagcttcaatctttttcccatgtttcaacaaaacctccaacagaacattacaagtagctggaatcatcttgaattgtctatctagcaaagacttataagactccatagcttccttctctctcccattattaaaaaaccattccataaaagttgcattaacaaccccatcataaaccaaacacctttccttaagctcatcaaaaagctcattagctttatccaaattccccaaattaagaaacccagaaatcaaattattgtaaaccaaagaatcagcaccatgccctttactcaacatttccctcaataaatccacagcctcctcaatcctaccggaatcgattaaccctttagtcaaatgccggaatgtcaccggagaaggactaaaaggagcattagcaataatataacgataaatctcaataccaacatcaactctaccctcatcacaatgagtattaataagattattatacgaaacaatattcggaactatgtttgattggttgaaaaagaactgaaaaagtgaaacagcttcagtgtatcgcttaccgcggtacatggcggcgataatagcgttacaggtgaagacagtaggtcgagtattggaaaacacagagtgacgagctacagcagaggcagcatcgagatctccagctcgaatcagggattgaactctgttatgaaggttaaggcgagggccaaccagagcagaggttgaatcgggaagacgaggagcatttgggtcacgaggagtaggagggtgagggtcgcgacggagggcgtggagtggcggctcgatgcggaggcggcgttttcggcggcggcgctcggccgcggcttcttcggctgaggagaaggcgaaggatcggcggggagtgaggagagagtgaggagtgggttggtggaggagagatgagagggttggggtggcggcggaggaagggcggcggagagatcggaggaggaggcggtagagtgacatggttgtgaggttgggagttcagagagagattcagataaaaccctcttaaaccccttattgtctcaaacacaaaccatttatatcttagaacctttttttgtatagtttacaaaaataccatatattttggagcccaaacataagcccaatccaatccaatccaatccaatagcccaattcttgaaaaactaggtcagtctcctctctcactctccactacacacaacggtagaaaatctctcagctctgactgagccatctccggccaccctctgtctcgacaccaccatcttcttctcactctctcgctggaatctccaccacctcaatcacggtatagtttatgttcatctctcgttcttctcatttgatttaattctcatctcatattaagattagaacttctattgttgtttggaactggaacttattgaacatggtgtgttgattttctgctctgtttcttaaagtctttctcttttattttataattcataatgaatccaatttttgtgtgaataatttgtagaattttataatttaggttaaattatggaaaaaccttactgctgatatgaaaagaagatatttttgatgatgatagtaaaatgaatgtattattgagaaaaaacgataataataagcaaaagttggatatttggaacaaagaaacatattgttttcttaattacatagaattaactttttggagggatttgattcctctttaaattattcttcaaatcaatgttagagaaacatgtttttttttacaatgagcatttcattcaaaatgataatagtataataaaataaataagttgcccgaattgtatggtgtccaacatttttgtttgtttgaagaatttagataaagagctgactgttaaagaagcaattttttggggctttaaaaaaaagagatgaattgattgatatgataggagaggtgtagaagtagtactatgcatacttcaaaatgggttcttgtggattgtattcggagatgcaataactggagatctttcaagcaaatccatgcccacttgttaacaactggtctagtttataatgatgacttaatcacgaacactattgtcgactactttggcaaaactactgctgcttttgttgttgattacgcctgtgatttcttcaaacatttggattcgcggtcgagctctttccctttcaatacgttgatttctgggtatgcaggaagggacatgccaagggaagcggttttggtgtatagaagattagtgagagatgggtttgtacccgataccttcactttcccgcctcttctgaagtcatgtactaagtcccggggaattggagaagggagacagttccatgcagtgattttcaatatggggttttcaagtcatgtttatgtgctaaactcgctagtgcatatgtacagtgtttgtggtgattgtaaaggtgcttccgcagtgtttgatgaaatgcttgtgagagatgcggtctcttggtcgtgtttaatatctgggtttgtgaaaactgagttgtttgatgaggccatagctttgttcttgaaaatggaggttgaacccaatatggcgacttttgttagcatacttgtggcctgtggccgaaaagggtatttgagattggggaaggggattcatggactgagttttaagcgtcccgtagacactcctttgcttttaggcaatgctttgatggatatgtatgtcaagtgtgagcatttgtgtgaagccaagcaaacctttgatgagctttcagaaagggatgttgtttcctggacatgcgtcataagtggattggtgcaaagtgaacaccccaaggggtcattagaattgttctgcgagatgcagcaatcaggaatcgaacctgataaaattatacttacgagtgtgctttctgcttgcgcgagtcttggggctcttgattacgggagatgggtccatgagtacatcgatcgcagtggcatcaaatgggatattcaaatcgggactgctatgatggacatgtatgcaaaatgtggctgtataaagatggcattacagattttcaatgaaatgcctcgtaggaatatcgttacatggaatgccttgttgagtggtttggcaatgaatggccaggcacacgaagcactgggacagttcaaagagatgacaaggtcgaacgtcagaccaaatgaggtgacctttctagcaattctaacagcttgcggtcattctggtttggttgatgaagggcgtacgtactttcatcagatgatgagagaaccctataatgtttctccaaggttggaacattatggatgcatggttgacttgctgtgtagggctggactcttggatgaggctcaaaaattgataaagtctatgccaatgcaggctgatgtgttaatatggggagctcttcttagtgcctgcaagacctttggaaattttgaactttctcatgaaatattagatgggctcctagagcttgaatctgaagatagtggggtttatgtgctcctatcaaatatatatgctactaatgaaaaatggagtgatgtaataaagtgaggaggctaatgaaagagaaaggcatagaaaggcaccagggtccagtgtgtaatatgcttttcaatgaatttccaatatatattataatgtgagttatagtttcttgagtagataaattatgaaatttttttagaacttgaatctttgtttgtttgattgatattagttcgactgaaatcttagttgtgttgcaacttttcaagaactgctatagatgaaccagtcctcctaacttgcccgttgtgcatccctattctagattgataaagatgtttttaaactcattttgactcttatagagctcctttgtgttctggagttcggtgattcagtaaggacttaagagaaagggaattcccaagagcagcagccatgtctttcatgaagggagatttgcttacgaaaaccagaaagcttgtcaagggtttggccatcgcagagcctcgttggctcaaagcaatggaactgtaagtcctattttctcaatgatatttattattctccaatttttcttttcttgtttaatgaagtttgctttgcctgatttcgatgtcttagggcaccacctccagcatttcctcgtagtgacggtaaagtaaagacgatcactctcccagaagatgtttataccaacaagttctacaagaaacatccaaatgccaaatacgaagaggccttcgagtaatttcgcttctttaaaatctctctctgcattttatttaagaggggtaactcaaacggtcagacatgtgattttgctcccacaatgtctgaggttcgagtccctcctaaacacttacatagtaattgttaggcaaaacaaacaataaatctctttatacattttcacaaacttaattttgcttcatgcccttttcctaattcttttctttaaaatcttttttatttattttgaatttgcaattttgtgaatgataggatagttttgaagtcaatgaatagactttaaagtatttgttgctttgttcttgaacagtttttgtagtttcgatcctcctccagctcgtttatatggtttgcggattctagacttgaaggagcaaggagttagtgaggatgcagcaatggcaactgcagatgtaacttatactttcaaattctcacttttaatgttgctttccaatatatatttacacaaacacgtctacactgattactgattcttgggacggtatacagatggagtatcggtcagagaagaaggctaagaagaaggcttatgctcggttgaagcaaatttcacgtatccaagggaagaaaccgcctcctaatccatactcaagtgccatcagagagatacaagccgaggaaagaaaatatgttcatgagagattctttaacccgaaaattcaagaagcagtaagacaactgaaagaggaaaaagccgaacgctttgctagtaacccattttgaaggatcacaaattcacaaatttttaagtttttgagaagaagaagaatcttgaatgttgccttgcaccttgtttgattattgcataatgatgattatgctctgtgaagagtaggacatataaatatattcaagtgcaataattttcatgccctttaccatttgggcctctactccccataaactttctgtgtgttactttagatatttattataagttttgttaaatattgattactttagatatttaaatgaagttaatcttgattcttcagtcttgtaagtctcaaatctagctaaaaacataatctaacaaagggagctatatgttttaagaagaaaagaattagtgtcgcactataacctatttcgtattttcttttaaggaatgatgtacccgaaaatatgtaccaaaatattacacaaaatagttaaaaaaattctcacttaatgtaattgttttcagaatattttgggaacaaaccattactttttcaatagaattcatttagagaaacaacaattgtaccaatggattgaggaagtgaagtcaacaaaaaaaggcgacgagcttacacaagaaaggacacagagactaacccaagacagctaagtaatttattgggcgacattcatcaccatgtttgaattaagttattacataattcaaagttttgcatagtatcattggatttatttcacccaaaaataatcatcacatctaatctttactaatgttgggtttatatcttgctccttgggactaatggtgcatccctagacctcttctccacagtccttgaaatctgtctaactgcctccttagctagatgccgagggcggctcagccaaagtcctccatcaacaacaagtgtagttccatttatgtatttacctaaacaaaacaagaaagtacacaaaatgcattgttgattaagaccacctcgaaatcaattgacaatgagtagagtaaacacatgactccgagaaagagaatgagagataccaacctgcatccgaagcaagataaacagcagccatagcaatatcccatttctctcctactttatacaacggcatgtactctctagttttgttttttatctcgtcgggtacaagtttactcaatccgggagtatccccaataggaccggggccaatcccgttcaccctaatatcataatcagttccccattctaatgccaagtttcttgttgtagcatcaacagctgcctatagaaaccgaaaattagaaacaaattcaacatgttgtatacagaatgtaacgcgaaattcctaaacatattgatgttgaactaaccttggctgctgcaacatggatttgataccaagctgctgtatagtgtaaagtagcactgatgttcaatatcaatccaccgctcgatgagctccttcccggtccatctttctttagatactttagtgcctcatggcacattgtgaatgtaccaactgaatcaatgtcaagaactgcaaaggaaagacaatgcaatgtaagttacaattttattcctttaaggccttttttgattgtttaatgaccgtttagtgaagagttacgaaaatggttttctcagctctaaggtggattaagtttttcaaccaagaacaattgagtttcctagctatctttgggttgcatctcaaaactaattttacacaagttctaatacattctcctcatgtttgggcttggaaagtatgggtataatgaacgaattttaagaaactacgaggccgaacgtgatatttgaaagaatcccacaaggccaaatcaaaaaatttgttgatttttcaaaacaggtcaaagaccccaacactagaagctagcatacattggccgaaaggttccatacgaaagttaaaggcagagacagcagaagttttttatcgctctggtctgataccatgttagctcatagagcataaaaatagagaatgagaagctaagctaactaaccgactttaataggtactaacttggtctgaaactttttattgctcaatccttaagaaacagctgaagaaattaataatgagaactacaaacaaacatagaaatcagacagtgttgaacaacaaagcaacactcaacctgttcgaaatccattaggggacaaatcttctggtgaaacaaggaaatttcctgctgcagagttgacaagaatgtcaagtctcccaaaatgctcaaaagttgattcaacaactctttttgcatcttcttgcttacgaacatccccttgaaaaccaacagcctaagacaaaaataagaaaaaaatttgaaaaagaaaacaatgaaatttttatttttgttgtcgaaacaaaatctacacaattctatcaattaaaagctcgtttggtataccatattagatcatatattatattgtaaagtattaactaaattgtgttttacattatatttttatatacaaatcaatatcaaatactaatatagtatagtatagtataaaaatatgacataaatagaattttatataattaagtcaacaattagaccctttaaagttcacttgaaaattcatgcatatgctaccaaaaaaagcaaactaaacaaatttacaaccaaaatcagaccaaagcacagatcatgtttttttgtagatgggtcgagagtntaaaaaactc

SEQ ID NO: 185744 - DNA, 2698 bp, Cannabis indica
gtaaactctattattaatatgaaaaattcctaaaataactcagatttatttttgaaaaaagaagcaaattgtgttatattacttgcctgcaagtaaaaaataaataaataaataaaccggatggttatggttaactctatacaggtgtctgtgtctccattagatatatattgttttcttatataattatcaatttttgtgcgattcttaaattcaggtcttgtattaattttgaggtgggttttaatgttgaggttgagctttcaaaaagaaaaagttagttcgtactcttcattttcttggccaaagtaattttttagtttttagtcttgtttcctttttgctttaaatttttataataaaattttaaaattattttattaattaaaataaggagttgtttttatttttataccttaaaatatatatatatatatattttttacatttttacaaaataatacaaataaaataaatatcacaacacaacgagcggaaatttaaatcgcaactaaaaatcgtataacaacttaagctaccggagaaatcactttaaaattctaattcgtaaaatttaaaaaaaaaattaaaaaataaatatatatatatatatttatataaagtaattattcttaaaataatattaattgattttattatctaatattttttaaaaaaatatctggaccaatagagtaacaggtgtatcttgatagtctaaactaattgttaatgaaatagtagtaacaactgcgacaaaaatatatcatttcatacttaatctgccgaatgaaatattaaagtaaataaataaaaaatatttatgctattgcttttataaatatgaaccaaattatacacttattacttatgtcatctacctagctcgtcattatcatgatctagataaatatcctctcataattcaaaaactcttttgacgatataaaaagttaaagtgtcaaggggctagcttagtagtaatggagggataaaaaaaatagagaaattatgggtttgaatttaaaatttttaagctattaattgattataaaatactattacgatacacttaaaaaaaaaatttgcactactacatataccatattcaactggccatatatgcatctgaatctgatttatacaaagtagataaagactaaagaacattgctatatattaagcactaatagttagtatttttagacattttattttgtgattgactaacaatacttcttaaaaattattatattaaattatatgagacttgatatttagttagactaataacaatattaacacataaaaccatgttagatgactttaatatttctcaaaataattgatataaaaacaaaaatactcccttaataactctacacaatccaataatattattttcgaaaataaaatatggaatatgatggatacatcattttcatttacgttaccaacaaaccttacaattaattagtttccacactagaataataatcaagttagccagaagaaaaagaagaagagattaacaaccctctttattaatatgtgggtagatgaatttaaaccaactcaatcaccgaccaaaacaaaggaccacattcctctaattattagggaaacaaaataaaacaagtaaaggtgtaatgcaatcaatatatgtgtcccaaaaatataaattccctcgagttcaagaacagcacagtataattattgtctatgcccatcaattttttgaatcgaaaactaaactcatcgaacttcaacacgtgttaattgcattaaattaaagtttgacaactttgtatttatattagaatattgaaatgttaaaatttttgtaattattgtaatatatatatatatatatatatccaccgaattattggacttataataagtcgaatgggtcaaattattggtcggtaatgaaatgttattccccaggaaacctgcatacatttgtctttttgataagatacatacatatgtgtatgtgtgtcaagttgtcaaaaggttggttcctttaatttcccacttagctattatgtttaattatattgtagaaattaataccaaaaaagtctaaccaaaaaattcgaagccaaaaaggaagaaataaatattcgatcttactttgagaatcatcagatatattctggtgagtcaaagcacaccgagttggctagactcactaggtagtagtggagaaggtatcatgggtatcaacactaaaaaagacaaaatcaatatatgatagagatttattaattgaagtgacaacactaataaattaaatttcttaatagtagttcaagttttttttttctatattcattttagataacatcttagaagactggtcacactaatttgataagactgtttcagaaagaaaattgattaaattttattagaaatgaactttgggaagataaattttctattgacattgaaagaaatggacatttgaacaaaaactaaggtttgtgtactaattaaatttaaattcttttggttgaaaataatttgtcaaaggatattgtttgttttgcatatctaatatataattataaaaaaagaacggctgtgctttataattgaatccacacgagcgagtatattacaaaatccatatactctccaaaatcttcatccctagctagcgtatctaatagaatatgagggtttagtt

SEQ ID NO: 185745 - DNA, 1744 bp, Cannabis indica
gacaaaaacataaactgtatcagatctttgtttcttcatagtccacacaaacatatgataaaggggtctttgacaaaatagtctttattgataatcactttgcacaatataattctttgcaaacaatcatcaaaagattgctatgttgtcaattttaacaaattacctatttacaaatttcaatttgataactaagattttcaaggaagagaatcttatgatatgttgggaatctattatgatagctcccgaaaacgtatcataatgcccgaaaattggatagggtcccctatcagaaaaattttcagttctccctaaacttaaatggtcaggcatgtggtttgctctcacaaggatctcaggttcgagtccctcgtgggtacctacataacgatcattgtagtttcctaatctccagatattgcagggttagacaaggatcctagaaaaaaaatcattttgatcatctatctaactctttagtcttaacacataaaaatatatttaacatacaattctcatcaaaagcaagtagctacaattttaattttgaattcaattctacaagtataaaagtgaacacaattttgtcaattttcaccaattactcatagtataaatttcaatttaatcatctatctagaatacactaatctaaatacaattcttctcaaaagcaagtagctttaattttaattttgatctcatttcaacaaatcaaaaatcaagtactaaaaaatccaaccttaaacaattcaaaccaattaacaacacataaagaagaaaaccctcttaaatcacacatgttataatcattcaaaacccatcaacccaccaaataaaattcaattgaaaatccaaactttaagataaacaagatcactcactcattcactcatcaattactcatactcatagtataaatttcaatatgatcatctatctacaacacactaatctaaatacaattattctcaaaaacaagtagcttttattttagttttaatttcaattcaacaagccaaaaatcaagtactaaaaaaacccaaccttaaacaactcataaagaagaaaaccctcttaaatcacacatgtttaatcattcaaaacccatcaacccaccaaattaaattcaaataaaaatccaaactttaagataaacaagatcactcactctatcaaatcacagatccccaaattgaaagaaccataattacatacctgcagaagagcccaccaacaaaatcctttgcccagatagatggtcacgaacccagttacaaacagcaacaacatctttgatttcagagaatccggtaagagaagctcttccggtggattttccggcacctctagaatcaaaggtgacagctttataacctttatcagctaaaccagaagctattcctctcaaaagggcttggcaaccacccaatatagaaaaggggtgaacaagaacaacaacaaggctatcattatcttggtgatctttgttgatctcttctttggggttaaaaacctttgcttggagttttactccatcactggtttctactgtacatgaatcccttgtatggttagacatgagagagaatagaagagaagagaagagaagagaagaaagagaggtaagttgtgtgaaatgctcatcaattggtatccactctttaatttttgtatattagagttttgcttgaaatttaatttttgttggaaaaatttattacaatttgtaaatattttt

SEQ ID NO: 185746 - DNA, 2614 bp, Cannabis indica
tttttttttttttttacttttacgagtttttatatctgctctattcaaacaatttttgtattagttaaaatatctcagttacattataataataagttatttaatttaaataattatttcaggaatcataaaaacaaaaattcattagttattcttattaagattacacatgtcaaactaatatttaagcaaataaataatgaagggcttctcaattcctttcacaatttatcgaaatcaatgctcttaaaggcagcaagtcatacagtcggcaagagtttacttatactccacttccttaagatcgcatgattcatgaataatatgattgatgttgtcattacccacctatatgtttatcatatactagctagaataatagacatatgtatctcaccctctaattctaaattatataatcacagaatagtttctaattaatctaaatatatatctgtcatatataatctgttttggatattgaataattaatgtagtatataataataaatcattattgaaattaagatctaataaagctagatcagtcacaaaatcatgaatagattcatgctgtataaatcacttgtctcattcaagataagtaaattatatgtgtagcggtagcgctgatcggccgatacaataataatctgtccgcatccaaacacataaaacaacaaatatccacatttcattggagcttctcaaactcatgaaaccgaaagaaattacctttaacgtaagatgtatcatatcatcatcatttgataataattagcacaaagcaagctgtataaagaataatttagcattttcacaaatgtctcttgctataatccatgataatgcaggaaacacacatatatatattatacgcatattggtcgtaaatcatcactcggacgtagtactacttgagaatataacatacaacttttgttgaagttcatgtggatcaatatattcactcatattatgggcaacctgaaaaattatatgaagtgttgattaatagagaaataattatatataaaattaaaaggttgataagaaattgagtaattatttcaatattacagccgtatagtttctattaattacctcagactttagagtgtgaataagccttccattgactttggtagaataacactcttcaatgctaagtccttgttggagcaacacttgcagaacttttgacaggggcaaatggctactaattacaatctctagaattcctcctaagcatgggcgaactataatattattaatgttaactaacaaattatagttctgcgatttacaattttggacattactactaatttcgcaatcaatgttttgatgagtaatgctcgaattaaggaaacaactacttttgagatcatctcttctgactcttgaagcttcaatcttagtcttcatgtaatttatataattcacagcctcatgcatgtgatcggtgattgagcgctttccctgcaattattttcatgacaaaagaaaaccctaaaatataatcttgatcacaggatgagaagacatttactaattgcgtataaatacatatatacaacctagatctagacatgataatagggttaaattgatcatcattggattgatcgagtttatttaatagtaaagtaatagctatatatatataaatattaagggtattcaattgacctgaattaactcttgaggaagtagagatcgaagtgatgctgttaggaaagtcatatgtagccttctttgtctttcattgtctctacggaagatcttcttttcactattattgtggtgatcgtggtgtcgttgtggttgcggataattaatgttgtcgcgggtacagaatatcgtattatgggtctgccctcctaccatatctatggtatctattccaaccagatcttgttggtggggatttgaagagatttggggtaccaaatcatgatcatagctactttggtggttaggaaacattgtacaagatcggctaagattttcgataagctccttctgatcacttaaattcgtataataatacaattagactccttcccactctcttcttttgttctttatggatataattaaacataactaaattgatgtccatatatattttataggaaaagactttagattccttttatataggaaacgaggtttaaattaggaacttcaatataaaagctcataattataattccaaactaatgccgtcctagttagtcaagccacaatatagaaactttaaaatttcacatattacgacgtgctttattaccctttcactgaaccaataattgcggctctttcacaccaatcatatatgtatattgccaaggatactaaatagtactgtccagcaccatatagtaccaagtagcacattcatatacattggtatacatatctcatcactgctacaaaaacaaacttttagagacggttttttacagctttcagcgttggtattggtaaattcgttatcgatactgattagggcgacgctgtaggatttaatttaactgacaccatatatacccctatgacgttggttattagctaggaactgacatcataggggtatatatagcgtcgg

SEQ ID NO: 185747 - DNA, 5938 bp, Cannabis indica
aaaaaattatttgataatttattgcttttgatattgtgtagtcattaagtttccatattaattagttaacaaaaatttcaaagaagtgcttaaatttttgtgctttgacaattagcaccctgaaataaaaacaattttgcaattgcacccgtcaactgagacaaatggttatgtccaaattaaaaagcaactcaactcaaacctgtttttcttcaaaggaaaaacaaaattggtgaacaaaagaacaaaacagtagaagaaaaacaaaagaaaacaaagcaacaaacaaaatgatatcaaatagacaaaaggacaagcatagtggagagaggacgctgaccctcagcccagaaaaaaggcagtgttttactttacatcatctaaagatatgagaaaagtcactgacaataggctatacctatctatgctgatatttttttacatcagttttcgtgttctgttagtattgcatgtgagtgaaactgcatccatagttatatttatagtatctactatcattggtataagacaaacaaaacagccattttggtattagtcaggacagaacaaccacccttgtgtttagccctttgagatagctttgtttttcttgtctcttaagaaactaatggggttaacatgagattgttgtgttgtgtgtgcaatgagaaaatgattgagttagagtagagtttccactcagctagtcaactataggtactacaacacagagaaacacatcactttactctacaagaaaggtgacaccaaatctttagaaaagattagaatggtacgagggaaaaaatcttgttttaactctttcaataatgtgaatttcattttacaattgactaattggaactcatttacattgtacacaccgctgatttacattaacttatgtatgcaaactacaagagaagtggaatataaatctactgctatcggaaactctatccttcggatagcaccaaatgaaaatcgggcaaccaagagaaagaaaaagagactctagagcagcctaaagaataagtaaaactatatatgaatgaaatagaacggtatacaagaaaggaacaaaatcaccttgtcatctctgtggatggtccaagattggattcatttctatttgtgcagcacctaactctcttggattcccaaacttctcagcttcactggcaatttgaacatcacaagggctataatactgatgaagacacttcacaacaaatcgaggtagaagtgccgcaacaatgattccaagtaaacaggaccaaaacaacctggtctttccgatctcaaagattgccctgtcagcaaaaaatgttataattgcaaacatcagtctccacacacaattgaacaaatgttatgaattaaatcgaagacatgaaaaatggttgtctgaagaaataaagatgtaagacttgatattattagataagagaatgtaccaataaccaactaaggatggtacagcatcaatgatcatgacacaaatccaggttgcaatgattgatccccaaatagcagcatgagtaacccaagtccaacgaataacatccatagccaagtgcaaattaaccaaaataaccacggcaacagtccaaagatcccccaagctggatccatcaacgttgctttcccagtatgcaaaaagagggacaaaaaagatgactagactttgccacaatgtatcaattactgttagccaaaacagttttgagttgtagctttcttgtctgtgaccagcaccataaagttgaggatactgtaaaagagttcttctacttaaatctttgtcaagaattccaacaattatagtaggcaccgaagtatagatcacagaatacaacacgctgctccattcgttgattgcagttgtcaaagtgaaacttgtgaagaggacatacctacaagaaattgtgagacgtataagatagataataagcaagagaaagctctctagacatattaaactctcaatctttctctagcacagtaaaactttagtgagcagagagagagagaatgattactcaccaaaataaaacaagaacaaatactgcattcctataaaaattgtacaaaatcatgtaacccattcgctggtaattccaatgtccatggaccaacaaaaggggaaccaagaatctgaattggcccattgcaaaatctgatgccattacagcttgtcgaccctcttggccactgataccaactccaacatcagccatttgaatcattgaaacgtcattagcacctgagacaatcccacagaaatttctaacatcagctatgagtgcaaataattatttttgggagcataagataaaataaatagtttgaaatttaccatctccaatggccagtgtcatgtcagaagttctcttctttacaagggcaacaattccagctttttgcaatggagccacacggcaacatagcactacagaacatttacttgccaactcaaagagctgaaattttgaaatgcataagttagctataatttaaaatatcattcaaggcttgcttaagaaaacttgatcaagaatcaattacctcttcctcaagttcactgtcaagaatataaacaaggctagtaccatcaatgatcaaggcaactggagttggaccatctcgagaggttccttcagtattgtatgtgaccccagacaccgtcacaagctttttagccatgagtattgcatcttgtaaacttcttctacaagaatctttagagttgctgttaataataatttgggtcatcctagacgttaggagcctcgaagagtaaccaattgatatggccgtttcttgcttgtcccctgtcaaaacccaaaccttaattccagctgctcttagacattctatggcttcaggcacccctagttgcagcttatcttcaattcctgaggcgccaagtattctaagatttttctctatgttgctagcaaccttgcgaagctgagcagcccgacccagcaaagcagtgcttgctgcctcaaacgaagagtgccactgatcgaattctgaagaacttagatcccgcatcccaacaacaagtgttcttaaaccaattgaggagtaagcatgaagatggccttctgttgcacgtactatgcttaagtttacagatttatcaatcacattaaacatcgtcgtatcagcaccttttacaaaaactttcacagaattgtcagggcaccctagtatgaccgacattctcttacgatcactatcaaactcatgcaaacccaaaacattgaacctgcatggttcaagattaataagcattgcaatatcagtaaggcttcaacagtattaagacaaaaagcaaccaggtaagtatggaaggatgacaccagttaaaattacctttgcctttgtccatgaatatcgataattatatgccctgaggttctttcaataagcataaatccataggctgcagcagcataaaccaatgcctgttcatctggtgactccccttggtaatccatcaacttcacattaggatctgatgtatctgtcacaagaggaacaattgtattgcaagctgccaaggaaagtaagaaatcatgcacttgtgcgcctctactagtatcccgtccactctttgcaagttttaggagctctggatcaacattcaccttcatcttcggcctcaaagtatttccatcaactgaatacagataaggtataaagaattcaaatttcaaaccttcaataagtaaatttagtagtaaaaaaacagcatataccaaaacaaaggttgaaatgacaatgatgatgctgataatgcaatgagaccaaacaatgataataagctctaatcaaagaaaataatctcaaaaacataaattgttcaccttgaactgagtaacctgggagctcagtttctgaactctctttgctgccattgtaatccaccccccaaatgctagcacacttaaactccattgttctcggtaagagtaccggttttatctgaaaatacatactttatctgtcctaaatcttcatttatatttagagccctgcactgaaatcttgaatttgaggcttcatcatacatttgtgcatctcggatcataaaataagcctgtccaactcgaacaagctccattgaaatgtacagagaaatagggatcataatctggaagacaatgacagacatgaggaaagtgaaaaatatctccattccccacccatagtactcataattctcctcatcccccttagaaaagtcctttctccgataaaatgggaggtaatccaattcatccctgcggcgcctcaaccaaacaccagcacatacagacacaacactacacaaaagaattagaaacacagaaagaatgatgatctctaagttcatacgggtttcaagccggctcctcttagaaggggcaccagaattgttgagcatagcttttgtctccctcccagcatacactgcaaccccaatagcccatccagtattcttgagctcacaacctcgaataataatgttagagggccccaaagacagtttcttcccatcaatatcaagatttgcctggaatccataaatattcctattgggtttctcacacttaataatcccactaatcttttctttctcaggcaactttgacagagtttcttgcttagcataccgagtcttcaaattagactctccatctaaattgatagtctgaacataagcaaccccagttggatcactggtcgagagcaacaccatatcacaaggaatagtttcatttgcatgaattttgatgatttcaccaacttgaatatccttccatctttttggctggaactcattgttgaccagaattgaagccaatctgttgttttcaattcggtcagaccgatggcgcctgtaatcttcataagcatctttaacagcagtaactaagagaacaaaagccaaaggtaaaatggaagctgttctaccaaaaacagccagttgaggaagctgattgagcacagctataacaagaaaatatatgtatgcgactctgtgaaattgctcaaataaatttcttggcaagaatgtaaatattgaatactttgctgtcttaattgtgttcgaagcgaattcaaatctctcattggttttccctggatcatcaatgtataccaacctcgcgtcctcgtcgttaatctcctttaatgacatgctgaacgcctcggaatctgctgctctggacccatacctcacgggcttcggacccagatcaccaaaattcacttctctaatggaatttgcagctgaggtcctggactgatatgaagaaatgcttcttctggatgatgaagtattgaaagttgactctatatgaatagagttttcagctggtgatttggagtccatcccaacttgagttgggttttcttgaaagtttagaaactacagttatggcggggagatttgaatctaaaggcttgatctgaggaaactgagtcaataatcgtcaaattcatgaaataccatgatgaagaaatcaatcatagcgaatgaaatttaccacaactgttctaaagaaaagaaacccagttcgctacttaattaattatacacgaataagctgtacaagaaaagaaaaatcaaatctttgagaagtaaaacagagaactctgtttcgtttaattcaaagcttggtttttttttcctttttgttctctggttttgaacttactcgcttgctgaccaaggcaacattttagagagttaagaactatgaacacgaagaagaagaagaagaagaagaagaagaagaggaaatgaattgtggtgtggtgactaagcttggttctcttcggctacaaatgagctggtcatcaaagaaacgtgttgttaacaagggataaacgctaaaggtcaaagccattgttagaagctacagagagagagagagagaga

SEQ ID NO: 185748 - DNA, 4227 bp, Cannabis indica
tcatgaagaaaattaataaagttcatgtaacataataagaagaagaaacattacttgatcattcaaaactgagttcagttcgagctcaagcttcatctgctgcagactgatccttttccgaatcaccgaatcccacagacttagtgttgcactccagacattgaatagagttctctacaccatcaaataaaatttgttataaaaaactatgcaatatgtaaatgtattaaacaaaccagtactgaaaaggattccattcttcaatataaacaaaatgaactatttttgaaatatttatctagagagtacaaggcccctcacaacataattacataagaaaacaaattagttatggattgcaaatatcttaaaacaaaaacagattactgcatccttagttatggtgctaattcagttttcttatcactcctgcaaacaatgccaagttctaccaacactgatgatacaatagcattactaaaggctaacataataaataaatgcatgcccagattttgctatttctactgaaaccaaaatcctacctcggcagttactttctgcacataaagaactgtctctgagcgagcattagcaaatctccattgcaaatatctattgtatagcaaccttagctgatgagcgtcttcaatgtacccagaacccttttttccttttttaaaatcagcaataaaactaagcacagaatttggattggtgggttgatttgaaatgccggatgcccttattcgagatggactaattcctctagaagggggagtggatggtctgttccgtgacggactgacacccctagtaacagaggaggctatcaacgaggtcttactaggtgagggtggacgagtaggcaaagactgagatctggctacagaatttgcagacttgggtctttctggcaaacttgtagagggaaacttgtgaagtctggatgtatgaagtgaattatcatcaactaaactcaccccaaaccctgctctgcaactttccacggttgataatagccttgcagcatcacttgaagatttttgtaaaggctttcctataacatcagaagagggtgttcttctcaaagaagacaacccaaatccaggtccaggtgtggaaagatttctggcacttttatcaccaagatccatacttctatttaatgaattagaagacagcttcccacctgttctactcggccaccgatgctgatctatcaaacgagtatgtaaaccatccactggtctagaattctctgactgatcagccacattcttccccacctttaaagggcttctctttctttcaggtgtaggctttctagaaacagatgtttcaacctgtttatgtgctacatttgatgatgacctcaaagtacgttcagacaaagcatttgtaacaactggtttttccttcttactaacaggaatagaaattgtatcagactgaaaagaaacactcaaactccgcatcgttgaaggccataaactatccggcggcaaccgagaactagcaactcttctggacgctaaatgcatatctacggacgaatcctgaaccggtgtagatggacttaagggggaaggaggcgttgaaggtctcttcctatccacagatattgctcttttagataccaaatgagaagaggaagaagaagaagtgggtgaagatgctgttcttgtaagattgggtgatgggcaacgccgagcaccctttggcgtggtcgagggagtaggtgacttgtaccttgaagaaacttccctcgttcgaaggcggccggtggtgagtacattattcttttctgccggaaccaatggtggtcgtggggtctccaccgttatgtgcttcctaaatgctcgctccgatttacatacatccatcaaacaatatccaaactagacaacattgatcaaaagaggaagatataatgaaaattcacaaaattaaaccagcaatcatctgacaccccttctttgccttttctagtattccgcattcaatggcaacacacaggcttcctcaaaaaagaagatccttttctctgcataaacaaaaaagaaaagtgagatgcaatttaagccaggctaaaaaggaaaagcaaagaataaactcctgcaaaagaaaaagggaaagatgagaaaagcatacatctttacagaaccacagatctgattgagtatcaatatcagtattacaactcataaactcaaatgggtattgctctttcctaaggataaggccgaatccagggagatcaggccatgggaaggagttcaggtgggaaaaggggttataagacatatggtgaaatggggtcacagagaattgcgggaaatgccactacgtgcacaaacagttatcattgtagctttggctttagttaccccataaactgccattacagggtaaggggtcccctcagcaatttggggatactgggagagtggactagagaaggggaaggaagaaggtaatgggtgtaggatattatgaaagaggagtgcgtaggataaagggattcttttttttttcttcttttcttttgtctctctcacgagagtgccatggtcggctaggctggaagttggtttgctctaaacacaaccccacttaacttattaccttcttcttctatcccaactcactttcatgaaagcgaattcaatggaagtatatcaaaattaaactttgacaaaacaagctacaaaaaaaaaaaataaaaaaaaattctctctttttcttagaatgaaaaacaaaagcaatcttgggatcacttgctaccaattattatcaaaagattcattcatggatttttaatgccttttttactaaaccaactacaaatctaacccaccaaaataaaaaaataaaataaattaaataagaaaagaaagaagggaaaatacatttattttgtttgtatactttaatgtatattttattcccatgtataattagaagattgaaattgcagatggtaatgtccttggagaaatggcaagagacaagcaaatccacgtgtaatggagatcactatccatccccatgaatttttttacagtctaaattataccaagaaaaagaaaagaacttctcacttctcagtagaaataaataaaataaaatatagtacacacaaaacaatatatatgagatacagggtcagagtggtaagatatgaaaataataattgtatataataggtaattatttttcatttgactcttgaattcatttttccaagattcgggaacgaaaatcaatgaaaagcattggctttaattgaaatagagaaagaaaacccaggttttttcataacataacataaacttctgcatttaaggggtccatgtctcttttgtggaagacaaacttcagtgtttcactgttcatcaaatctctccataacccattttcacagcaaaaagagagagagatttgattgttcattgaacccaaaattacaacaaaatcagattaatcaatttctgtttatttatttacttaaataaaaaaaaattaacaaaactaactacattctagttgtaaaataatagcgataatattcaaaccgtaatatatttataatatatatattcactgattggcacaataagtaaaaagtatgaaagattgaaattgaaaccctaccaaacgctaattataaaatttaatacatcataaaagagaataacaaaaaaatctcactattttattaataataaccaaacgacaaaccttaaaacctttctctctctgtgttcaatattttctcggaatccaatcactaataaacgataatccataaatgaaatacccaaaatctcagcgattacctaaactttgtgtttgaatgattttcccaaacttcgaatcgaaatccgacggattcggctctgatgtatcaccggagactggaggaagcgatcgacgatgatcggagtcagattttccggcgagaagtcttcgttgggctgagagaccaagatgaaggaatagaaggaaagtaaaacaatgcgttgaagaaataatcaaaatttaaattattattttttaattaaaaaagaaagaaaaaaaaagacttttaattgattaaaaaaattaattatttatataaaaaattgcgcgaaaaaacggtttgagttgaataggactaagtaagaagtcgttgatttcgcgccaccaactatttaattactttccacgttttcttttgcaaaa

SEQ ID NO: 185749 - DNA, 3827 bp, Cannabis indica
attaagggctgaaataaataacactcagtatcccaaaaagactttttgttacaatacttggcagccaaacatttcacccataatttgtcataatcgttggccaagtgccacatttaaagcagcgccttattagtgtcttctaatcttctaaatcccaagccaccaagactctcacgacgaaaaatcttatctaagctcaatgtgactttaaatctctcttttctcatatccccaatccactaaaacttcctaaacaaggcatccaactctatacatgaggactttacaagtggacatggtgtataggggaaaattcaatgccattgactgacaaagtgtagactgacctcggaaagagaggagtttgactttccaaccctcaagcttttttagcacaatatctttcaaccttttatactcttctcttttcctttttttgaaaacaaagggatttcccaagtgctttttgtgacttgagctcttctggactcctaagacttttaggatctcctccttcctacaaaggcccatattcggggataacaaacattggattttagttttctacactcttgccctgaccatgcttcataggtgttgatgacttattaatcactctagcattatcggcattggcacgagcaaaaaggatcatgtcatttacaaacataagatgactaatcaatggggcattccttgagatcttaatactgtggagattcccctctacttgttcctaagacctctccttcaaaaaaaaattttagggatatcatacaagtatgatcaattttcaaacatgatcatcaaaattgtttgcctaaaacctgatccaaaaaactccactcaattttgtcaaatgccttgtgcatatcgatccttaaagccatcaaaccctcactatcctatcttcttcttaagtggtattgactagttctagacaaagcacaaaaacactcggcaatccaccgaccaagaataaaggcagattgaactagcaagatcagtttatccataaccactcacaatctagtagcaatgatttcagaggtaatcttatagcctaagttgcacagactaataagcctaaatttatccaccaagtctgcaatagccatctttggaatcaaaccaattaagaatagtggacttagggaattgatgaggcttccttgacttacacacttcttcatggggtatctccaccatttgggtgctagtaggactaatgtcagccgtaaaactcattatcacccatcatcccataccttattatgaatatgtgtcataagatgtgaaggaaatatactcactggactcccatgcatcgtacctagcttttccaaagaaggggaatcaatacaaataggttctcgcattattctttgctccctctttccattcccaaaagaaggagcctctcctagcccgctgctgccactaccaacgacacttcctagctatcccttgtcttggactccttggaacgtcaccatcaaacaaggtagctacccttttacccttatcaatattattggatgtcggagcttccaactcatgtaagtcctctggttgccgcttttgcatcagcgggatttttggatcgaagcagttgcgaatgggcacaccaaccttaatccaggttccatacagaggaactactttcctattgggcagatacgtatatttagtgggtctctcgcacttttaataagtatgagccaaataacaaaagctaaagcaaatagctgggagtttgtggtatttatactgaatccattcttttctatctctcgagatgttaagttgaaacaagcctttgatcaatgcgcttatccacttgaaacttaaggaaacccctcctagaaattgtgacacgggaagcttgatcaaagtcaatataaatatctactttcttggccactaatcagtatttttcaaggtcagatacgacttcgcagtccgtaaggcctccacccaaaatccgccttgccatattaaccgtttgccaatcacgaatgttcaaaagtgcgccattaactagccaaggtcgcttctttagaacgaacttcttaacctcttgattgtcaaagaaaataccccaaactctttcctgttctagcattattttcatcctccacttgccttttagctctcaaataccttccaaaatctctttaactctacctttaggaacactttcctaacaatatcaacacttagttcaaagtcagcttcatgttcaatagacatagagtccatggactgttggcgagcatttttcacatcattaccttcaattatctcgacatcgaagtcttcttcctcctcttccattaccacctcttaaagatgaagctgagggtcaacagggggagagaccccactatcatccatgcccgtccccagttaagtgttctaaatactgagatcgatgttatcctcctctcttgaagtcatactaaacgatttaagagaaaacaataggaaatagacagcaaagaaatccaaaactcttaatgaaaaaaaaaccccttctaggacaaaattagccctgttgaaatctcaacatctcagaaggagtaagtgatattaaacttggaatttgatcaaagtatcgctaaatcatgtgataggctccggtcaacttataacaaaacattctaatacaagtgcctcagatgtttgagaggcctgagctcttcgtgatgcaagaacacctcaagcatacctaactctgaaatatcctgtaggcatccctaactaaccctaacatcatgcaatcacaataaaaaccgacagttctttcctcttcaatctcccgtctagagtaagaattatataacttaattgtgcacaaataaaccttcaatgcaaactataataatcatacaaccaaacttggcagtaaacacagtgaagtaactgcagtattaatttcgaattagttaaagaaattcagattaaaggaattcatctccacttccttatttattttgtgaggttgagttcatacaatgaaagatcaacaaaattttgaccataaaaagggatcacctatcttcatcaattaatcaacaaaattgcaatatttcttaactcaataaactagaggtcgcaatctggagcactagaaacaacaatggcaacaattagaacaaactttactccactagttagtaaagctagaccgctatcaatctcaaaccctctttttcctaggcaatgcatgtttctttgcagcagttgatggagtcttgccagaatgtggtagtagaccacgcagggtcgccaatattgcaaatccaaagaaaggccagtacatcattagcagcttatcggatgctttcccagaccttaccatttctgataatatagcaacctgaaaacaaaaagttcacaaacaagttcaagaaagaaaaacaaaaaagtgatactttcaaattacaccaagttactctaagttaagaggaaagtcaagcatcttgtgctccaccatcatcagtgcaaccaaatgcattggaaattcaagcttagtaaaaggagaggtaatatgatattattgggtggatattgggattagctagctactcttggccagaatggaggagcaaaaaaagaacgtagaaaaaaaaaaggcaaaatatgattgaacttggtaaattataataacttgttttcaggaaaaatggagccttaataatcatttgaagatcagcatctaaaaagtcaaagccatcacaagcatgagacatgttaattcatatgggataataacaacacaacataataagcagagcaacaacaaaaagttcatacattgtacg

SEQ ID NO: 185750 - DNA, 4279 bp, Cannabis indica
ggctagtttgttgggtccaacaattcaaacaggcccaaataagaataataagtgaagccttagcatttttcccttttctgagcacttcaaacaaaaagcaatattgggttagatatatagcatatttgttttaaagtaccacataagaaattacaaataggggatgttgctcattattttataaacactatttatttagcaacttcctttaggttgcataaaaaaatataaatcacaggaaaaagaagagtttaaggttctaaattttcaaaggtatatgaatggctgaaagaaacttatcaggccaaggatattttattttttaatctttgatacagaggcttaggagattactcttgttttagtagttgttgatgaagtgcttgtatattgtccatcctttatttagaaaaaaatcaaggatgggctctccctgtctagctttacaatatttggagaccagaaactatcgcaattgcaatgtagatacccgagaggaaatcgaaactcaaaccttgtggaaggaaaccacatatgacattcgagaccctcttgggtgctgtattatgtccatcctagaaaaagattaggccactaatagccacttataacttgaagctccagtcaaactctttcttggtattttctgttatattcagctgagttaattcttcccaactaacccagctcactataaaagggtccctctcttgtagttgtatttattaagttcaggaataataaaagacaaatacagagtattttctctgttctttttccttctctttcattttttttcactcatatggtatcagcagaacatcaagattctctttcaatggctagacccaccacccattctcaggacggcattcccccgcccaattccgagaaccatccaacagagtctaatccagacacaacttctacaccaccaatggtggatacttcagttgctgctcgatgaaatgccaaaccaagagctcgtacccagaacgatccagacaccatcgcaccagcaaattcttctcctgctcctattgctgatgttcccgttcagggtcgatggtccttagccgatcgattggctcacgaagatgtttccagcccattcttcctcagcaccggagatcatcctggtttggttttagtttccaccgtgctcaatggcgctaactatcaatcttggaaatgaggaatcatgatggctctcacgggaaagaacaaatctgccttcattgacggttctcttcctcgcccagccgccggtacactcttctcccttcttggattcattgcaataacatggtcatgccttggcttgtcaatttcgtttcgtctgagatagcacaaagcattatgtactttgatcttgctaccgatatgtggcatgatttgcaagaaagattcaatgagggaaatggtcctcgaatctttcagcttcaaacccaattaactcatcttcaacaaggtgatcaatccgtcacctcttatttcaccaagctcaaaactatttgggatgactaaaagaattccaaccaaacactatgtgcacttgtggtgcaatgaaagttttcttagaatattacaatcaaaaccaggttcttcagtttcttactggtttaaacgagtcatatgcatctgttcgggctcaaattctacttaatgaacccatccctaacctctctagggtattttccatgattgttcaagaggaaaggcagcgcaaccttggttcttcaaccatttctcttgttgcctctggccatgcccctacaaccaatccccctccaaaatccaagaagccaagaccttcttgcaccaattgtggcaaaccaggtcattacgtagataaatgctactttcttcatggctttcctcccggctatggtgataaaaagaaacaagaaaaggctaaacctgctgcaaatcacacaagcaccaactcagatgtgcttcctactgtcaccaccaacacagacttgactacccaatgccaacaactcatttctcttctcatccaacaattaagccaagctacatctcgagaggataccaacaacctctctgctgcctcaaacatggctggtaagtcttcctcttcccctacatttacatggattattgatagtggggcaacacatcacatgtgtgctacccgaagctgttttcaatctttttccaatagctcttttccccaatctgtcgtactccctactggtgcaaacatccctgtaaaaggcatgggaacagtcagattaaacaagcacattactcttcaaaatgtgttatttgttccaacatttcacataaatctcttctcccttactgccttcattgaaaacagccttaatatagttgttttttctaataattcttgttctataaaggctccttcaccgaacattgtgattaggaaagctaaacggcttgggaaactctatgcaattcaacaagagatcaaccccaaatttcagcctacttgttgtctttctttacacaataatgtagatcaatggcacttacgccttgttcatccttcattgtatatttcaaatacattcaataaacaaatcaaatctggtttttcaattccagcaaaccattttgtcatatatgtcatcttgcaaaacaaaggaaattgccctttatctcaaacaataacttcactgaaaatgcatttgacttaatacatttggacatttggggccacttccatgtcaatagcatagaaggatataggtatttccttacaattgttgatgatgcatctcgatttacttggacgtttatgcttaaaactaaagctgaagcacaaattgtttttcccatgttatataacatggttagcacgcaatacaataccccaattaaagcaattcgatccgataatgctaaagaacttgcaatgtctgctttttatgcttctaaaggtataattcactaccactcttgtgttgaacgtccccacaaaactctgttgttgaacaaaaacatcaacaaatacttaacattgcccgggctttatgctttcaatctcatttgccccttgtttattggggatatctcattgccactgccacatatttaatgaatagaacaccttctgctctatttcatggcagcacctcatacgaaaaacttcattcaaaactccccatttatgatcatcttcgggtgtttggatgcttagcatacgcttctacccttacctccactaggcataaattctcttcaagaagtcgtgcatccgtctttattggatatccacatggaatgaaggcttatacccttcttgacatccaaacaaaacaaatatatcattcaagggatgtcattttccatgaaaatgtgtttccttttcttggtcaaggttccaacgataacattgatatgtttttttcaacaacattgcataccagctcacatagccattactcacaccaacaaggaaacacaaatagcaattgatatcccctcggtttccctctgagcagtcacagctggcccttacaacattgtacctgacatttcagcaaattctaatgtcaataaaccagctggtgttgttcccacatcatcaaccaatattgagcatgattccacaggtactacacctaaaatgatagttcctcatggtgtcattcccacaccacacataacaaagtccaacatcacttcaaatgttgaacctattggtgttttatccacaccacattcctcaaaaaacaatgatagcagtactgctactacaccagaaacaaatttacctcccccagctccaacatttaaagctggccgttccataaacaaaccatcccattttaaggattacgtttgtcacactcactccactgcctatcccattgaggagtttatctcctatgccaaactcagtcctcacttccgagcggctgttttagcagcatattcccacattgagcccacatcctatagtgaagcttctcatttcaagcattggctactcgctatggatactgaaactgaggctctaaaaaaaccacacatggactgtcacaaaattacccctcagccataaagccattggatgcaaatgggtatacaaagttaaatacaatgagctaggtgaggttgaacgattcaaagctcatcttgtagccaaagggttcaatcaaaaacacggcattgattaccttcaaacatatgtacctgtggccaagttcaatacgctaaaaatttttttagctgttgcagctatgcataactagaatgttcaccaacttgacatcaataatgc

SEQ ID NO: 185751 - DNA, 2717 bp, Cannabis indica
ttattagatttctgatagttttcacgacctttttgtatgattttttcttcccttttttgatcttaattgccactatttataatcacatagtaggaagttaattacaaagttgactgtaatctttttacaacgattatcccctgaaatcatgagatctgattacatgtcacgttaagtaaatgcggtttttatttaacaaaactaatatagatataacataataaaaaaaaatcgatatcactttcaaataaaaaagatttcaacaaaactaatatagatataacataatttttaagtaatttgcttctaattctaaaaaggctaattaggattttttctccctgaactttgacatgtaccaaatatgccccctgaacttttaaggttgttaaaaatgcctcctgaactattgagattgttggatttaaggacttttttctaatttttgtaaaaaagtctaacatgaatgaaagttcaaggggcaaaatttagtacatgttaaagtttgaggggcatgatttggtagatatcaaagtttgaagagtatggtttaatacataaacaatcattgaaatagtaaaattaaatgaaattagacaaaagtacttaaatccaacaatctcaatagttcgcggagcattttcaacgatcttaaaagttctgggggcaaaaatcctaattagctttctaaaaaatatataaaaaaaatataatttttttatgtgataaaaacaatgtaataataaataatctgaaaaaatagttattttaccacatattttaaaataacaacatttattaacagagttttataatttgactaaattaatataatttgctaagttcttttgacacatttcccatatatgtgattactttatttctccagcttttctgatttctccccacttacgtacgtaccccacttttcatctctgatcttttcaacttactctagtagtacgagtactactatactataactactacatttatatatatctttaaaaccaaacaaaatattgaatttacggttttgctttgagtaggattaaaagatttctatcacaagaacttaacaatttagagacaatatggttgatcgtttgaagagaggtccatggaaaccagaagaagacaaaaagctcttagcctatatccaacaacatggccatggaagctggcgtttggtgcccaaaaaagctggtagctacttcatctttcattattaataaataaaatgcacaccatctccatatttagatatataacctagttttaattaatatataacctatgatccaaaaacaggtctccaaagatgcggaaaaagctgcagattgagatggacaaattatcttagaccagatattaagaggggaaagttcacattacaggaagaaagaacaatcattcaactacatgctctattaggaaacaggtaccatactgtatattatataaatgtcactttctttttagtttctattaattttagtttctaaaactataaccttttatttaggtggtcagcaatagcctctcacttgccaaacagaacagataatgagataaagaactactggaacactcatctgaagaaaaggttgactacgatgggtattgacccagtcacccataagcctctgaagcacactctccgctcagtcgccgctgacccaaaagacgtttccaagctcagccacatagctcagtgggagagcacgaggctcgaagcggaggctcggcttgttagagagtcaaggctccttagagaaatagacgagagaaacagtaataagagtaacactagtacgccgtccgatatactcgccgccacgtcggatgagatactgaagaagatgcccaccacattcgctccgccgcggtgcttcgacattttgaaagcgtgggagagccgtctgttcttttcgaaaaacaaagaaagaagttatcatcgtgaccgtacatttaatgacactagtattaacggtgatggtgaagccagagccagcttatcctttggtttcactggtagtactactgatactacggctgagcttagctacatgacggcgccgtcaagccgtactaacggggggtcaccgttaagatttgacgagatattcgagaactgggacggcggaagtgatgatttattttcagagcaggtgttcagcacgcgcctcatggaagctgaaattaatccagcgatatgtaatgatcatcaggacattgggaatcacactgaaagaggcatttgcgatgtgcaatatgaagtgaacaggaaccattgtaatgggggtatttaataatggctatttgttgaataattgttgaccctcaaatttacccgtgctctaaactagtttgatttgaaactttgtctcatgtgtgcatgtcctattttaatgaatcaaacgaagcaacttaattaaaatattatatttcttatattctatgtttaaaagattattaaacttagttattttaattatgggtgttcatcaaaatgtatacacgctacaaactatccccactacacaaaaatagcaccttgaaatctttacagtgttgtggtttgtttcgcagcgtgtggtgcactatagtttgcgtattaaatttaataatcacagtttaaatcaatttaaattacactgcattatataatacaaacttatttatttttacagcattatttatatatttttttttat

SEQ ID NO: 185752 - DNA, 2705 bp, Cannabis indica
aagagaactggttgaggagagtcactctttggttgagattgagaagtacaaaggccagacctttcgaagctccaagaagttttggatcgcaagcccggaggaaatcactacctcagctgataattcaagcttcaaatctcagagtgttgctggatggttgatgggaggcttcccttcgcatcctctctatggtttctatgtgatggtcactgattatgaggataccttgctggttatagttgacctccaacaactcttttttcctttttcaagtcctcgaggtccctcttcaaagcctcgttctcatccagcacactcttaattctctcctcagtatccttcttagggttgtccaccttgacagcaatctaagattcggcttccccaagctcaaccagtggggccctgttagtggcatgcagctggtgattcttgacgttagcatgctcaagctccatgactagggtgcctacttctttagtgactctctttgccatcaaggccacatgataaagcaattaaatgtaagaaaacaatatacaatagcgagaaaaaggatcaacgctactgcaagttgctcatgtctctaaggacagtacgaatgcgctactggccatttggtttaagagatcggcagcaaagggtacgatcggccccaccttggccgccagtcacttctttagagccttgatgtctaccatcggcccaactgggacgatggcgaaaaggccctttgatgtctaacgatgtgtttctacaaacaacattctatcaatcaaacatgcagtatgtactaaacccagcttgaatttagcatttctatcctagatacagaattgcacaaagtcaacagagtgttgaagtacaaaatagagaaggatgccatgcgagttggctcaagtgtgttaaaccccgtctatcgcgcaattgtagcagttatcgtctgacaagggatggagcaaatcaggatttatgagctctagctcgaagaatgcagagggacttctgtaggttgaaagtgatgaaaagagagtgaataggctctcgaaacttatttatacgccggctgaagtctttgcaattgaaaaggttggattcaatgatcagcccaaacattaaacattcatcattgcatgcctcgtgtgatgtgtttattaaaagaaaggtcatctcaatcaacttgtcatctatgtaacaactcccaagaaaccgatgtccatgtgccatgctagtaatacctgcggttattgacctgtcaactgacgacagctcgtgggatgagaagcgattccaaccagcaccacatgtcaagagtttgtcatgcataagcgggagaatattgcaagctcccagaccgcattacgtactgagagcttggggtaaatgttatctttgtttctgcaagatatggcacgtggcatttaatggagaaggcgaaattaatcctcctttgattaaagtcttttaatactgctccattgctgaagggcttccccaaactaagaagcatccagaatgaaagagcatgcagaagactactcacgcttgcctttacttccctaatatggaaggcgaagtgtttcccctagacttggaagggtctaatggagctctcttagcttaagtccagatagatagtagaaaaacctaaagcggatatcgaccttcatgaggcgttgcggacgtcgactttttacacacgccaggtcaccttatgcttttcttgacagaatcagatcttgtctcctacatccaagcatgatagtgcgggtaccacaaccaccatactaggacattacggactgctgcttgtaaaggagcgaactttgagcgacacgtgttccctgcttttaaaggttgaacctttgagtgacacgtgtccaagtgaaacaaaatggtccccattatttagctattgcacgcacgggcacaatgctacccacaggatcatctagtcaactttacattgcatgtaatttatcccaacagagggatttaagtagaaatcttaggcaggtcataggtctgtccatacccgccacttagcctataaataccccattattctcatgcaaagggggcgagccgaaacacataactaaaactctttgtaattaccattgatcttgttcttcgaaaagaaactaagggtaaagagttagggtttcctgcaaaaatactgtaaacacacatcaatacttgcccttagaggctgatagaatgactcatgaactaaggtttattacccaaacaacgtaaaaaatcatcaccttctaatttttgcaagttattatttttttagctcttaaatatttagtttcaaaaattctcagtaaatactactgaaattctttttgggaaaggcctgcaatttcatatagagcatcatttaaacataagagttagattctatatactctgctcaattcttatttcatctcgccaattttaacaagcgagtattaaccatttttcagcatcaacagttcaattttcacaagtataatagtttttcatatgatgctaaaaacaccaaactaaatccaaataaaccatatatagcattgataaataattttcaaaaaacttcaaaacacaaaaaaaaaaaaaaaaaataaaagcaaatttgcgtcaaaacccccttatgttttaatttttatacacttaactcctctatttttttttgttaacaaaaccctcttatg

SEQ ID NO: 185753 - DNA, 2361 bp, Cannabis indica
tagggtgtagcatgaattgttatatataaaatatatgatattgtaagaccttatccctatgttatattatttataatacattctatattatatatatatatattatatatatatttcgaactatctggtttgaaaatagttttagttgatcatatgaagcacgccatgtatatccagtttcagtttgatatattatagtttccttttcaatatatatatatatattgtagtcatatatatcaaaggatctatcaacagcttagatcatatatattttgtagctctatatgtgccaagtgccaaccaagagatcaattttatttgtagaattattaataacaactgaaaagccgacaaggaaaattggtccccaaatttaatggatagaaaaggacacaaagtaatgtatttaatttttttttttccatctcattatttcaaaaactacctacctaaaagaatcaaaatgcatgttcgtgaaacgaatgtgaaaagattacccaaaacttattaatgcatttaaactatttgtttatgggattttactattttcttctttccaaaaaataaacctttcgaaaaaaagagagacaacgaaatagtgccacaaaaatagaaagatagaaaaaaaaaaacgaggacacgcgcgaaagtgtgtagattttgattacagccaacaaattaaacgactggtatataactatagatatagagtgacccctccatgtgcttaatatatggtgcatgaatattctcagccaaaaacatgataatctcattcaccataaatataaaaagtataaatatatattttttaaaatgaaaaaaaaagtaggggtcacctggatttgatcaccgatattgacaataaaagcgtgtggagcaggtttgactgttatccaagagttagcttttcggacttggagccccgtaacttggtgctccggtaacaaaagggtcattcctccaggatccgaatgtgacgacaaacctagcgtcagctcaggttgcgggcactttgggtaaaagttcactctcatacatgctccaatctctttccccccaaacgcattttgtagaaactcttctttcaatcccaaattcaaagataacacactcaacaacctctcacatagcttcaccacttctttaccatattcatctataacttctctacaccaaaccaaaaaagaaaaaacagaaattaaagacaaataatattttcatctcgagaaagtggtcgtggtttatttatttatatatgtacctgcagttgggaggggaggtggggccattttattttggtccttcaaggacaatggaaggtagtgaagaaaataatagtcactccaatcgagaatggcacctttttgtatccctaaacgacttccgtagccttcgtaagttttggggctgtttgcatagagttgtttgtcttgggccggtaagtgaaaaaactcacgccagatttgtaaggcccggtccataagttgggggctaactccgtggttcactacttggaagaaaccccactcgcggcacgactcagaaactactctcatcgtctcggctcggactaagctgtcttcgctttgtaagccgctcatgtcgatcacgggtatgttagcgtccacgtcagcttcggcttcagctgcagcttccggtactacggacctttctgagccgatgacgtggcagaaagacggtcgttctgtcgggggcttgatgtatcgttctgggattgaagatacaccgctgtccgacaaggactggactcggacgattggctcaggccattctgcttgcggactgttcatcattgctttttttttttttctgggaaagtttgctccaataccgaggtaaattgtattttaacgtaatccgtacgataaaacaaaatactagactagtagttattgtgttaagattgagattttttatttatttattttattttatatatatataaaaaattatataatatgaatatatattagtggtttctttcttgtgtggatgagagagagagagtgatgaggagagtggtagcttaaagttgtaagtagtggcgcggtagtgaagtggacatgaaagagaaacgtgaaatatatggggtatttaaagtattgaatgtgtgtggatttagagagcactttcagcctaataaataataataaataggtatacagaggataattactcaaaattttatggttataaatgttataaatttaatgtttatttttagtagtcataagtatttaatgtattagtaaactataattttctttaagttttgtccgtgtagagattctatttgtaatttattaaaaaaatattactacttttaccgttaag

SEQ ID NO: 185754 - DNA, 3092 bp, Cannabis indica
gaccaaaccgactgatgttcagctctaatttcatgtaagtatcctcatggagatcaccatgtaaaaatgcattattgatgtccatgtggtggagataccactagtttattgcagctaaggcaaagagtagtttaagtgtgttgaattttgccacaggggcataagtttcgaaataatcaatgccttgttgttgtatgtagcctttggctacaaggcgagctttgctgatggtgtattgtcctgaaggtaagggaacaactatccaagtatggttggcttctaatacatcaatctctgatccatggcttggttccatattttctctttgcatgcttgggtataggaagttggttcaagcatctggtaggttgcaagaactgctgtcctgaattgaggtgagagtttatggtaggagaggtaatttgtgagaggatatggtgtgctacgggtgttgttgcaactataatccttaagatggacaggtgtactgatttttctgtctaatttggttgatttaggagcttctatgttgttttttgttgttggtaagttttttgctaattcagtagctggtttgtcagctggtaagttatctgcattgtcagctagtttgttagctggtaaggtgtctgctgaattgggtaaatctagtaagttgtcatattgagctgtgggaaaaaaattgatcgatttctctgtttggtttgttattttgcagagagtatattcctcataaaatatgacatctcttgattgaaatatatgatttgtttgtatgtcaagaagtgtgtatgctttcatatggtcgggtaacctatgaaaatgcatgatttgatccgaggtgcaaacttatggtcagattgagtaggggaaacataaccaagcatccaaagtttcttagatgattatagttaggggttttttatgcagcagttcatatggagtgttatctttgagaagaacagatggtgttctattaatgagatagacaacaggtttaaccatgtaattccaataggataggtggagattggattgaaaagtaagtgctcctgctacattgagtatgtgctggtgttttctttcaacaatatcattttattatggtcttgccacacatgaattctggtgtgtggtgccttgagtggcataaaaactagtgagatttaactcttttacattgtctattcttatggatttgatattctttttgtaatgaacattgacaaaggtgaaaaaattgtgaatgattgtaggggcatctaatttagcccgaagtacatataatcatgtgtaccttgaatggtcatccacaatggtgaggaaatatttgtatccttctgtggaaggagtggggtaaagtccccagatatcaaggtgtatcaaggtacatttcaagtgagacaattatagacgtagatgcatcaaaaggaaattgtagccttttatttactttgtttgtaatcaatatagaaggatgaccaaggtgtgaatgccaatggtttgtagtgtgtacattacaagatacaatatgttaggcttggtaataagaagcatcttggtgtaggtagtaaagtttgccaattcttctagttgtcccaatcatcaatgtctaagaatggtcctgaatatggcatatgttaagtgtaaaagaaacattatatcaagtgtcatcaagtaaagaggtaatagaaaacaaattaattgaaatttaagcacaaagggaacattataaagagtgatagcagaatttaaagtgacagtgccaatgagttctgtttgtacattattaccattagggagtgtgacagatttatgtattgtggattttgtgatgtgagaaaaacatctaatgttacaacaaacgtggtgagtggcaccactatctattacccaagaaagtggaggttgagattttttgttaccaatggaattgttgattgttgggccttctgatgttgaagcatcagtagttggctacaattgctggcttagcatggatatcggctgtcgacattgagctgcagtgagttgagatgttggggatcaccttgtgaaattgagagttgatgagtctgaagagttgttcaggggagagaaccggtttttggtttcttattggtgttggaagatgtagcattggatcgatgttttccatattcagggggaaagccatgtaaaaaatagcacttgtctttgtaatggccaggtttttgacagtgagtgcaatgaggtcttggtcttttgttttttggaactttgattggcagcatgattggggtcaattgcatgaggatttgtgtttattgcagtagtaatgggaggtgttaatcgattgccaagggttctttgtctttcttggtgaatgaccatagaaaaaactttgtttagtggtgggcaagaatcaattaacaagatttgatcaagagtagcatgataagtttcattcaatcctttgaggaattgtaagatcacttgatcatggttgatgtgatcttgggttcgtgctgcagctgcacaaggtttatttcgtcccacattgctgtcaatttagtaaagtaagcactcactgtgtcatcaccttgatgtagatatgtcaaggtttcatttagctcaaagattcttgggtcattaccttgattaaacttgttgtttagaatagctcacatctcgacagcagtgtcgagatacataatactgctcttaatctcaggtgaaacagagtgtagtatccatgacatgactaattggttacatcttatccaagaactataaagagaatcatgcaaaaggggttgaggtaaagtaccttccaaaatggagttttgtttcttgcacctatggagatcttgaaatcttttttccatggctgaaagttgcgatcattgaggattggagtagcaagaaccaatccaggatggtatgcgttacttaggtaaaatggagaacgaatgtcttcatatggtgctctatcgactggattggatcgaggaacatgaatctgttcctataaggattgttcgactggattggatctggaagcatgaatctattcttgtgggatttgttcgactggattgggttgaggagca

SEQ ID NO: 185755 - DNA, 1630 bp, Cannabis indica
taaaactaaccctctagccatatccaaagcaagttgaatgacgatcttaaaggcgagttttgttctcctattcttgaataaatagttttttagtgtaccaccaggaaggtactcagcaagaacacaacaagcattggaaatatatgaaacttgacagccattgagggagttggtagaaggaacttcgagcttcgaaattcccattgaagctcctatgaactgaaagctaagcagttatattaaagcaaatgtatatatattgaaacaataagagggaaagaaagtacatcaacccctcactccctcaaggcaaaagaaaaaagaacaaaagtcaaaaagaaaatagcaatactaagctttgcatcagataaatgatttaaagataataattacacacaagacatcatattctatgagaaagtgataaatttttcatttttattttcacctttgtaacgttaggatggtcaagcttatgccaaacagacacctcttgttgaaaagaggccctaagagaagcagttctgcaggtcatacctccttccccccaatccagtatcttcactgtaataagaaaataaataataaataaagaaagaaagaaataaaagtaaaatggcattaatatagtgtcactagtacactccatgaatttcataatttctttttctttttaaatattaaagaaccaagcgtcaatttcacgaacacattgtgtttagtatttcatatagataaaagaactattagcctaaaaatcaacaatgcaaactagttgatggaataacaatcctaaaatataaatcagattttaaaaaatgtagacattattagatatatagcaggaagatatcaatatttagatacctgcaacatcttggccatcgtagacacctttgtaaacaatgccataagtccctttagcaatctcacgtattaatttcaattttaacaattcgatcccccactcttctttcttgtgaaatttaagttccttcgaccaagatacattgtagttcatcttctctaactccacaccaaaagttctaagattaattgtatcggctcgaacaaacttattattatcatccctaaaactttcctccacccttgtgactaaagccaaagatatagattggctatcagtaaacttgcttgaatccatattcaaaacagagtgaaaaatcttcctttcaagaatccaatcgaataataatataaaaataatagctcagttgttatgaataaaatatgacgagagtaaaaatggaaaaaaaaataaatgaaataggattggaggagattaaaatagagaaaaaaaattatcttgaatgtactcttttcaaaatccactaaacttactaacgtgttgtattattggtatagtggtgtattattcgtatctcgtaaatcacttaactgttttatagtgaaatacttgttacctattcctaagctaactattctctgtgattctttacctattttaatgacaattacactctaatattttatcaatataaaataataataataataaaatcaatggcatttatcatctatatcacgtggttatataataaaagtgttgtttttttaataaaaagaatattacaatttaaatttaaac

SEQ ID NO: 185756 - DNA, 2071 bp, Cannabis indica
aaattaaaaaaaaaaaaaactcagatattattcgttattgtgaatactttttattaaaaaattgattttgaatttaaaaataagattatttaaaattaaaaaaatctgatcaggaataattgtaggttgacctttcaaaaatttagaattagaaaaataaaataaaataaaataaaagataaaattgtaaactgtgtacgaaatatgtacgcctcatactcactaccactactcataataggacaagagtcgctagtacggaaagatcaaagggtatttcagtaatttcattaaaaaagtaatctaattggccgtagtatatttctcagccgttagattcgacacgtggttatatttcattggttagtggtattgaaccgaatattcctctaaaacattcgaaaattgaaaaaactcccccgctaactccgcctatcacacaaatcgattataaatacagatttctcgtcaccacaattttgaaaggagaggagaacttttagagagagaaagtaaaaacaaggcctcaagaactagagagagaaagtgaataggaaaattccaatcgtcaatgacggaagcactcaagagaaactaccagattttggaggagatcggtcaaggaagattcggtactgtttacagatgttcttcggcgaataatcaagattccggtttctttgctgtgaaatcaatcgagaagcgtttggtttccggtgactcgctcgaatctcagtgtttactcactgagccgaagattcttcatcatctcggtaatcatcctaacatcgttaagcttcataacctttacgaagacgaatttcatctccatatggttatggatctctgcgattcttcagatctacacagcctaattactcgccgagtctttaacgagtcggaagccgcttcggtgatgactcagctcgttcaagctctgtctcattgtcatcgtcacggtgttgctcatcgcgatattaagccggagaatattctcttcgatcagaggaatcggttgaaactcgccgattttggatcggctgagacttttatggacggtgaattgatgagcggaatcgtcggaacgccgtattatgttgctccggaggttttagcagggagagattacaatgagaaagttgatatgtggagcgctggtgtcgttttgtacatattgttagctggttttccgccgttttatggtgaatcggtggttgagacttttgatgctgtgcttagatcgaatttgaggtttccgactaaagttttccggtcggtttctccggcggcgaaggatctgattaggcgaatgctttgtaaagatgtttctagaagattatcagcagagcaagttctgagtaagtgaatttcactttagccaaatagaatatcttaattttaaatcaacatttaattaatcattaattaatttattaattacaggacacccatggataacaaatggcggagaaagattaggagatgtttgagtgtttcaaagcaaagcttcaaaacggtgccgttacagagtatatagatattagataatagtaaagtgtctgatgtacatagataaatcagaaccgtcagatcaaaggctttcttttctttctctcgttttttggggaaagcaaagcaaagagttagtcagttagtagttactagttagttagtgagtggtattatattgagagttaaaggattttggtattataatatagagtggtttcgttgagattttgtacctaatatagtaaataataaaatagtaacccggattttctagtgtatctttttcattgttttcaagtttcattcttttcttacaagaatttattcaaacaaccacactaagcaaacgaaacaatttcataattagttagtaatttcttatataatactgtattagttattaacatatctcattatggtttgtttgtccttgaccattatccatgacatatataataagataactaactaattaatttcttttatcaatcatacgttttttattaaaaaaaaaaattaaattaattaataacaaccatttttttttgacaaagtgatt

SEQ ID NO: 185757 - DNA, 962 bp, Cannabis indica
cattccgaccttcacaactggtctttgttacaaatggaactttaacttaaacaagaccttattaaagcaaaacataaatacaatttaatatcttttatgaaaaggaaaagaaatacagcacatcattccatgatattcaaataaacttaaggatggtgatgtgtaaaaattgggtcgtctaatcctacacagtagcatcttaatgtaactgaaactaataattgtctatatcaaataaattaaatgaacaagtttgggaaatctgatcatacaccagcatattggcatgactaaaactaaaatagtgtggaaaagaaaaattcatatgataacttgaagcagcatctgcttcttcaaaagctctagttctataaggtaagtgaagataagtatttgagcaagaaataaaagtttgaagctttgaattataggtacatgcaattatactataaaagagctctccacaacttacatggaggtgccatgacaggtgggaaagtgcccaacgacccagcaccataatccacaagctgcctctgagcttccaattctttctgaactagttttccatagccccctctacgtattacatattaaggaaactaaacagtagaaagtttcaactcaaaatttagatatgcaattttttcaaacacaaacattagaacatcaagcaaataaaagtaataataaattagaacaaggccacatttttaaatattgccaaacacacaagaacctaacaatttttataatttaattaagatataaatatccatagagcatttagctcatattggttagttgattatccatatcaaaactttagttctaactaatcaggcacaaaagatcgaaattggttctgctttaaaatcccaccaaagtactattggcaggatgaaagatggattatacataatgcctttcaactgtgtacctaatctatatccttatcatgt

SEQ ID NO: 185758 - DNA, 1547 bp, Cannabis indica
taagtagctaaatcaagcatagataatcaaatttctcttttataattcactatcggaccaaaatttaatagtttaatatttttaaaattaatatttatagttaaatttgtttagtacccattaataaagtagattctgatgtgaaaaaaataaactatgtaaatactttaatattcagatttagatataatatttattattcagatattcattttcatcttaaaaaaaaacaaatacacccataattaaaattaagttgttaaaaatgaaaatatttgaataataacatttggcaccatttaaatagagttgcttatcacttctcagacaccatgtaaatgtaacacgatggcctttctatcaccctaccattgaattggacttcatgaaactgtcactcaaaattcaaaggcaaaacttttattagtcaaactcaataccaatacatgatgttaaataataaatagcaaactgcattgttaatgaccttcagatacatgtatattcctatactctttttcccttgaagttatcccagtgagaaattggtaacagattacatacgtgccaattacagctttttagtattatgtttgtgtcatttatctattattctgcttgagaaagaatttctgatttctatccttgtcatatgaacaaccataacccacaataaccagctatgctacaagatcttcgcctacaattggttgaatcaactccacagtcttcatcacttaaacatctgtggtcgttacgagcatctgcaacatgacaagcactctcgatgtgttggccaccaaactctccggtgttaagcgtgttagcagggcatacttgcatagacattgcacttgccagcctcacatgcttttgtttctgcaaaatcaattcagacatcaggtgcagtcgagaataaattttccggggaaaattccaagtgaaatcatctcatgcagggaagagaattttgcaggataagatgattttggtagaaaaacagaaaaaagaaaaacaccttgacaaaagtccagttggtagagatgtaagcctccggaagtctctcgtgccaagcacttaaaacaggtaaggggtgaccctcagtcgtgaaaatatagttctgattaaccagaaatgaatcatcgaacagaagatataaatacttgcacctacagaaaacagatgtgttaatcccaaaggcatgcgaatatcgtaaacttttgtaccatgtttactttcttgtactggaagggtgaatacaatgcttacgtttcagcgaggaagaaactgtgttgatgatcctccaactgcatagttgtcacatctctaatactagcaaaccctccttcaactttggtgtataaattaagagaatttactattgattctccaacctctatgtaccatggatctgaacaatgcaaagggcagtactaagttaatgaagtcaaaatcagagcaataactaggagttgtaaacaatgtctgtacataataggcttgaaagttgaaagcatgcatggtcaaaataagtatggagtaataat

SEQ ID NO: 185759 - DNA, 2204 bp, Cannabis indica
tacaattctcgggatattacacgaccactttctccaataccaactacactgaggaggagaaatgtagtcccaccaatcttcgtctttaatgtatatcctattaatctatttggcccaaagatcatccttttttgttcggatggcccacacataattaccaatggctgctttattttaaatgcgaatattgtggaagccatgaccgcctaccttcttaggcaaaaaaaccttttcctaagctatcatccccagattagcaccatatgcattcccatgccatagaaaagctcaaaaaaatggcattgatttccttcaaaattcttttcgaaatcaaaaatatttgactacaatatgtatggatagaggttagaaccgagttgattaatgtgattcttcttgcaaaaaataggtttcttgtactccatctttgaattcgcccaaccattttgtcaatgacaacatcacaatcttgagctgagattttttagcacatattagaattcccaaataccgaaacgataacaagctttgttaaaatcttgaagcgcccaataacatttcaatctcttgtttctccattccaccacaataaatggatgattttacttcacttgggaataaccccgaggttttggagaataatttcaaccttgtaacaggagataggttgatttgaagttaccattacagaataataatacatcttcagcaatgctaaggtgattcagcttaagctcattacacctttcacaaaattgaaatccatccatatctccaattcttctcattatgcaagacaaatactccattcttaagacgaacaataaaggtgacacgggatcactttgacacaagcctcgtttagcctcaaagaaactgtgcatctctccattaaacatgggggagaattttggagtctaaacacaattcataatgagctttgtaaactcattaggaaacccaaaagcatccagattctcttcgataaaatcccactcagtcgtgtcataagctttcttgagatcaagcttaatcatgcaactcagtttgcaaattttcctttcatagtatcacactagatctaggaaaatcatgatattatatgcactataaaatttccatgaacaaaacctccttgtttctctcatactaagtcagtcaatactttttttagtctggaccaaatcattttcgtagccaccttatatagaacattataacaagcaatcaatcaaaaatcgcctatatatttaggacacttactcataagaataattggtaaatttttgatgtgttttctctgaaaaataatttcttattacttatattttgttcgtttgttggtctcaatttttattttagcacttatttcaaatattgagagatatcttaattatttgctcgtttgtttctatttttgtttattttggtgtgtcttccttaaaataaaatcaacaaattaaaaaaggaaagtattttatattttgagttctttagccctttaagataaataaaaagagggagtagtaagttttaatttttgatttgtgtgtttagctctagacgtcttttccaggaagagttgagtttggcttatatgttaaatttagcattgtatttggtgctactgatgtacttttttgggagagtttatttctgtatttttgctaactttattttgtaggtatttgaaaaattaaaaaaaaaattaattatcttatgtgccaaatgaagagattattaggtatgtttttggcaattagttgtcaaaatattatttaatttattgtgaatttaattgattttattgtgtttattttttgcctctagctgctcttttcttctaaggaaagttttattctcagctcgttttatttgtataggaatcttttcttacaagagaaggcattatcttatggaaagttgcctatttttaggaaacttgacttttcatttttgtaattgttgaatttgatttttccatgattatagcagatcaaataaactttatttgacaattatcgaagaccaattcatgatcttggtcaatttttgaaagttttctttttggtcctgatttgttgctgcataatctgaatttgatgctgcaaattagggattttttagaaaagttttagacatcattgagaacgtgtttatggctatctctagggtttctaggttctataaataggacctagaga

SEQ ID NO: 185760 - DNA, 1697 bp, Cannabis indica
gtttgtttttttttttttttttctttgttttttccaatgccatcaaaacttttgttcatcaccatcatcacaacccttcttcttctcttttcttcaaagctttgttttttttttttcactcatttctctcctcagtttcagcaccataagcaacagtgtacggccactaccactacaaccattgccaatggcaatggcaatggcaatggcaatggcacaacctcatcaacattatcatatgattaggctaatgtttttcttacatttctttttccttgttgttttcgcctattcggaaatcgaccctcttttaacattcaaggaatctttacatttagagaacaattccaaatttttggccacttggagtgcctcaaccgcgccctgctcggggcgcgatgctaattgggaaggcattctttgtagccaacatggtaatgtatggggtttgaagcttgagaatatgggactaaagggtgttattgatgttaatgctcttaaacaattggttgatttgagaaccattagttttatgaacaatggttttgatggaccaatgcctaatcttggtgaacttagtgctcttaaatcagtttacttatctaataatcatttctttggtgagattgactctgttatgttctcaaaaatgctttctttgaaaaaagcagatctttctaacaatcattttgtgggtgttattccttctggattgacacttttgcctaagcttgttttgcttaggcttgagggtaatcattttcaaggccaaataccacttttcccaaacataaaatgggcttcttttaatgtctctaataatgaattgagtggtgaaatcccaccaacacttagtaatttggatccatcctcatttcaaggtaagagttttatacacaaaaagagcatttcttttttgtcttttattccatgtatgatcctattttttgatgtatatgattttgatgatgatgaatagggaatgatgatttatgtgggcaacctttgaaaccatgtggttttggaaaaccatcattactaagcatagtggtggtaattgtagtggttgtaattgcactagctgcaatagttcttgtcattatcatcctaagccggcgcagcaacagcatcagccgtcgtgagccagctacttctatagaggccccgccttcgcctgcaccaatatcagtgcaggcgaaagcagggcctagtaatagtttaaatgcttgtgtggaagatcaagcaggcggcgatgaactgcctcagagttcatcgccgcttggaagtagcgcgagtagcaagaagaaagttgctgacaagtttaaggtgacatttgtgagagatgatagggagaagtttgacatgcaagacttgcttagagcttcggcggagatgttgggtggcgggcaattcggttctgcctataaggctgctctgttgagtggtcctgttatggttgtgaagaggtttaagcaaatgaacaatgtaggaagagaggagtttcaacaacatatgaggagattaggaaggttgagacaccctaatttgcttcctcttgtggcttattactataacaaggatgaaaagctcttgctttttgactacattgacaatactacaaccttggcttttcaccttcaaggtacacacaacaattgatcattaatttttttaccaattaatattgagtttgttgg

SEQ ID NO: 185761 - DNA, 1928 bp, Cannabis indica
gaaacaaccatcatcgatttgcagataatatacaaaaaaaaacttaaggctgtgtgcctttttaggtagtaacttatacgcgtttactaatggctcattgcaactcaaaattttctaggtttccactgacagagtaagtgttcaggattctaatgggaggaatgttgaagcccagcttcttcctatatcgaatgccacttttaatgttagaaattattatgtgagagcatatttgggtggatctccgagagaaacaattaaatattggcttgcattttcggtgtcagtaccaccaattggtttcagtacttacataatttctaccactaaacaaacaggttggccatattgtaatgttttttagggtgatacatgtaagagctcttcaagttagaccttacaatctaatggttgttctactttacaggttctagtgtagccatttcttctgtgtacagatcagaagagagtatagacaataccatagaagtcggacaaggaagtttaaagctaatttattcagctcatgagggaaagcttatacactatgctaacaatagaaacttggtatgctagatcgaggatttattttcccgctacatttttcactttgttttatatgatttgtttcttgtacgaagttttgtttatttgtttctcaaatcaaaattatcacatatagataaattatttcacgaacagcgatgctaattttcttttttggtttccattctccttgtatgttctttgttatgcaattgctcatgattttgtcaatttttatatctatgatgaaagatggtgatgtgtttactgtgtaatgttcctaatgaagattacagcatctgcggaacagtcatacagttattacagtggaaacgatggtaccgataaagatcctcaggtagtgaattatctaagcacttgaaaatttactatgctttgtcaattcctaaattacttctgttgtttagagtagtttaagcatcgatatggttttgttttttctgttgaaggcttctggagcatatgtcttccgtccaaatggcacattcccaataaaatctgatagccaggtagctaaagtcatttaactcgtgtaaaagttttaaatgatcatggtgctgtcaatttatagaattgagtacctgaaatgtaacactcctatgttttaggcttctctcaccgtggttcggggtccagtactagatgaagtacaccaacgggttaatccatggatatcgcaggtagtctgctgctccaaatataacaagatcatacagttgttttagacctgatttatgtatatcaaattgtaatggtagtatggattagataacgtatgttttggatttgtgttctcaacctatggacatttttttatatagtttcagtaacaaacccatatgtatgcacagattacaagggtattcaaggaaaaagagcatgctgaagttgagtttactgtaagttaacttctgaaattgatctactaagaacagagtatcctgttaaatttgtttataattgagaatttactgtttgctggatatgttattctattctaggttggacctatacctgtggatgatagcattggaaaagaaatcactactcaaattacaacagccattaagagtaatggaacattctacacagattctaacggacgtgacttcattaagagggtattttaaacctctactaattgaatttaatatgagatttttgaatttacactgtgctactttatatatctttgtacagttaaatgtacaaaaagatgaagattttattggtttatttcaagccagcacaactttctttccttgttttactttaattagttcttacttgatgtaaacttcgatagataaattaggagcgggggatatatcgggaaaatttctctctttcttaggggtaac

SEQ ID NO: 185762 - DNA, 4801 bp, Cannabis indica
taggcttgtggataactatatgctacaaacgcgtttattgcgaatctaactttgtcatggttagggtcaattatttgtgtcgtttgttctcacatgccgacaatttagcgaaataggggaaaatgaaaattattatttcaggccattccctaacccttttcagctgctttcacgagataagaagttgcagggtttttatttataaaaatagctaaaagttaagaaaagttttcgatggctttcatgttcactgaaccataaagccattgccgaccacagtctactttattgcgtatccctctggcagagagaatttttttagattctaatctttttttaaacacggaattttagattctaatttctaatcagcatagaatacgatttttagccgcttatgattaaatttttgtttatgacacattttctaataaccgggtagttggcctgtttccccggttgaatgttttgactttccgttattttaaatgggatttgaagactttgttgttacttgttagtctttgaaaagaatagcatttgattaatctattaaagtaaaaagaaaaaacggtagccaagggtctttaattacatatattgggaaacgtatcgattctagtaggagagaactctaagttggacttctgaagagttgtgattttgccttctttttttttcttgttgtgtgctctgctggaacttgagcttcatctttggtgatgtaacaactcaaaagctaaaagtaaaacggaacgtaaatagcaaacaataataattaaggtttttaagggtttgacatattggcattacaggattaccttagaggtccttttacataaagaaggggggcatcttatctattttagggtaccgaattcttgataagatgagagaacaccacatggcatcactaagccagttgtgtttgtttgtggaccactattgggatggatcgtctcgttactatcatcccaatatctcatctcatgattttgtactcaatcttctcacaacaatttttcttttcttttttttgaaatgattttcttacaacatttattaattattagttactattttctttctcttttttcactccttggtgaaaaacacagatgaggaaattgggacagcctttcggtcatggggctcttcggcattcactggcccccactgtcttacaattatgcaatctcacaaaaaatcttttcgtctcactttgatttcccaatcctaccaataccatgatagtggttcatacttatttgagaccctcaacaatggtgtatcccttagattttagttgcaaatattaacgtcccacaacaaggactaacaacctacaaagatctaaaacccctttcttcccaaaccctaccatagattcatgactaaaactacaacaatccactaccacaagtccccctgatttttttttagttttgtaccaaacaaggagagcgagacaacaatgcatggcaaagtaagtttctaagccattagattcatggtagttgaagtacttattagtatcagtacatacttctttcatacttctttcacacacacacacacacacatatatactacattattttacaacaagtacaaaatctcttactttatgtggtaataaaaagatataagttccaattccataacaaaaggatgtaaaaagaaataactttacgtaattggaaataataaacgcaatgccatataatatggttgttagaacttagaacatgtcatggccaggtagctgagcttgaacctatatatataagtttatatatttatttatatatatatatatctacacgagcacaggcacagcttcatgtatggatgggacaaagaaaccatcagccatggaatagtgtggggtccaccttgggagagcgtcttatgattatctgacggttcttggtgaggtcccacttattaagggtccacacaaaatttaatatataaccgatgtttcctgatccccgtggattagggtcccactatttggtggtcataaaagcttaaaatatctttttcatttctaattattttttttatctgaaacattatatgtatatttataatttacacacgaacagaaaaagcctaccgacgaagttaagcttaacaataagaccgtgtaacttgttgaataagggaaaatcttagaccgtaatttgcgtggcgtagcgtggcgtgtgtcttgcgcttcttccttttacagtttacgttcttctacgtagtttcttgtcttatattattctttaatttgtgaccttttttcattatttttgcttttattttgtatctctactcatgcctcttttgaccaaatatatatttatacaagtgcgaagtcataatgttcttcatttacaaaacaaaaaatatatatacaacatcaattactttactactcattattatgtctttgcatatactgttatatattattattgctttcgatcatgtaatgtaaattacactcttctatcattattaaccaaaataaattagaataatacataacgcgcttaacttgttatatatttatacctatcaaaatcattattcatgattgactgattgtgatgagcttacttttttatataaaaagaaaaggctacatggtagtgaaacgataataagttggataatatatgtgtgttttttagaatttagactctcatgatcatctcatatgtcatgttcgctgattacaaagtttacatttacatcacacaagtgtgagcgaactacatgaaagctactaaagactagtgctagctctcctctttcaccaaaaagacaaaaaattaatactcacatatacgaaatagtgtccagtagtaatattgtatgcttctgcaattaagagcctttctgctctgggctgtacatatgaaagtacactaacattaattaaccctttataaaaagagggaacaaaatgttatacatatattatatgtaagtttaattattataatgggaatcacggtttgaactcggaaagattaatgctaaaagtggattaagtgtcatatctttatcgttctaatttaatattagatcgcatatattttaatttaataattatactatcgcttaaggtggtgctgattaatagtaatttaaaaaatatcactatcattttgctaaagaacatggtttgaaaaaaaaaacagctttgaaaataaagttattatatatgccttgtgggaaaattatactaaagtgcaaaatcaaattgtttaaactttaatcaacaaataattatggttctactctagttttggaatatcactaaattttcttattgattaagcaagaatatggtacaatataaattaattatctgttagattcttccaaagtatttatctctcacactcttactaaagaattttcttcatctacataagattttttatataaaatccaaacccaatctctcttttctctatacttctcaatctttctctcttaagattacctcctgaaactcgtctgatctcatccttctaaaaatgataggtgtcggtggtatttatagatctaggatatagatcctaaaatcggtggctacaagtgttaagttgttaagttagttacgacttaacaaacttaacaaatttcttgtaacagtatttctacgtcagcataagataaagtgcttccagatgagacatacgtttcctcaaagaaagactaaagtgtacgcttacgggatttcccagataggaaaggcaacatctggagtcgactatccggaactcccctccagaagaaacaactagccattcggaactcctttccaaaggaagattagatttcttgaagacttcttccggagtggacaggatagacttctgggaacgcccttatggacgacatctatctttctacaagactctcttcggatggataagttagacttccgggaacgctcttctggatgacatccattatttcacgatactagctatttctggatgaacaaattagatttccaaaaacgccctccagatgacatctaacttttcgtaactagaacaacttttggagatatttacgtttaaaggaaatataccacatacttattattataatataaaagtcctgatctattctcattcatttaaacttcagataactatatgtatgttttatactatttatttgttgcacataataaggaacggttatatactgatttgggccaagacagaacaaatgcaataagagaatattgttacttgggaaaaccattaggctgaggtcactaatttataaaatttataagagcaaagaaaaagcttaactgcaactttggctgtttcctctgtctctaaagactaaatggataagttaatgacagtatcacattttgcaaatcttagccaacccagcaaattactcaaaatccaatccatgcaattgaactaattgtgattccaatctctgcctaattaaccaaaaaaaaaataaataaaaacaagtaatataatgggattgtttcaaaaaaatataaaaattacaaaaatacggttttataaaattttaaatatttaaatatttttacgattttattttatttattttacagaaaatacggtcttttgttgtaatcttgttgattttttgttattctgtatgtcatttttttttgttatttttgtatcttattttaattgttattttttatgtaaatttcttgtttgatttttatattatttttcgtgttattttttaaaaaaattcattaaaaataatataaaaaaaaaaa

SEQ ID NO: 185763 - DNA, 3744 bp, Cannabis indica
aacactgttctttctctaaactaaggtcaaagctatatgaagaagtgggttggggaccataacgtgttgactattaccaactaccctctttttcttgaccatatcgatcgaaaccaaacccaacaatgatatcaaaaaacaaaattaattttcttatgaaaaaaaaaatatctgaagaaattaattaatactcatgtatctatatctattatctatctaattaatctattttatattaaatctaactacctacatattctatctgccactttataataattagatttatttaaaatgatatatatacatatatataaaattaaaatagtgagtaaatttaatgtccaaaccatccaaaacaaaaataaatatatgaatgtggggttgcttggtattccaaattgaagcaccgacctaaattagataagataatgtatataaatgaagattgttattgtgtaccagtagtgtccagtaatttttataggtgacgttctatggttagttagcaatattccttaaaaattatttttttaagttatataaaactcgatacttaactacaccaataacagtataacaccgagaaaagcactagacaccaataatattttttaacaattttcttaataaatgtatactataaataaagttgttggtttctttattaacataataaaacagctttgccaaaatatatattattgtcataataattttgcaaaataattcttaaaaaaaatgatctttcaaagaccttaacaacccatctcactcaaattatccattcaaatacctcaacaatacatcagaatttttcttttaatgtaagtatatcacttttacatttattatatagagacattttttttagttttagtatttgccaaaattataatttagttattttatatgacacatgtattatagttatagcataaatcatgttaatttttttttgaaagtttcattaaatttaagatactaacaataaaattcaaataattaattacatgctcatttacatttcgacactaattgtctattggcaaaagagggtagcatatcctcttatttcggtatgttggttgaggatggtaagattttgttatagtctctacttaatgtgtctttattttttgtttaagcggactgctaataaaattgctcataatttagctcaaggatcttattttattttgattgtgtgtttcaagaaattgaagttccttttgatgttcaaaatgttttatcatctaatatgaattaatgaagtttaatcttttataaatatttttctttggtatcgtaaattatttaatttttttaaaaacaaataacatatttattatcactacaatttacactgtcgtattaaaagctaaattataatttcttatgtaataagtaaatgttttaatattgttagagttagtcacatattgctaatgtgtgaaaataaaatgttatatataagatgaatgaattacttctttcattatcaattgatttttgagatgaaacctcatgcatcttacaattttaacatggtattaaagtaattaaaaagcttctgctatctccacctttgacctcccgtgggtaatgaacggggaatgtacccccaattcaattcccgctccctatttatacttctcatccctgcccccatcccacttattccccaataaatttggggtagagaaatctccattggacatgaggattcattgagtacctgtaaaaattaaaagaattatattaataaaatagtgtaacataattcaaaatgaaataaatagttttttaattttgaaataaatattatatctaatttatacttcatgttatataattataataacaataagctagaaatataatcaacacatacatttaaaaaattatacaaataactttaatacgatcatacaaataatatttaaaaaattatatgaaaactatatattgagctcgcatatgaggtgggtagtattagccccgacttcgcctcgaaccctcttcgggtaaataaaatttcccccaccctcgccccataacccaccaaagtggatattccctgtctcatttggggtgggtacccacgggtttccatctacgcaggtcaaatttttatctccaatttgaaaccttttaactaatgtgtaccaatttttagtattgagacctttggtcttatggttttttataacaggtcaaaaacctaacaagaggagacataagtttttaatttgaccctgatatcatgttagaattcgataaggtgcatgcgttctatctcaaaataaattagcaatgagaggagtagtccatgaattttctatatggttttctctttccacatattaacaatgtgagacttattctaataaacaagctttgaaactttattttgtaagaaattatgtaaagaatattattttatagaatgatactaaataatgtattgcaaaattgtatgatatgaaatgtgggggtacttttttctttgtttgttccataagggtgatgatgggcaataaagaaattgtaatggatgagttgagacctgaaaaaatagttggttgagaatgatccatcgtgtgtttggtgctacttgcacaaaccatacaccacacacataacaaaatgaaactaaaaattggcatataatatatatatatataaataaatatatataatataaataaatttatatatattgaaaaaggggtttcaaatttttggaattatatgctaaagggagattttgagcaaggccatcaaatgctttgttctctttagttgttctttggccataggatgtgaataaatgctgttgttaattgttatttacaactttattttttgtaatgtcacataattcctattggatttaaaaaaataattatttagaaaacaaaaaactatataaagtcattttattatgatgatatacatgcaatgaattttggtattataacctttattatatatatatatatatttttttttatgtgcatcgaacaaagtcatttttttaatgtcaataaatatgactttggtcccatttggctaattcttttatgacttatttttttttctttggataactattatagaaaagtatatttagtgtttagataacactaaaaaaaatattttatatgcaaattattctaattttttaaaacttagaaaaacaaaacttgtagaatctaagccaaatgaggctaacaaaacttgataaatattgaggtctaattaataagaagcaataatataaaactgatacaaggagagaagtgtcattttatttatttattcatttattttggaaattgagaaagaaattaaatagacattgttggaattatggtatggttccatgtcgatttcaaaccatctaaatcatattctatctcatgtatcacaaacttcaagtctagtatatcaacaacaacaacaacaaatatcaagttaaatcaatgctaaaataatctatatttttctattaattattttagatttgtatattacaaaagttatccataaaattctttattttgttaaatcataaattaaaataaaatttaattataactcaatctataagcgctataacaaaaataattacgctttttatatttgttcgtgctaagaattgtcctcaatttagtttgactaaaaacaaaaattatcaaaaattgaagtcaagagtaatataaaatctattttgtcatt

SEQ ID NO: 185764 - DNA, 3232 bp, Cannabis indica
tggaaaagaatgatgtgtcaataatatggatcttgtaaaagctgacctcacatgatttaaacttgcaagaagatgcgattgggacatggtctagtcggatattatttcaagcattattagcgatgaaaaattaatagtggtcatgcatatatcgattatatatgatgagcaagtatgtcatctctcctgcgatgagcaaagaccacttctttacataggtttggtctaaatgactaagtacatgttgagactcacatgttctaagttatcaacccagagaatgtccaaatatgcaatttaggatgatcacaaatatttattaattacaggcccaaaggcccgttatgcagtataacaccacaaagcctgtgagctcacgtgttaggaatatgaataggtgatctacaaatcaataagtcgcagacgttaagcaattaatcagtaatagataaaactgttcttgcatttattctttgcatatttgtattaattaagatataattaaatgtaataagggtccttttttgactggttatgtaagatcaatggacacttactctctatatgaatgagtaattcaaatcaaataaactaagctaaaactattgcaaaagtagactaataagtagatcaagctctgactaagccaatatacttctctgtcttcttcactttcctgttcttgtttttgtatatttcatagcctaaactttgagtactcgttattctaggtaagtactcgtataactgcaagtgggtgttcttgcttcgcttgaatactcactttttggtgttatctaaattcctttgataacatttggtgtcgtctgtgggaataattttctgatatttctaagattttagaggagaatcgcaatggctacagatcagacatacatgaataacaacaatgaaaccattaacctaggcataaccaatgtccctatcactaacagtggagccactcctgtcgacaccactgttggaggaaggggacatactaccacgactcccctaaacatttttccacaagttttaggtctggttggtgagacctcgacactggtaaccactttgggctactttccgccaatcacacctatccctgccactgagggtatagtgctattgataagcacccagtacacgacagtccaagaacaaatgcaagccttggaggctgaaattacagggagaaatcaaacccataccagatgtccacagcgaattcccaatcagtgtcgcatggataaccaagtaactaatagcactaggcgtcataatgaacatgctaatctccttaataatcacaatccatatgggcttgacttaaagttgcctatctgtgaccttgcatgtggaaagggccgcagttcctaattcaaaccatcgacatagccaaagggaggataggccggataatgaacgaacaattctgcatagtcgtgcacaatcgtgttttgaggtaaatgaccatgaatctcattctccttcctcgaggtctaatagtctttctcccatcatttataccaggtcaagcccagtctacaccaggctaggaggaagataccatgtacataggggagttttataagactgtctaaatgaagcattccttgcacgatccccgacgagtaatcacaaagttgaggaggaaccccatgatccccacatggccaatcaagatatccccttgctggacaaccccctgcgaatgtcaacaatgtgattaatgtccttaacccgctagtcgcacccacatcactagataatgtggtgatacctgcaaacataggagcgctagctaccccacctggaaatcaagttgtaccttccaacaatcctatctggcaaggaggaatcgatgatcaggagagtcttttgtgagcgaataacagaagaagtcaatttacaaattgcatggaacgttgtcgtttacggaggaagtgtgacaagcccgacttccaaaaggcttccgtctctctgagtcactaaaatttaaaggttcaactaatcttatcaattacttagataaatttcatactattatggaggttaaccacaactggtgaagtgtcgaatccttgttgcaactttggaggacaacgtgcacgattggtgatcattcaattatcagaagcgtcaatctcgatgtggaagacgttcgtagatttattctcgacacacttgttagtttttatagtctatatcagagttaaaaaagtagaagcgaatttgaattaaaattagtttaatcaaatatgaaccaagtacaaggatctcaacataatgcatatatagattaaatttagactaataaaaagagagacaataccttttgtagcctatcaagggactctcactatctttttgtattattattaaacatatctaatccaagaactttgctgaagagttcacactacaatgttctaagccaaccttaatactcaaaaatagagttgattattaaattttataggatgagtataattatacaatcacaacatatttttaatttatgagatgctgtgatgagatataaataatcataaaactcacaatattatattttttatttaatatataaataatataacactatgcaattattatttcacatttcaatacattttgtcagtattgttgaaaaagtgagacataatcttgtaataaatgcattaatacatacatttactccttatctatataaatatctatatctattatattaagaatatcttttgttgagaaataaaaataataaaaaataagaataaaattaaacaaaatttaaaacatataaaaagaatttattaaatattttatcatcttgtaatattggaatggtccaattttatttcatttcaaaataaaatagttattgtaatagtgtattgcgtcaactgtgctgtcaaaaataatatttttaacaattctaaaaaataatttttgaatttgttttaatttagaataaattatattaaaaacaatttttcatataaaaaataattagtttaaattattatcaattatttactcatatgacatattttgtttatatgaaaatagaataatatattggtggaggcaatttgtactaatttgttagatctttcactttttcaataaatgcatgtgatatatttattattaaaaagattgtttttaaaaatctatatcatttcaaatatttatataattctcactatatatatttgaggttttttta

SEQ ID NO: 185765 - DNA, 2113 bp, Cannabis indica
aatacttctttttttataatctaaatttatataaaatttgatgttaccagttgaaatgggggcattcgtgaatttataggtgatttaaggttttactcaactctttaaaacatcctacaaacattacaaaaaaaaacgaacacaatgagatgaccgaaaaaatagtaattagttactagttactagaatcaagtcttcaataactgagttttcaatagcgctatacatacatttacctccaaacactaattagtaacttttgttactaatttaatcgtgataaagagatgagagttacataattatgtgatcatcaaattaaaagatttgtaactcttattttgtgatcattatctacacattttgtaacttcataataataataaaattaataatttatcacacttcattatttaataaaaattttatattatataaactaatataacaataaagaagtagatgtagaacttaaaaaatttaattgctacagcataataatatgattattttaattaaagggcaaaacaacatgttaagttttcattgaatttattgcttacatcaaaacaattgtgtttcctaatattttcattttaatacagaaaaattcatttatatatatggaattctacttattaatacaaaacaagaatttttattattattatgaataataaaataaacaaaagacttgaaagatgtggcaaaccatgagcctcctgtataagtatagtataaataacatacaaaacaaacaaacaatcaaataataatacattagatcgattgattttgattaaaacaaaattagaattcaattaatttaaaatgtaaagatattataagtttaatatattttgtaagcttaccaaaaatcaccccacttttcctgatcacgagctagttgatttgctatttaatatagtttgtaagagagattttcttttgcgacgttgctcgattctatattgtattcctcttgtatttttatatagccaataatcaaacttttcgctataaataactatgtatcccaaagatattccaattattagaccacatccatatcccaacatcacaatttttccaatctaatattatgcgattggtatgctcctctccatgatcaccatctcgttgttgcaccctcgtgttgcatgatttagacaaaggaaacccacataattttaagtttccttcgtatgaatcattattgaatgtttcgaattggttcccaagaggtattggcccttctaatttgttatacgaaaggtctaagtatgaaagttgtgtcaaatcagtcatttcacttaaaatttttccacttaagtcattcgaagaaagatctaaccttttgagattacttaaatcaatcaatgacattggaatggacccctttaatttaatttgattaaagttgagccctttgagtgattttagctttccaattgactctggaatctctccttcgaaattgtttctagaaaaatcaattgttatgaaaatacttaagatcctttctagtacacgctcaaaacctttcattacaacaattacagaatcttggtaataactttctccaatgtgtgtcaagttacgaccgcttgaatatttgtccatcatagctttgaaactttcaaaagtctttgttggtaaaggaccactaaatttattgccacagatatgatttgtaactttcaaaaacgagtttatgaatttgagtaaagcagagctttgagcagaattacacaaatgattagaaattatttgagaagtacacaaatgaaaatgtacaataagcaaaaggagaaaccaaaagtaactcatattttctttctttgttttggtgcttaaactagtttttttgatgtataatagtttggtgtaattaattgagtttatttatagtagtagctagttgttacatataggatacattaattaagcactaatctcccacttgattattataactttggttccataaaaataaataaataaaaataaaaagcaagactttgagtcaatgatagtattttggtaaatgtttgactcaatttaataaacaaactagtctcccactattattattattaaaagaatacacttc

SEQ ID NO: 185766 - DNA, 1899 bp, Cannabis indica
agcgtttatgatgtaatttaaggggaaataagaggtggttttagtttgattacagtgttgtttctacttctgtttatattatcacttggtactgtaggttttttataacggttgtattgtttcttgcacaggtactcatgaaagtggaaccaagcctagtactttgtcacatgtggtatgtcttggtgataattttcatccacaattccacttttttattcctttagatcatgtttggaaagtgtaattggattggaaaggatgatttttatgatgtaattttgttatgaaattggaaaacttaatcctttgaaaacttggtataatattatgctatcgaatcctttatcttcatgcatttcaataggaagaataaaagttacaactttgcatgcatccaacttatttctcataatcatctcttttttgttttcctatatatatatatacatatagttttttaaattccaatccaatcccacttttcaaatgtgactttagtgttttaagaagtaattgtatgatgacactggtcataattagaagccaaaaagttcaagttttgaagatgatgttgagatgcctgagttcaatgacgaggatgacttcatctgtcccccgaaggaggcgatatctgaaggttaagctcacactataattttcacagctatcactattttgtttacttgttccattatgcaaagtttttcccccttgtaaataggccttaatgatctgcttggaaagggaaactttatgctgtcaaagtttttcaagactgatgcatctgaaacactctccaaagatgtcatacttagtattgaaaatgaaaaacaagaaggctcttactcttggtctgccgctagtaaagaagctgaggtactaatgggcctaagtgaacatgcttcatgccattccaagccaaagaaagttttgaaaggtgccatttctttgataattactttgtcacaactttgttctgctgaacttttagttttcactcactttattagaaatgagaaaggaatatactaaagaaaattaaaaataaaaatggaacaagccttaaagttgatttattttggaatacggggtcgtatgtgctccatttcctataatttgcaagttgagccttatagggaagaagctataattaactaccacacatatgctatatgaaaacccagttgcttacaagatttcatttctggattagttagtacttttacctttataagttgattgtgtttattttcagtagccaatcttttttcggacttctttaattcttaaggttgaactggataatctacaacttcaggagccaaagtcaaaggaaagccaaaattttcttttggtttacggttaaataaggacagactatcttcaccttgtacttctaaagacaaaaacttgtcagatagcatccatgaagtgcctgaaagattgaaccaagatgagttagctgctgagcttcctgaagatatacaaggcgaagaggaaaatatgtcagaaattgtgccttttgaagtagaggctgttaaacatggatgctgtgaggaaacgatggccgctcgcttagatggcctacaggataacactagccttctgagaagaaattcgaaaaaggttttgcttgcttatatataattttttccttctgattgtctccaccctggtttgatattggtaaattttgcagtttggtagtaatagaggaaagaaattccagcgtgctgtaaacagtgtaaagagaactatatgtccattgggagatagaattgtgaacaatgaagacttcgctaatctcaggggctgtagtgtttcatcaagtgatagtgaggtatctaattgttttttttaatcttgctaacagcgaggtatctaattgttttgatc

SEQ ID NO: 185767 - DNA, 781 bp, Cannabis indica
attagtgggcattggatggttttgattgatgctgcaaaaggaggtgctacggaaccaccagatttatcccagtattcagcagattttgttgttttatctatgtataaggtatttctctatgtatctttttgaattcactctaagaaactgttttcttttaatttgatgcttaagcttctgtttttgtttgtatgcacatgtttttggataaagctatttgggtatccaactggaattggagctctcattgttcgaaatggtaagcagtgagcttctcttatgaaaatttagtttttagttttttttctaacctattggctttaggtctttgttctctcttttttatcctcgatttggctggatataatatctatgtataatagacttatgcttatttataagtcgcgttttcatcatctaatgacagatgctgcaaaattattgaagaagacctactttagtggaggttggtttctgcatatcttgctcttaatcaatgctttattttatttacttataaaaagagattaataattctttaattaatacctatgctaactgtaataagatattacaggcacagttgctgcgtctattgctgatattgactttgttataagaagaaaaggcattgaggagctgtttgaggatgggtaccgtttcttttctaagcattgcatctcttagccatgggtttaaaattctcaattcccttaccatttctgccataaaccagtaagtaataaagtttacttcattcttccattaagtctctaatgac

SEQ ID NO: 185768 - DNA, 1814 bp, Cannabis indica
aaattttgaatactgttaatctccattacattagctgcactggttaagaagggtagcgaaaaaaaaattctcatatgttattagacatattaccttcgacagggaaagcatgtgagctgacctttgcagatatatctccatacataagatacctgtgaaaatattgttgttatattagcttaaataacacactttaacttcctaactaaagtttattctttgggaattagaaaacaactatgtaaaatacatatataagatgtagaagaaaataaaacacaaacctttccggatctttgaacggattgtgtagcccatgttttggacacttagacaagctctcaacaaatggctagcaaagtaatccaataatcagaaataatttctaagatgcaaatacaatttcacataaatgttgatctttaatctaagcattttcacaaaaaacaaaggatcgaaagaagatataatataaaaaggcaaacaaaagaaacgccagatgccatgtgccatgtgccttactgagcgaaaaagtgtaatccaaataatcagcttcagctaaaatattacagaactaaacactatcatacactacatggtatacctgaattcctttttcatcaatctcagcaactttaataaaaggttccccatttaaaggatccacaattgtattccaacttggagaacctgtccatttaccctgcactaaaaacaaaaataaaatatcttctacatgatttcttttgttgtttgtactactttaagattcatgcatcaaacagaattcagcagcacaaatattagaatctaaacagaaaagattagaaaataattccaatgtatgcacttaacaagtcctgtaaaaaaaaagttccaaactttagtatacaatttagtcctgtctaacatcaatttcaaagccaagttacaaggtgaccatttactaggagacgcgacattatgaaagtgaatcaagtccaacgatgaatgttcatacattgctgaaaccttacccaagttgtgtacttcggcgggttgtgaacctgaaatctcttcaacttctaaggttgcaaagggcatagaatgaactgatctgccattagacatggggcaaaaaatcacatctcgtaaggaatttaaattagcggcacatttatcagcatagcatcaggttagacgtccctcatattagaacagagaaatcacttaaactaattaagcaacaaaactttcaattacattgaactcataacattgttatctgatctgaatcatctggtcagtatgagaaaaatgctaaaggaccagaatcaaagatcatgattaacataactccgtctgaaatagcattagtatccaaaacttgttatgctccataacttgattcagaatggggaggaagagtgacgaaattaaacaaaaaaaaaacacaattcgaagaattcccgaaacctttgtttctgtgttcatagaataacaattcaaaacaaaaccattttcaatcacgggaattgaaaagcaaaacaaaaagacagccactttgcatctgttcaaaaagggaaaaccagtatcataccttgagatactaaaagaaccaaacaagcttgaaaccctatgaggagctcttgacgctattttcccacaagctagaagcttattcatggtgattaccaaccaagcaaaacccacaaaccaattagtcagaatcgaaagggtgatgattctttctagcccttctgataatatatatctatatatctctctcactcctcactttatataatattatatttgtgtgtaagcttaagcat

SEQ ID NO: 185769 - DNA, 1735 bp, Cannabis indica
gaggacttatcatttttagatttgactagagaattgaaatcattgatgtagaggttggaaattttatgttttatttcattttctgagttttttgttggttattgtgtgctttagtgttattattcgctaaaatattgtgaccacagttttcttccgccacaaatgagagccctcaatataaaacggggagtggccagtctaagacaatggctgttttctcttttttttcaagaaaaaaaagataaatacaatgtgccataaccttggaataggtatatttaaggaagaaagcaaaacaacattaactcatcattaactctgttctactttttgtgtgtactcaaatataacaatgccttgacatgacccaggccacagtttaatctgttgatcaaattgtcattgtgatgcggtactgagttggatataaaccacatgtgttccctcattagaaaattatagcaattgtaaggggtgttcacgagaaactcaaacttaagaatttgtagaaacaaaccacatacttgattgtgttaagatacccaagttggatgtttctagtgctgtatattttagaggaagttagcattttggtgatttttatctattaatatttacagtatcaacaaatctttttggcataacatatattttatttcaactttgtgcaggttcgtgatcgctcacgtcttgtaaaagtgacaaacacaaaaccagcaatcagtcttctgtactttggaaaaatagtctttgctttcactctgctatttcttattggtgcaatgttcacgttggcactggagtatcttcctgtgtttatatcatttgttaattcctccgtctaaattataagttccttcttttgataaagtgtgtagccatcccttctttactttggcagaaaaaatgaaaatgaaggttgtttggatatgttttgcattggctgctatttatagaatatgctatattgtcagttaaccttgaaaatggatttttatgtttaataagaaccttcattccaagctcatgcatttccaactccaacccggaataataaagcagaacctacactataatatctttaaaaatgtgtcattttattcctgagtccttagtatgttggaaaatacagagtatccaataaaattttgttttacaagactaacaacagggcagtttagttgttcgcagcgttagacttgggaagagcattggtccaccccatggaaacggtttcatattaattacttttctgttcacaaaataaattacaataatttgcattggcccagataaaataaggctacaaataaactcagtaacttgtcgaaaaagactaaaattatatgtatccaaagatatgtatttctcacttacctctgtttagtctacttttactacattctaaagttctaattcctttggatacttcttttgattctttttccagagggggctggattagtggcaaacttttgcttcttaaatttctgaaccattgtgtaaacctgcattcatgtgacaattcgaagcatattcagacccaagtaagctgcatgtattaattaactgttgtattttactaaaaagcccacagaacagaaaatagacttgaaagcaggataagattaaagcaaggttactaatccatgcaatggccaacagcccaaaatttcatgatgtcagtcaacaagagctaattcccaaaactaaaacgatgccatggttccatctt

SEQ ID NO: 185770 - DNA, 4297 bp, Cannabis indica
aaaaatgatgcccagtttaaccaaagacctttggtcacttccattgttgcttccgaaaattctgatactagcgttagtttcaaggtttctcgatctcaagactctagaagaaccaattcacctgctatggccagaaggtacatgttttttttattttttttggttcttttaatttttgttttgattatgtattaatttgcaattaacaactgtgaattggcttctaggaacactgtttccagtgaaggctttcgtccttcttttgctggacctggaccagtacggtgagtttctttttggtctgctattctctgctctagttttatcaattacttaattttgtagagattttgttttcttgctgttgagtgtagtagtcacttcattcctcccagagctaattcgacagagttggtttcgagaagcagtcttcaggtttttcgcccttcttacgcccaagctacagcccctgtacggtgagttaaaaagtgttttttacatatttatgcttaggcacaacttgcaacatatccttttgctggttgatggaaatctctgcatcatgtttgagaagttgaggcccgtttcttttatttctgaactctgcttacattaggcttttcctgtctggctggttagtacagtcaaataatcataaacataagatgcatgattgccttgtggatggcactgtacctctagtgctttctttggttcattgttctccgatcatattttctgtatagcattgtgcttccttaatatatctgctgtttatgaaacaggcctgctccattttcccattcatttgatggccagcccaagtcaccagtcaattttcaggctgtacaacctcagtcttcactgtcaccttatacgagctcgtatggttctgaaagacgccgatttgatgatgttcaagtaacaaatggaataagatacccttctccaccgcttgccaatgaagttcttcctgaaaattctcattttccacaaatcaattcaaaaaggtaggatgctgtgtaaagtaaactatacataatataaactattatgtggtatgagggaaacatgttttctttcatgtcttgctgtgtgactgaatgtctgctatattctttgttttcaaaaatctgttaaacggaacggctctatcctctgtcagtggtccaacacttaaaccttcatttttctttacattaagattatttagagatctaaatatgtaggatgttgtgttaacaagggtagtcatgctattggaaaggatatgagttctggatttttgttagtcatggagttaaaagatggtgaccttcattgatggagtcagttagagagtatggagggctatagccctccctaaatttttgtttttatgtatttttgtatatattaattatgtcaaaaaaaggttatttataattattatcaatttgcccagcctaaattaattgtttttacaattttccccctcccctcagtttacatattctccctctgccagtagcggccttattatactcttggggtcaccgggtgagataaagttggacacatttatgatcagacatcttacacactgaaatctgaatatgggtttggatagatatcaattaatagagttaaaggttgtttttattcctgttgagatataatttctcttcataagagcagcatcaattaaaacaagatgttaatgcacaattcactgcattgtacatgttaatagacagacagtctgacatgacataaaccattgtagttgtcttagcaacattgaggcacttggataaaaagcaattgggaaagttgatttgtcttatttgtgctttctactccaggccttcttcatctcctcctgcatatggtgctatttcaaatgttgactatagtacttatgattcacaagctcctcggaagttattggcacgtgcaaacaatactcattctgctactgctgctggaaccaatcccaccaacttgccggttatgaaaagatcaagatctcctactttacatcccagtgatgaagccacggagggaagcatgtatgctagtgaagatgctgatcggtattgttttctgtttgatttgatttagtctgtctatcaatttctaatgtccttgttaagttatacgaagttatgatacaatttgcagagaaatgcaagccaaggcaaagagattggcccgtttcaaggttgagttgggtgataaaatgcaaagcagtaatgatactgcagagaaaaaggtttcaaccaatcaacatgaactatcttttgttggaaggaacaatttatctccagaacattctacagaattggctgaagatgttgccggtggcagtactttacctgagaatgaaaattctggacattctagtgttattgttggcttatgtacagatatgtgtccaggtatgtctcctaagagtgtggttaagtttttgcttctttcatctttgagggcatgaattatgtttcatcttattcatttggttgatataataattggggagttttgtatgtattttgaatggtaagtcatgagttctttaatgaaatatcgttatgattgactctttaagttgagttgtgcatgatttattgtattctatgttagaatttgtgaatttccaatacatatcttttaatgtgatcatttgtgtttcagagtctgaaagggcagaaagagagaggaaaggggatcttgaccggtttgaacgcgtggatggggatagaaatcaaaccagcaagtatcttgctgttaaaaagggtagtgatattaaataggctgttgagtttcagtggaaatttttaaacccgtgccctgttaatgagtgcatttttttaaccttgttttctttattttgttctatgcagtataacaggacagctgagagggaagcaaatttgataagaccaatgcatgtcctgcaggacacaattgagtatttgttaaatttgcttgatcagccttacaatgataggtttcttggcatgtataatttcttgtgggataggatgcgagcaattagaatggatttgagaatgcagcacatttttaatcaaggtgctatttctatgctggagcaaatggtacgcactgccactatattgtttttgtatgataattaattgctgtttgctcagttgtcatcacaaagagactctagaaacctttttttttttgaactatagaaggtgggcagataagttagaatgagattatggaaaccagtattttcaatcttatggctttctttcattcatcacaagccaatatttcgaagtggcagtaacttctcttgaattcattttagaaaaatgaattctagatttgatgctttgtttaatattccaattgtactttttctttgagaaaaaaaaaaaaaaaatattaagtggaactttaaatggtatgcttattgatatacataactttattcataagctgtgtatatatatgatgtatctcattagttttggtttgctgcagataagacttcacgtaattgccatgcatgaattatgcgagtactcaaagggagaaggcttctctgagggttttgatgcacacctcaacatcgaacagatgaataaaacatcagttgaattgtttcaaatgtatgatgatcacagaaagaaaggaatatctattcccacagaaaaagaatttcgaggttattatgcacttctcaagctagacaagcaccctgggtacatagtaagtcatctgcagcggatgctcaattgtaaaggtttcgttttcgttttgtttatgtaaataagtaattcctactaggttgaaccagcagagctctcacttgatcttgcaaagatgactccggagattagacaaacaaaagaggtgctgtttgcacgtgatgtggcaaggttgttcctcctcattgaatgtatctttgattctatcttcttcgtaaattcagtattctaatgattgatttttctctttatttttttattttgccagggcctgtagaacaggaaattttattgccttttttcggttggccaggaaagctagttaccttcaagcatgcctaatgcacgctcactttgcaaaggtataggttactttttcatttggtattgatcgccgttcattttataggaccatggccaggatttttaggtgtgttgcataataataatgtttgtaatcaattaatgctcataattttatgttgcaacctatctatgagaatatgcaaccattcatatgcagttatgacagtacagtgtactaaagaatctttttttattattttggt

SEQ ID NO: 185771 - DNA, 903 bp, Cannabis indica
cgatttgtctttctataaggaaattgcatgaccttcatttatttatttttcaactctgatatataaggttgttagcatcaagacaaagaaggtgacaatatatatatatatatataaaatatatatatattaggcatggacttgtttttgtttatattctcatctcctaatgatgcccttttctgaaaattactcacattttaatatatgcataacttttcaatgtactaaaaaccctatatatgaaccaattgccaaaagggtcccatctagggctagaagttggagagtggtcctttatcaaagaccatatatattatgtggggctaataagcttaattattatttttaactctttatctttccataatgaacttttttttctttttctttttaattaataaatacattgttttgctaaaattaatatctgcatatctgtcttggtgtccttctagatttattctcttttatggatatctatattttagggagatggaaagcattatttagtagagagagagagtaaacatatattttgtactaaaatattttattataaatttgagctaattaaattataaaacttcacccccaacaaaaaaaaaaaaaaattacaaaactttatggaaaaaattaattaaaaattaacattttaaaagtgattctgtaatatttcaataagcttaatggtaaataattagagtttatatttatattatgggttaatcaggtaataagtgagattatgatcctactaatctatttcagcataaaatttaaattttgatataagtgagtaaataagtgtaattgtaatttataaattacaaagatttatatagcatgtgtgaatgtaatataagctatatgtggaataaaaatattttcaggtttggagac

SEQ ID NO: 185772 - DNA, 10999 bp, Cannabis indica
aaaaaaaaaaaaaacttttagtgctctttgacatatttgtactatatttttggaataataacacaaaagtggtatagattttgtaaatataccatatatcatccgttgttgaaggcccaaggcccaaacgacttccatgggcaacggctgctcaccctcgtgctcctacaacggttccttcttccacattgctgaaggctccaagatctacttcactacagtcacaccaccacacgccatacccccgcgctttctgatcaggcgttttgatctcgatgtttactttctaaatttgcgttttggatcacattttagctacttgtttcaaaccctaggctcaaccattccatgaacgcttgtcagcgatggctttcatggcggtcttggaatcagatcttcgtgcgctctgtgctgaagctcgccgtcgttacccggctgttaaggacggagctgagcacgctatattgaaggtatgccttttcttatgcatcgtcagtgtatagaattgattagtgaaaatgttgttggaaaattggaacttttggtgagctgggagatgtgtttggaattttcgttgacatgagtgagctttatatgcgagtgaagatggattcttatcatctttccagaaacgaagtatgcgagtgtgtcatatttcagttatgatattgagccgagacacatacaattgaattgttgaattgcattaggcaagacgttgaattattctaaaaaaagtttggaattaccattgtagtcatcaaaatgctgaaattatggaaaattatagttgaatttcacttttgtgaaaacagatgaaacgtactttttgccgttttctttctttccaatccaataaagcttatgtttcgtttttgttttattttttcctttgccttagagagcttttgggcggtttcagaaattttgaattgcattatttattcagtaggggaatcccctgtcgctgtaaattgcttgattgagactcatgcgtttgttaatgataatctgcagcttcgttcgttgtcaagtcccagtgagattgcgcaaaatgaagacatactgcgaatctttctggtggcttgtgaggtcaagactgtcaagcttagcgttattggactttcgtgtttgcagaagttaatatctcatgatgcagtttctgtatcagccttaaaagagatattatcaacactaaaagaagtaagcttatatttttcagtacttgggcttgtccggctattagtttctacttttgtttgaatttcacttctagtggcaggcaaggtagaagattttcacttgaaattattctcataaataacagggtcttttccttagtaattcaaattagggaaaacattcaatttatttaattgagcattttcaaactaaatttgggacatatagttcattttttaatttgaaaaagagacagagattaaatgtctaagattggcctctttccaaatttattagggagccttggttatggcggaggaacaccataattacaagttagccaccaatacagagaaataaaacgtaaatataagagcattcgggacatatatataaaagagacagagatcaaatctctaagattggcctctttccaaatatattaggggagccttggttatggcggaggaacaccgattacaagctagccacaaatacagagaaataaaacgtaaagataagagcattgaggacatatataaaaacttagagctagctaaagtcttgatgtaggatgagaccccattctctggtaaggtcttgaaaagacaacccttcaaatccttttgacttgaaaatgcaagttgccactcaaaatttcatctttccccatatacttcttcaaccccattctcgaagccttcgaagatcctctcatttctctccaaccaaacaccccagttgggaggttctcctaccccctttcaatttacacaatctcaggcagataggttataagaagctcttgagtgaactactactgtgctgattttttgtaagttagaattctcataacagacataaattaataatgattaagatgataaagctttcaataggattccttcttagaagagtaaccatggcatatagagaacttataagacttctgatgtgatagtcctattttgaagcatgtagcttacattttctttagtttatgtgaaggtttttatttttatacccctggtagttcaacttgttcctcttctttttgcagcatgctgaaatggcagatgaaattattcagctgaagacacttcagacaatattaacaatattgcagtcacgtttacatcctgaagatgaggtagtctcatatcttttgagtctttctgttttagtttttttacttttccacttgatgtgctttcttacctgtggtatatatttatggctgggtttccatataagtgttacttttcaaaagtataaaatttgttcgtggcctatagattaatataattctagctggttttctcattgtttgtgctgtattgcatttataagacaatacacacacaaaccttaatctcgcttcatgttggggacaagtctcattaatcattatatgatattgtagtttgtgtatgaataatatttctcattgataaaaatttatattacagcctatacatttatacagaagggaaaaatcagaatcagctataaacaaggaaaaaatacaaagacaatctacacaaggaaataactctaatactaatttcagatcctaacaaataatccttatacttctacacgtgtatatgttatacaaacctagcttggaattgaattcttcaaagcttgttcttgctagggcctttgttaggatgtccacaatctgtttccatgtgaagtcaagttgaaaaatcttagaatttatcttcttttttaaataaaaaaatgaagtgtatttcaccttctcaaaaatgcagtgtgtctatttcaacatattttgttttgtcatgatgaattggactcttaacgatgttgatggtagcttgattgccgttttacattttgaaggatgtaggaacctcaacctttagctcatttacaatccttttaatccacattcccactcaaacacccagtaactgtgcacgatactcttattctattctgctcgaagagaccactgactgtttcttgctacgccaagtaaccaaattaccccaaacataggcgcagtagccactggttggacatctatcaattaactctctagcccaacttgcattgttgtagacttctttgtctcgcttgtcatgttttctaaagagcaaaccaaaacctggtgtcattttaaggtatctcaattctgaagagcaaaccaagatctggtgtcattttaaggcatcacaagatacgatttccaattccaaatgatcctcactaggattgtgcatatattgattgactatactgacagagaaagcaatatttggtttggtgtggaagagatagattagctttacgataaatctttgataactcttatctctactgatttgttttaaagttagagtccatgggagtgtctgctggtttactcccaatcattccagtttcgcttagaagatctaggatgtactatcgttgacatataacgatgccttctttggatcgggcgacctccattccaagaaagtattttagagttcgtagatctaggatgtactttcattgacatataacaattccttctttggatcgggtgacctcattccaagaaagtattttagagttccgaggtcgtttatctcaaattttgatgcaagaaatctcttctgaatcatctccaattaagattatgtcatcgacatagacaatgagaatagtaaggttccttattgatgagttttgccctaacaaggtatgatcggtttggcattgagtgtatcctacttttacaactgactttgcaaacctatcaaaccatgctcgaggtgattgtttcaagccatagagtaacttttggagtttgcaaactaatcaaccattgacatttttcttcaaccttggtgaagtttctatagacttcttccaactctccatttaagaatgtgtttttcacatccaactgatataaaggccaatcacaatttacaacaagtgataataaaactcttactgtattatgtttggcgataggagcaaaaggtctcatgatagtcaactccatatgattgagtaaaccctttggcgaccaaccaatccttgaatttgttgataatcccatttgaattatacttgactgtaaaattccacttacaaccaattgtccactttcctcaagccaactcagtgaggacccaagtgctatttttctcaagatcatttatttcttcatttactacaatcttccattcaagatcttgtctcataaatgtatgggaatctgaacaagatcaagaaaagagacaaaggctcagtatataaatgttagtttcccataaaaacatatatgtgaaggtactagaacattataacacatcatatgtcaaagaaaaaataaaatagtgtcttgggataggatacaaccccactctctgatgaggtcttggaacgacaggtcatcaaaaccttttgctttataaacccatgttgcaacccaaaatttaaccttatctcactagtcgtctactttattttctatgtttttggaaattttgccattcctttctaaccacacccacaaaatagctaatactgttgtcgaccgtagtctagaaatcctattccatcctcttaccttgcaagacaacatctgtttgcaattttgtggcatgtaccaaactctttcaacattctctatctcatgagttatagaatcctcaacatcatgattttcaaggtcgagagggttttgatgagtgtttgaacaattattgtcttgcatgtcgaccactttattccctacttttctcctgctataaacacgaagttctttgttacctatataaacttgtgcttgagtttgaagtggtggtaagtttgaaagagtgtttggattttctgaggaggttgcactaggtgtactgtggttggatagtcaaagaaggcaaggaagaacctgttgacagtgagagatctagctggataggcaaggaagaaccaattgactttgagaacacatgtaaagtttgagcatcgtgtgtcatgatgttggattgaggaatgcagcctcatgatcttgaagtgtttcccaaagttgatattcctgtgaatgctccccctgaataccaggtttgggaaagaaagattgctgttcaaaataggtgacatcctagtgttataaaccctttttgtaactggggagtaacatttgtaccctttttaagtgttggaatacttaatgaagagacacttgttagactttggatcaagttttgttctaagatcataaacacacaaaaactgtacaaccaaaaactctgaatggaagatttgaggagaaggcccatatatgagggaatgttgctagtaacaaatttcttggagttttgaattataggcatatgatttatgagataggtggtggtgagtaaagcttccccccaaaactatttaggaacataatagatttagaaactttaagaagatgtccgttttttctccgtcatttcattttgttaaggagtatcaacacatgaactaatgtgaacaattccttgatttaacaggtaaggaccgagaatggggttaaatattcctttccattttctgttttcagaattttgatctttggttgaattggttttgaatcatggaatggaaaagtttaaagatgaagcagattttaatttttctttcatatgaaaatccctgttgtcttggtgtgctcatggatataaaccatctagctctattaatatttgttactcgagagggtccctaaacatcactacctatcatttaaataggttgtgaaggtttgtaggaaaaactgggtaagagttttgagtatgtttaacaagttgatagacttcacaatgaaagagttttggtcctttatggacaaataactgaggaaatagtttttcaagataaccaaaaattggatgcccaaggcgaaaatgccacaacatgatggtattttcattcaaaatagacacagaattgaaaacagaaattggaatgtttaccacaactcgatctgcaaatttgtttacttttagaagaatcaatgagaatatagagaccatcatgcattttagcactgcaaatcaccttctctgtgccctcaacttgaaattcatctagatttggataaactttaatccaattcaaatattgagtaagtttgcttattgagagaagattacaccttaatttagggacaaatagaataaatgaaaggagaagatcatctgataatacatcgacaattttgagtgtgtgagattagcacatggtttgaaggtgctaaagatttgtaaatcacccatcatgtggttagaagctcctgtacttgtgttggaggttgtagtcattgtgtgagatgaagaacctggatgacacattatactaacatttgcctttgttggacgtgggtttggctgctgcataaactgcctaagagatgtcagagttgcatcgattttgacctttgagaagtagatgattgtgagaagaattggtgattggagcaattggttgagaagtggtcttggttgattgaagaagttgagtagcagccatttgtttaagaagctaacatttttttttttgattgaccttttgaggaataagagttgcttggaacaccttaataataataaaaaagagttgacaggaacaatcattaataataacgcgcaacaatcattaatgtttatggggctttttaaaggttttttaagttggacagcagaaaaacaaatataaaattacaatttgggctttttttagggctcaaatagcccatttaactttcaaaatttgaggcgcacgcctcttacacctcagcgcctcacccctcgattcagcgcctcacccattaaggcgtacacctctcttctcctcagcaaggcgcacgccttggtgcaatctttaacgcctcaaaaacgcctttttaaacgttgtaactatgttaaacatacatataaaaaaattaaatattgtttagacacattacaataaatcttatattattatgaattgaaagtagctatgaaatatgtttttttcaataaatttgaaggtatatttgtttaaagggaaaaaaaataatgctaaatattaaagtttgagattgaagtgcaaatgaatgtgtataggttagggatttttatcacgaaaccttaactttttaacaaaaaagattggatggaaaagtaaaaaggacaataatgataacaaccgaaggaacatttttggccggtgcaaaaaatttgaggttggatacctaagtgcaaaaggtgagttagaatatggatttttgctacaaataagccatattttactattttagtttatcaatgatctctgtattttgatggaatattgcaagtaatgatctttgtaagcactaatggtttgctatttacaggacaatatggctcaagctcttgatatctgtcttcggcttcttgaaaacagtcgatccactgacagcgtgcataggtaagttttttttattagtttgtcagttaatatattataccagtacagctttttttatcatctagaattctattttaatttgtaagttttccagtactgctgcagctaccttcagacaagcagtggccctgatttttgatcatgtagtttctgccgaatctcttccttctggcaagtttggttctggaggttacatttctcgagctagttcagtcactagtgaagttactcgcagcatcaatcttttagagtatgtagttttcctagacattactgatcagttgcttttggtattatatgtgtcgaggatgtgtttctgatctgcatttgtaattttttgttcatctaagtagataagtagaaaagttctgcacattgatagggtatcatatttttctcgtaacatttcatggtcttgttcgtataatggctttacacatgaacaggtcattggagcatgactctagagggtcaccgttgatgagagaaaacctaaccaaagctggaaagcttgggcttcgtttgcttgaagacctgacagctctttctgcatctggatctgtatgtattgtttatgaagttttactgtatatagagtggaatatcaactagatttctatgtggaacttgtacatggtcttttggaaagttttccattatgtcttatgtcattttccatataaagttaactgcagttatgtcagaaaactgaaacttttttgtctttttcttctaggcaatttggttacatgtcaattctcttcaacgctccttcgtacttgatatactcgagtaagaagttattttccttgtagcttatgctcctctaattcatctttaaatcttaataaacatttctattggccaagttgtgttgtattttgtattttctttttgaactatattagattattttgtaatttgtcaaaaacgtccctcagaggtatttatgtatatacatagctgataaagctaattaatattataagctatccctttagggttccaaggttgtagtcaaattgcccactgcctacgtgacttaagcacattgtggtgtgaggcagattgtgtctgacaatgaacacatcattgtttttttctctttttgaaatgagacagaggtcacttgtcttagactgacctcctcccaaaattaataatggacacatcattgttaatagactgtcattgtgattttgacccttacctgctgctgagtgtgctgatacaaaattggtgagctcatgaaaccttcaattgaccgagcgtggctaaggtacacgactcatatagaatgaaataccattcccttccctgttttgtctgataataccaaattggtgatactcacctatatcaccttgctctaactcaccaattacacaattacccccaccagtagtaaaagacaattcttcccctgagcagcagtgttcttgccttggctagcataagtgtagggcacccgagtcctaacaagattgaacatgtgttgaaagtcttggatccataagcaacagcataatattatgttctggaaattttaggccattttagtttttgtattttaaataagatttttcttccacttgtctgtaatcaagaggtccttatgttaactcacgtttgatgtttatcatgcaggttcatcttgtccagttatgtggctgtatttaaaattcttcttccatatcagcaggtgatttaatttaagatttttttaatatttttaaaaaaatttctttgtcaaaaatacaaagaaaagagatcgaatttgacctaagtgtctgaatacagttttgaatacaataatgtcccgtataaattagtatgatgattttctgaaccaaattaagtgatattatatgtgaagtggtgcatgtgtatatggtttggggtgggattttgaggtgaagtaggaaaggttgatgtgatttttaatttaatgtaattcattctattcaggctgtgtccagaaatactgatttctgtagaggcacatggattgtaaataggctcttcctttgggtggattccttttactttaaacttgtaatcttcctaaagtatgcactattttattcttaccaaaataaagggagaaaaaggggaaaaagcacagggattccctataccttttaaaggaaaataggctcaggttcacttggttgttatgccttttgatctcttcatgcaacattgtatgtttggactgaaatttttttattgaatttctaacaggttttgcgtcaccagatatgttcgcttttaatgacttcactccgtcttgatgctgaagtaattggttttgttccttaaatgtgtgattgccacaagtctttttgtccatcatgtgctttttttttgagtgtggctaagttgggtacagttttcactgttcattattgctcccctaaactttttcaatgctcaatcagcctgagggagaagcaggagagccttcttacagacgtttggttttgcgatcagttgctcatattatcaggctatacagttcatcccttatcacagaatgtgaggtgtgtgttttattattttaccacatggattctaaccctctctaattttacactaaaaacgtcatgtcttatgaggtgaaaggaacataatgtctccggggttttccaaatgcaggttttcctcagtatgttgttgaaggcaactattcttgacctgccattatggcatcgcattcttgttcttgaagtgctgagggtaattctagaactggaacacactccttttttatgtagtatatgtgacatagaagattatggtagagccttgttaagctgtttgaataattagaaatgtggaactttgacagggtttttgtttggaggcacgaactttgcggattctcttccaaaactttgatatgtaagatcacttgtaccagtcttcttttttcgtttaggatattttattatgtagctgtatttgttagaattttcatcagcatgtctttttcccagcttatgtttggctttttttttacatgaaatgtttgtcatcaacaagttttgtttccttattatgagcagtcagatttataaagaaatattatcgtgcctaatttatggtatctgctatataggcatcctaagaacaccaatattgttgagggcatggtcaaggctctggctagagttgtttcaagtgtacaggtaagatatgtttatgtatatattttataatattttttatattaatcctagctggaaaaactcatactaatggtgtttagttttaaagttggtgcttttttttttgctcacattaaaaaattatcatcatgaatatcttaacttcgaggtcattt

SEQ ID NO: 185773 - DNA, 4039 bp, Cannabis indica
ttttttttttttttaatggaaacacaaggtaatatattccttattttacatttacaaagacaaacgagcctagcccccttccaatctgtttcttatttcaaagttaaagccacagaagacattagagaacaaacatccatggcggcaactacaactacctcccacttctatccaccctttcactctcattcattttccaatactgacactcacagaccttctcattcgaatctctgttctaacacccacaaacccttttctgcttccaagatatacccctccatcattctctccaggtacacaaacacaatctccaaaccctctaacaagctttatctatcccttttccttttctccattatttgtactctaattcattcaaaagttcaattctttcttctttttttaggtcaagtaccaaaatttcagcaccaaagcatgtatacaagtctttggtggtttcagggctggtaaatggaaactctgaaactcacccagaacttgaatcaaccgtttcaaactcggtatgtggtaattagatactatcaaagctcatattttgttggaatttctctcttttttttttttaagttggtaacaaaaagtttgagttttgtttactgaattatattgcaggatgcaactattgacataaagttaccaagaagaagtttgcttgtgaaatttacttgcaatttgtgtggtgagagaacacaaaagcttgtaaatcgactagcctatgaaagaggacttatatatgtacaggtattggtttcttctctatactatttgttattgtttgaagatgactaaatgtgttaaatttctatcttttcttacttgttttctactctaagtattcttttgattggttgttgtggtgggcatctatagatgtatataataagatacttatggggcactgattgtgtttgtgctgctcataaacccttatttttgaatataaaaattgtttgtgaagtaaaaattttaaaaaagaaaaggtgggtgataatgatacaatacctatgaaaatgtttgtataggtagttgatattatactttgaaacaaaatgcttgcatttgtatagaagagcagcaagtttaagctttagccttttataattggtatgtaaaatctttatggtcttaagtgagagcactgagttagttcagttaatatggtgaatttatataatttgaaatgctggtgcattctatgaattggaatgatacccaaaaaaagaaaagaaattgtgttccttttacctaactccggtgtattcatcagtgtgtagggtgtcttcagtatcacaagttagtcgataatctcggccttgtggttgagtatgacttacgagaagaaattagtgcgggcgagaacaaagatgaagtttgaaattttgttatgttgttttgctaagttggatcatgattgtaattcaaactcatcttcataaatatattaaccatgaaagaattgaagaaatacaaataaacaaaatcgaaaaaaaaaaaaataacatcattgttgaatcattattgatgtctacttctatgaatttttctttttatatgtaatatatatatatatcaaacaatcaattctttgtaagccattataagatttctaggcattgtagcctattgaagccaccagaactagaatagctaatccagttcttatcaacatgtctgatctttctccttgaagacgcagcatatttcctccattctgagttaagaaagtgaaatttcattttaattgtcttgacacttaaaatttagtatgtactgaaaaaaaggttctagttaaggacattaccagagttggtgagggtgctggtgctgtttcttcattagactcttccgctgtaggtggtgctggaggactgtggtgatgaacaacaggtgctggtgcgggttcaggtgcataatgatgatgtctcttatgtttgtgcctgtgcctacttttatgtttgtggggaactggggtaggtgatggcccttcaactggaggtgaagctggcggtttgatctctggcgttggagctacagttggtggtgcctttggtgctaagagtgcaggggcaggagctggaacttccttagcaggtgctggagctggtgcttttttagcaggagctggtgcctgtggtgctttagctggggtcggtgatatctttggtgctggcaaaggaggtggcaagggtggtggtgaagccgctggaggtggtgtaactggtgacacaactggttgtagtggtaccgaaggtggttgtgaaggagtagaaactggtgagactttcgggggttgtggtgggggaactgttgggctcacggtgggtgctactttaggggatggtgaggcttttggcgtggctgcaacaggcggttgtgttgctacaacaggtggttttgttgttgcagctggcgatacactaggcgttgatggggttgtggttggcaaagcgacgggtgcagctgctggggattgtgcattgtttagtgcaacgggaatggcgagacaagctaagaacaatggccaaaacattgcagcagccattttttggatgtgagaactagtaggtggattctatggttaaatatagacatgggaattgagaaaacttgaacataattgtttggtgaaagaggaggaaatgtaatattcatgagattgttacgtttcttctaatgatttgggcaaaacaaggttgaaatgttattaccactgactaggcttgatttgatagacttagtagtgtttgatggactgttattttcaataaggttgtttggagcttggtgtgattttaggccaatacaccaaccttatttaatataacaattactgtcattaatagaaaccatggaaaaaatagagaaaatcccatgagagcttctgttcatctgcttcgattgtgcaacacgaaaaaaagcctttcattttccttttttcttgttggaactttcttttccattttaagtaaacaagccattttctttccaaaaacacccatcatccccaacctttctacctgccgaaacgaccacggcgaccaccaccactggaagaaggcgaaacgggaatggggaacggcaccgattgcgtggtttgttcatctcaatctgtgcttttttaatgcaattcaacctctttcttcttactagttttgagttccatgtgaatgcattattaacacattattaattaaagattaaaaactatgttttattagtaaattatgaatacttgaattaatgtttcttttaatctattttctcttcattgtggttcttgtaataaaacacattaaactacctaaataaaaaagtactacaataaaattatgtttacatctaaagcagcaaaattaatctctgagaaatctccagggccctgttcctgttcctaccctgcaaatgtttaatatgtcaatataaataattataaattatagttacaattatgaatgatgagttccatgtaattttgttagaataaattaatatacttaatttattctatgatcaatccacaaaatccgataagtaattttttttaatgatttaagcatctgagagatgtttgtatttacttttaatcttaattagttttattttattaaaattaaaagtcaccaaattaggacacaattttagaccatatatttgagtttctaagaataaaaaaattagacccttgtttaaagaaacatggtaatttaaaaacaatcataaaattatgtatatatttgtaaaaaaaaaaaaagtgaagccctttaagctgagtaagttctatacagaggtcaaacctaagactaactctacctgaatctatttaaaataaatagagttaaaaatataaattttatgggattttatattatcattacaaaaatatagttttttttttaaataaaaagaattattttattgaaaaaatttcaataaaagtttaaaaacataaaaaaagtcaaataagggtaaccagggtaattatttacattatgttgtttttgtcatattttttatt

SEQ ID NO: 185774 - DNA, 2730 bp, Cannabis indica
aatacataaaaaattaaaaaaaaatcgacataacttataaataaaaaagattttaacaaaactaatatagatataccataatctttattaatttgcttctaattctaaaaaaatgaattttttttttcttttatgtgacaaaagacaatataaataataaatagtttaaaataattatttttctacaagttttgaaatgagaacatttactaatattgtcttattatttagagccatttactataattttcttttttttttttttgttatttttttgttttttgacattatatcccttttttatttcctagtcaagaattatattttatcacttaacaaacacgggttatcaaattatcatcataatttatcaaaaataaaatgggatttttaattaaattaagaaaataaaaaaattaaccaaaagtgggtcaccttccgtataacaaattctaacttcgtgttcgtataatatagtggcatatgtatatgtatactatatgcaatatgcttacttaaccgattctattcttgttattttttcttaatttgtttttattcattatattatagaaacaattctatttttatttatatctaaaacatctatttttttgtaactttttcagtgttttttctagtaatagtaactttttcggtaacagtaatttttctagtaactttttcggcggtaataactttttggtgatttttctaacacaggtgacttttccggcaccagtgacttttctgacaaaatttattattacaagttttattaaatttattattattttttaccatattttaaactttaattattctttaatttcatattcttttttatattatttatttatgttatataaatgtaaattttactacatttttcaatatttatgaaaaaactctaaaaaatatattgcacccccacgtacctacaaaactaacaaaaacaaaagcctagaaccaaaaggagagaaaagaaaatgttagttgtcatgacaaactatcttatccaaaacatgtacagttataacttttattcctttgtccaagactccaaaatgtatagttaaagaagtggattgagcacaaagtccaagtctatctaggtagtcactagcagtgtatatatgcatgaataatgttttaagttatccatccactcaccgtttatgaatttcatctacttagcacttgtccctatttgacctcttttgatactctcattatctccaactgcatgcctgatcatcaaactctattatttttttcacagctactcgatcgtgtctcgattattgttgcaatttttgctccaaattgttatatttatctaatgctgtaaatataggtacgaaattggtacgaattcggaaagcacgagtacaattaggtaaaaaaaaaatataagcttaatatgatatgatacaaaaaatatataattaaacatgacactataataatttttgtaagtatcaaaaataaaatcacttgtatcggtaaaaataaaataatggcaaaaatgagacttctaataaatataatttcatgagatatttaaaattttcaaagcttactcataataaatattaattttgtttatgattcacactttatatatattgctcatattttcatattgctcccattactactttgtttatttcattttatcttttagtccaacttgtcaatatatcttaattaatttaattaatgtctacaatgaccttgcaccagaacgaacagatgtacccaaaccctagcatgtgcatcctaccaggacacacacatatatataagttacataaccaagacattcaaactcttctttctaaggaccatgatttcattgaaatcagtgcatatttgacttctacaattaatgatgcagataggcaggttcaacttcaataatcttataaatttgcatcatcaacacaataattacttgtttatatattaattaagtggaaactcccccacataatacatagtttacacataaaaaataataaaaacaaaagataatacttctaaaaaattcattgcccggtcccatgtgtattaagtcaaatcataaaactaaacaatagggaagtagcatttggcaaccacactccatgatttggccacacatggatggaggaccaatatttggtaaggctttatgtgttttcatattttatttctcaatcaacacctcatcattttcttaagcgtgtttttgtaattagctcagttttgcatcatggtatttgatcactatcaccacatctagttttatgagaaagctttgtgtaataaaattccaaaacaaaatgatgtcactcacaactgagatccatactcttggacgatgtagttgtttttggttactgtttttctgttcttttatcctttattttgattaactttactgccgaagagttctaggtgtctagtgtgaggcccactttgatgaggtcaaaattattagattagtatcaaatttatgtcacactgaattggtattgacatctttgtccaaattctaacagagttgagtagccactcatgaagttttatatgcataaataacacttccaaaactttccaactattttagaaagatgatgccaaattcactcctttttttttccatcaaaattcctttttcttggacagttgattaagatgagccaattgtgatgatgaactacctatagatagtccaaggtgaga

SEQ ID NO: 185775 - DNA, 2127 bp, Cannabis indica
aatacatgatgatacattagatattgaataactcagtatcggtcagtaggatatggactaattagcgactcttcgagttcacggaaacctctgtaaacagcctcagtctgactttgtggaaggggcaatctccgcacctcagtcatgtacctgccacattcaaccggtgaaagctcagaccaaggaccgggttaaggacacactaaattataagaattgaaattagggaaagacaactaaaaattgcagggtggtcagtttgctactatttaggagtacctaacctaacactttgcctatagtaaacactaaacacgaaaattgaaggaatttcaatattcttcggtcactgatgtataaattttatgtcgaaagactagattagagataaataagcaaccccacctatttagaaacatatagcataaagtagaaatcaactgacctgtttgctgcactagtaatcttatcacgaatcccttgattcataactgccgtttgatccattgagaatgttccacctaaaattaacgaggctccagttgcgcttgttcccattctctgtgcaaatacagacattgcccactctctaagtagtgctagtactgatctgagaagacgcaatcttagcttggatgatggcaaaatagctccacttgatagcaattgatcgtaagtgttcaaaacaggctcagttgcacctttgcaagccgcgagaagagcccttgaaacatcttcgtccccaactgattcaacccctgactccaatctctcctatgaaaaagtaaagcaccaacaaaatcaggcaataaattaatcatctacagataaatcattccctaaaaaagctttaatcacataaaattgctcatgtgtgcaaaaagtaccagtgcagccttttccagatgaagacacaaagagtctaaaggtaaaccagctccatctccaggataaatgtgggaaccaacccgcttgagtactgcacaggcttcggcaatgccaccccttgaaagagcttgatcaataagtctaccacatgtttctcttataatactactgtcagcatcgccagaatagcttgcaaagtataacatttcgaggcaaatctgattgcagcaaaggaaaaccaggaccatgaaatgtaagttaacttggaagcttgtagcaagctcaagctacggaagcgttaacaattagagtaatacactgatattatagctatatatatattaaaataatgccactaattgtattcagttaatagctcatttgataagaatattaagtattacctcccaaagctcaaatggaacagcatagtcattatatagctgagtaatactcttcatatctaatgatagctctttggccttttgtcttgcattatttgcaagattagcatcctcagttgatgtgctttccatgccagctccattttggacagactcattatttgatgaagcttctagcctggaagctacagcttccagttcttctttgatcttaatctgaaaccgaagaacagcaagtttcccttccagtaaatctagtagaccattgtcagcagcaccctttgtagaactcaccaggccattactggtagtagcattcttagcttgtaaaactgcattacttaagtactgacacctgaaatttacaagtaaaagaagcattagaagacaatgggctagcaccaaggtttgttggctctgtaattgtttctaaggatagtaaaaaaggatagtaacctaagaatatccatgctgccagccaggaaaaagaaaacacaaaagatatataataataaggaagatcttttaacctttgctctatagtaggtgcatcccccgcatcagttgagcgtctttcagccagtcttagcaatatatgggctgcaagcaggtgctgctgttttaagacataatatcgtgccaagagatcaaagtattttgcttgattgggcaggataggtgatccaaattgacccatcggtgaattcactgcagaagcagctcgaatctacaagtatgacagaaacacgaggatcggaaacataagaatgagagcatacagtgcacaaacttaaaaagaacaaagaacttcaaattataatattttttaagaaaa

SEQ ID NO: 185776 - DNA, 5551 bp, Cannabis indica
aacaatggtatgtttcaacacattgccaagatcaatgctgagcgtgttcgtggtcttcaaccaagattagtgtctggactaacggtaacggtaatgaaggagatcataataataaggctatgaaagaggttgctggagtttatcaaatgttgccaccgttatttaagacagttcaagaacagactggaatgttgccaccttcttggatgggaaccttgtccactgattctcctattgatcactcacccaattctcacacttaaaaggtcctttttataattattattattggtattttatatatttatcttctgttcaaactaggtttttttttttttttttttggtctaccaagacattttagaatttatatcatgaatttatcaattgagtgagtgttgaaagattgtagtagttgggttggctgcaatttttagcagcaaggagatgagtgttaaaatactttacctggactaacataattaagtattgcttaatcagtgttaaatttaatctgattggtagatccatgaacatgctctaaagagctatttacaaaaatataattttttaaagattattttcatatatatggggtttaacttttgcttatcatttcaattaagcttttaatatggcactttttttatgtttgtaaaatctattaacatatttgaaattaaaaaatgttgttactatataaattacatattcaattaataataaaaaataaataaacattaataaataaaattaaattatatatttaaatcttaaaaaaatatatatgtataatattatattaataaatcttacaaattaattgaatatgtttacattagactaataaaatattttcttcaagaagtacatatataatgaatgagaatcactgtagttattaataagatagtatctatatttatttagtgattatgaatttatctccttcaatacttgttttttttcttaaaatttatattatcttcactctcatatcacaatataacacaatttttaggtactttttgacaatattagttgataaaatatttttaatttattataaatattttatgagaataaaatattcattttattgtgtatatcacgatttcatggctttctatttctttcaagaaactttgcataaaagagaagaaattctctttatagaaagtttatttaaattagtttatttttagtataacgactctaattatattgtgattgataaaattggttaattgatatgtatatagcagatttcctaacttttttacggatttatttttcaattttttgcaatattttacgatattgatcaataataagccatatttaaggttagaaatgatttttaccaatgattaacgataatttgtatatttagcgatatatttatgatatgagattaaaaatgcaaagaatatcacaaatcatcatgaaaactttagtgtgatttcacgatatttagtgatgttaacatttaataatgttttgtgacatcgtctaaaacttaaagaaaaaaaacacaaaacacgagcgagttcagaactctagtgatgagtagggatttcgtggattttaagatagttgaactcatggattttagggttttagagtgaagactacaagtagatcagtgagagagttagaaagagagacctttttttttttaaatgtgaatgtatttttgagggaaaaatattaaaagtataaatatcttatttctagttaagtaatatattaaaagaccatattttacatttaaacatgctatatgcaaatttgtcttggacaaagtcttctactaagattaattgagtgggacccactcaaaggttagtattttttatttattatttttttttttggcttaatctcaaaggttggtgccaaaatgattatttctcatgttttcacaacatggtttgccaacacaatgctctctctcaccatgcaagattgagatgacttttggctttgctcgtttactactgttattatataagaaaaatttgactaattatagatgcatgccaaaaatgaaaattagaagaataggtagacattttgttctcccctcaaaatatatctctccgtacgctccaagttcatcctctttccattttctttctctcttcactctcttctctcttacatcatcttctcactttctctctagccaaacactactacaaaagacacttttagtatcagttcaagtttcacttattttaaaaaactgacactatagaataccttttgttttaagtgtcagtttttaaactgacactaaaaaaaatcaatggtgtcagtcaataaatcgacactaaagcctaaactgaaatttaaagagttaagaaaaaaactaaaacacctatatggtctcagtttataaccgagacttaaaaggttaaataacctcttaagtctcggttataaaccaaggccaaagagaatcaaaacttaaaaagaaaaatcaccccaaacccaaaccctttacctcatttcatttctcttcttccccaaaccaaaatcccttatctctgctcgtctcttcttagcgtcactctcatctcatctctctcgccaccagccccaacccctgtcgtcggacccccaacaccaacaacgaccgtcgaaaccctaccctcactgtcggacccccttgcaccaacagaaggagcaccaatgacgaaccccttcgtggattacatattttgataaactgtacacacccgacgaaatagtttaggatgactgcgcggaattcattgagtaggatgtacttttcttatcctaagtagttttaggataaatatagtactttgttatactatttattgaatttagtataagtaagatgtgatgttcttgctatttaatttttattgatattttatgttaattttgaaatcttatattgtaggtgaggaaattgatattcactgctaataatattgtgttgttttaaaattgacattaaaaaaactgtatcggttataaagcaacgtaaaaggaaaaaaaaattcataaaatagtctttttggtgtcgttttataaatgacactaaagaatctttaagtgtcagttataaaatgatactaaaactcaatagtgtcagttttaaactgacactaaaagaaaaaatatatatgtatactttaagtgtcagttgtaaaatgacactaaaagttaatagtgtcggtttaaaatcgacactaaacatttgactttttgtaactgtagaataggtgtccgttttatgaactgacactaaaagtataagtgtcagtttaaaaccgacaccaaaagtgcaatttgtagtagtgaaatcacactaaaattttgcataaattatacattttacctctcccagctcctacaagtaaagcaccttagtgatgagacgtttttcttgaggaagcatgcaacgaattcgggaacaatcaacaagtaagtaaagttttttgcttatttttgttgttcgtttttatatttagtttagagtattgtttggatgtttgaactatgggttgttcttgtgttttgctaattttgtgtggaattggttattgttcgagaattctgcgtattttttagtttttaggctttttttgcctagtttgatgtaggcccagcactgggctaaggcaggctaggcccatacttagggctcactctaacccagggtccaaaaattttatatagtatatttttttatattgaaaaaaatggtatttttgaaaaaatttgtaaaaagaaggccaataatactcacattttacttaagataaaatacacacttaaaaaatttctttggcccattattactcagggttggccctggtctgatggggtccaatagtggcacgatagtagtttgatagtttgctcagatccaaggtcagaaataatttcttgatggggtccaattgtgtgcctgatggtgtccaatggttgttcatttttaatgtctatttaaaggacccgataaggtccgatatatgtttcatggtagttcaattttgagatcagtgtggaggacctgatgtagttttgatataggaccgatagtgtgtccgatggttattcaattttgaggtctgtttgaaggacatgattgtgtcgaatatacgtccggtaggggtccaattgggttccaaaattactcatgttcatgaattatttgttctggctaatgattttttcttcttaatactattttttatatctgtgaaagacatgttcaactgtttttgcattcatcacgtataatagtatttaggaacttgagggtaaagattgggtttttagcagagcttcatgataggtccactttattcttagatttaattttgtgcatcaacaacttatagatcaatgcacccaaaaagtttagtgactctctctcaaagaattatttgaaagggattctttcacctttttttttttttaataattggaattccttaaattttgatttaattctcagatagtaaaaactaccgccacgccaaatgatacgacctgtgtaatgctctgacactagaagtataggcatggctgaaaacaaaaaagaaacaagaaaatagatgttagacaatctgtagcaaatcattagatcaacatcggatagctatcgaaccagtatcggatacacacaaaatgatagtaaaaataaaaaaatgcaataaccatcggacccactattaggccccaatcgccctctatcgggcctacatgcattctattaaaaataaaaataaaaattaataacaattggacctactatcgggcccccaatcatcctctatcggacctacaagaattctattttttttaaaaaaaaaactgtataactatcagacccactatgaggcctcccatcgtcatctatcggacctacaagcattctatcaattgtaatcacaatcacacacacaatcggtccaccatcgtcctgtattggacctacaaacaatctatcaaatttcaaaaagtacaaggaagtatcgagcctacatcggccctttatcttcaatctccattccatgattgggcattggatctacatcgggcccgatctaaaaaaccagatttcttgcctacaacacatatctaaccccaatcatacataaatctaactcaaactcacagatcaagacaaatcaataaacttataaattgctaccctaaatcaataaatctataactcttaacacccaaaaaactacaacaaaatgaaaaaaaaaaaaaaagagccctaaaacttaccttagtcatttcagacgatggtcgtgggttaggatgaactggtttaggcgcacatcattggtgagatgcaagggggtttttggtgaaaattcgagaccgtcgttttaattgagcgaagagagcaagaaagaaaggaaggagagattgagtgactagcagaggcggaggggaatggggtcatgccacatgaccccactcaactctcaagaaattatttttgcataattttgttttatatattttcattttcgccccacaaatatttttt

SEQ ID NO: 185777 - DNA, 4036 bp, Cannabis indica
aactcagcttaacagctccacgtcaacgggttgtcctttctcagacccactcgccaaaaatccatcacttgaacgaaacacacggcagcagaacagtataaaattcctttattattattattaataataataaaaaatttttaaaataaaaaaaaaacaatattgatttttcaaaagcagaaatttatttattttaaaggaaaaaaaaaaaaacgaaacaagaagaagaagattgaattttaattattataattgtataattatattgaaatggcgtcgtttgtctttgtggagcaagaatttgaaagttgaaacgaaaaggtgaacataaaaaagggacggatgtgaagaggagtagtgaaatacaattaaatagctccactgagttccgaccgcacctgccccaaacccaaagtcccaaacccaaactcctctcttccaacgcagcttcctaaaaagctaagcaagtgagcaccgttttagaaacgcaagcaaacaaagcgtgaattcttcagagaaagataattaatagagttctaaaacataaaaaagggaaaaacgacgctgcgttttgggtcccaaatgctctgaaatggctatagctgaccaaaagtcttcttcgtcatcctcatccacctccgccgacggtaaactatggggctttttgaagaggccttttcgcccaacggcgaccaccaccaccaatttctcgtcctcgtcttcttcccaacataatcatcataaccataatcataatcatattaatgctaatactaatgctcatcatccccacaactcaaactcataccacgatgcttccaatcttcacgccaccaacaattcggtttcttccgtcgccaggtcgctgctcccaactcgacgtcgcctcaagcttgatccctccaataagctctactttccttgtaagtcaatttcgtttttcattttctcttcttcttcatactgtcatgcgatctgattcgtttagtggcttgatcttgttttgacttttttagtctttgaattttgtttttctttgctaggatttgtgcttaattttccttaattgattaattgacttgggagatatgcttattaacatgcgattactccttttatttttcctctctagaaattgggtttttatatttaattttttttattaagattctctcttcttattccggtagtacaggatttatttattttttcttggtttacattacactacaatcttgttgtgcgtgaattctttcctcaacgaatgtaaaatcaagcaaacttattaggattaaatctatacactagaggcaattgctgaagaagtttttctgggtaattgagtcttaagagtttgttatctgaaaatcgatttgtactggaggcattttgaaatcctggaattacatctatattaaacttaaatgcgtgtatacttaatatcataattaatgagacatatatgtgtgcgagcgacctcacatgtgtcgatttcgttgtttttttctctttttcaggttgtttttgtttttattttctgtccttgtattgcattttttttttcctcttttgtctttctggatccacatgtattcatcgttttgctatttattatcttacatgtaatgtatttattgttttctcttgaaggtgaacctggtaaacaagttaggagtgccattaaaataaaaaattctagcaaatcccatgtagcattcaaggtattaacttcaaatttcttattttctctttttcttagcatttttatgtcacccttctatggtgatatgttctctgttcgttgatatgctctcaatgatgatctagattctatgctaatgtttctatagaaaggtcatcacagagttaaaattgcggcacttttcatatttaggtctctaatagtttcttgatgtcttgcttcagtttcaaaccactgcaccaaaaagttgctttatgcgtcctcctggagctattcttgctcctggcgagagtcttattgcaactggtaatgcttctttgtaagacatttaaaagattgtgcatatcttcctatttaaataagatagactttttgaagttttaatattcttattgattgaacttgtccttttgctaaattggtattagtgttcaagtttgtggagcttcctgagaacaatgaaaagttggttgatcaaaagagcagggttaagtttaaaatcatgagcctgaaggtgaaaggaccaatggattatgtacccgagctggtgcgtttcactcatcctttgtgttaatatatttatcatgtatttgttacatgttacacatcattgcattgatgagcttctccttaacattttatttgagatttcaataaggtgtcgtttttgtggatttaagtatattacatactgcagtgatccttttcttgatcttatggatatgcatcttgttcttaatttttttgttactgccctttaatgaagtcatagtaagcactctttgaaggtttataccatacaagcgttcagtcaaattgaaatttgaagttcattgtccgtaaccacacattgaactatttatccctggatttgacttgttttatatagtctatagattcttcttccaaaatgtttttactttcataacttgaatacctgtactgtttcttaataatggattctaacctatttctttggaaatcatttaaattgttcgttgatggtcacagttcgaagagcagaaggatcaagttgctatagaacagatattgcgggttgtttttctagatccggagcgtcctagtccggtaagtgttatttgtctttatttcattgtactactagcatttacaattgtcacgctggttaagctgctgacttccaaatgtgtattttgcttcttatttaaagactttggaaaagttgaaacgccaattagctgaagctgatgctgcgcttgaggcacgcaagaaaccgacagaagatgcaggtccaaaaattattggagaagggcttgtaatcgatgaatgggtgagttttgtccattcttatctttttaaatattgttttgtgcaatgcacatgttttcccttttataacatccgttcttgtatatgtacttctgatgtgcagaaagagcgaagggaaagatatcttgctcgacagcaggttgaaggagtggactcagtataatgtggtgcttctttccttgccgttgtttttattgttctgtgattggatgggaatcaatatctattactatcttctcaaaaaaaatatataacatattaggactttacaatataagtcagtgtaaaaaaaaaagaatttcctggagaagctttcatagttgaggaactcagaacttggatttcaatacctgcctgtagataaagtgattttgtttcttttattttaagaaataaaattgagtctaatgggttgtaaatgacaaaattggtctgccagtctttgaagtgttaaatgcacttctatatatagttctttgttcttttctttttctttataataccttatttcggcctaatagatggttccaggaagatttggattgcggcttctgtagttttagacagacaagtatgattagcccgcaatatcagaaaaaccctccgatgagcttaatagtaatacactgtttcatttgtttgtgaccctttttcttcaacggtcctaagactaagacaaataagtgaggcaaaataaaaatatagttcacctagccaaaaatgatgcaaataaggtggattaataatgaacttatttgattttaatctaattatgtcttttattaaaaaaaaaattattttgatttttaataatgaacttatttttattttttaattacaattaattaataagaaaagaatgggtctgtctctttacacgatttgtgagaggcaggaaataaggtggaatgtcaccttaagttgctttctcaacgaaaaaaaagattattagatggctcattgcagaaaacaaaaaatataaatatgacaaaagaatctcttatcaataaattagtagtattc

SEQ ID NO: 185778 - DNA, 2339 bp, Cannabis indica
ggactgccttttgtcttccacccccatcttcttcgtgctcaacctgacaaacaaaaaaacgatgaatatttggctagcgattatagcagtattcttatatcaaactacccatattgtatgtactaagcaacaggctgaggagtgactggtaattttttttgctattgagagaaaataaatgatcatgttctacatgttgatgagccataaattaatgtttgggagcatgaaactagagcatttgtcatcttggttcatagaagggactcaaacctggggctcggaccttgttggaacaagctacatccctaaccattagagagctacccatcttgggtattaagttgccatattttgttacttagcaacatgaccacaaagacatagaaagtaaatcgggtataagtaaaagtttaaatgatagtaacatttacctcaacaattactcttgccttctttttcaatttagcaacagcgccatccttctcaaactttctagaagccgcagcagactcttttctcactctcttgtgagggagtggttctgcatcttcatcatcttcttccactccaactacaccattcagctttatatgagtacatctcatatatatatttgaacattttgccatagtcttataaccgataagcacaataaaaccaaaggaataaatgttgaacaaaaaacatagaatcagctgtaccattatcatcatcatccaagtgacttcgggcaattccaagaccatcaaaatcttcgatatcatcctcttcttcaagttcctcataaccttcaacatattcaatctcaggttcctgcattttccaaggacagaaaagagaagagaaaatgtaagcaatcaataaacagtcattatatattttcaatagcaacatcaaatataatttatgaaaaaggaaatgctatacataaatacctcctcctcttcctcttcttcgccggtaagctgtaattcttcctgctcaagaaccttgttgtattctttgacaggatagttatatatatcaccataaactccttttttaaggcgttctagtaattctttttcgatactctgcaaaaacaaaaactctttacagatccattggagaaaacatactttttaaacgttagtacaccattgcagattcataaccttatccaacaaggcagctttttcagccttttcctctctcctagactccctctttttctcttttctcggtgttgtcattattttctccctgttagacacagaaacaaaagagcaaagaaatacaagttagatgcatcatgtaaaagatattacctagcatagcaagcaaccctttcaatgcaatagctaatcaaaacatgaacagtattcaaacgtgataatgtcatattagaatcaattaagacatatatcatgtgatggaaagtgaaacaacgatagcatgaaataaaataaaccttgtttttaaagcaagcttcctcatccgtatcctcatttgtgtcattttggtcaaccgctgctttgtcttgtgtacaagaaacttaggccaatacatctgtgaattcaagaggcttatgaaaaattagcaattaaacacctttggatcaaaagaattcattacacacttaatggagaattttaataccaagtgtttgtcaatgatttcgagtgctttttcataattcctgggcaacttaactctttcccacaatttgttaggcatatgagctctttcaatagttttcatataaagatagaacactcctgcaaaacagtcacaataacataattagatatacataataatgcacaaatcataagttgtaacaccctacggaccaaaagctgcaagataccatatttccttctctcaaagttgatttcattactttaacaactttatccaatgagaccagtaaactattctcatgaaataggtaagagaaaccttgacagcacacacatacaaataaaaattataaatgggcaagactattgggtcttcaacttcaactttcaaagtaagcaaacaaaatcttaaagcaaaaacttcgaaaaatcataacattaggaagaaaaaatgaaaatcaattaccatcatggtcacgaatggtggcgtagcgactattggcaagagggcaagagctccggttacagattccagtcacattatatggattgcgacaaaaaatcccagtttcaattctgcaacacacaaaaacaccaatcaccatctttcacaaatttctcatcaaaaaacttaaaagatgggcagtaatggaaaactagagcggagaaattccaactttaagaaaagacagaaaatgaaaaagaagaagaaaa

SEQ ID NO: 185779 - DNA, 5364 bp, Cannabis indica
gcataaaaactcaaatttcccaattaaattttgataatgcaatatgcatgtgggtacgcaatgagctttgttaccctttgtatgacctccgtgatctccgatcattgtaaaaaagattctttaggatggacggctgggatcttaaaattcaataggggatgcaaatgacttcactaccctagccgttatctgggttttgtctatatatacgaacacatagacataaatttaatttatgttattttaaatatatatagtcggggaaaagtttacagagaaagatggggcacgagagctttacggctcagaagagaagtggaggaagtgtgttaccgactagtaataatggctcagctgtcaatggtagaagtcgtggatttgggagcttacctcgtggccgtcagatccaaaaaaccttcaacaacatcaagattaccattctgtgtggtttcgttactatccttgttctacgtggaacaatcggagtcggaaaccttggcggctccgattccgacgccgtcaaccagcacatcatcgaagagacgaaccggatcctcgccgagatccgatccgacggtgatcccaacgacccggatgagcttgccgactctgagatcaatcctaatgttacatatactcttggccccaagatcgaaaattggaaccaggagcggaaagcctggcttgattcgaacccggagtttcccagctatgtgaatggtaagcctcgtattttgctcgtaactgggtcgccacctaagccttgtgataacccaattggggatcattatttgctgaaagggattaagaataagattgattattgtaggcttcatgggattgagattgtgtataatttggctcatttggataaggagcttgctgggtattgggcgaaattgccattacttaggcgtttgatgttatcccatcctgaagttgagtggatttggtggatggatagtgatgcattgtttactgatatggtgtttgagatcccagtttctaagtatgataattataatttggttgttcacgggtaccctgatttgatgtttgaacaaaaatcttggattgctttgaatactggtagctttttgtttagaaattgtcaatggtctctggatttgcttgatgcttgggctccaatgggtccaaagggtccggttcgagaagaggctgggagggttttgactgcctatctcaagggaaggccggcgtttgaggcagatgatcagtcagcattgatatacttattgctttcacagaaggaccaatggatggataaggtgtttcttgagaattcatactacttacatggctattgggctggtttagttgatcgttatgaagagatgatagagaagtatcatccaggattgggagatgagagatggccatttgtgacccattttgtgggctgcaagccttgtgggagctatggagattacccggttgagaagtgcttgagcagtatggaaagggcattcaattttgcagacaaccaagtgcttcagctgtatggtttcaggcacaggggcttgttgagtcctaagatcaagagggtcaggaatgagacagtcactcctcttgagtacgttgacaagttcgatattcggcggcatcctgtccaggagattaaggggtcgaagagctagttagtaatactatacaatcaaatctttcattgtgtgagataatctgtaggcaatgttttaagtcatcaactacagaaacagatctaatattgataacagttcacatcttgcgtaagttttgctcgacctgttgtcttttgccattgctttctgagatccatagaagaaaattctttcataagtttgatatccatctttgtattatcagtgcttttgtagttaatttataaggaattgaaattgtctcattgatttcatctttgtaatatgtgtagatgttgatgaaaggaccaacttgggtcatgttaatgtacgcttgatctgattttaatcccttttggcatcaactgtgggttcccatgaccataagagctaaccgtggcgtacattctctttaatttcatatagaaaactacaccatataacctgttcttcactgtgcgtcctcttgataaagtgcaaagggttgtatttgatttctttttctcttttgtcctttatcccacttttattttattttttcggttagcttgagaaaatgtatagtgtagtttctagtcagatcacattattttacagaccattgattttttaattcccggaagggaaaatgccataaactgtaattttcttaggctcttcttacaatttagaaactgacttgttattaagtatcttttcttggcatttttcagttgtttgcattgggaaaaataatgatttactgtacattgttatcggttttgctcattatgttatcaatcatgccatacatttctgattctagcaataggagatatagttgactacaaaaataagaaaaagaagaaaagacagacttgttttcccaagattcctttgtttctcctgcctctatggactcgtatacaactacaaataatccagaatgtaacttttcactcccccaccaaaaatatgagttggatggaatcctttataatatagattatagctaagtcaacaccatcgtgcgttcttgtttctttaattttgcaacctaaataaatatataattttcttaaagcatgaaagcaagaaaatgtactttttcttttttagaatggctacccacgtaattttatcttataggggtgtgacactgtccaaagtcaaatagcaaatgtttcttttattgtgcttcttcgaaatgaacaaagagccaacctttaccagcatcgaacaattttctcaaacataacaccattactaacagttatagttaacttaagcttttatcatctgttctgtttttactttctaagttttattttgtgttcatagttaatcgtatttttccgccaatgaactaaatgatgcacattggagcttcaatgtaggatccaagataaaggggagaaaaaagagattccctcatgaaccatgactatctttttcagattctcatgtttctttcactgttgaaattcttacgaacaaagttaattaggttcaccattaatgaaatgaacaacgaaattggggtacaacaaacaaagcttggtgcatgagtcattacaaagggtaaaacacaaacttacaaaacccaaaccatgaacctaaatagtgcatcaaataattctacaggagcctaaaaaataaaagaatattttatagaacttttaactttagtgtgtcctaaaacatagggtgctgtactaatcccttgctaaggcatagctttccagtgcagagtatttgcggagcacaaattggccgtcgcatggtaatttgaccatgtgcgctttatcataatagcaacaaaggttattgtcaatgcctatcattatgcctcgtaaccgtaatgccttctatactcctagctgtaatagtcatgcataacaccaagtccaaaactgtgctcccttgactacttggctaacttttctcgaaggcaataacaatcacttggccacttttgaagccagaagtttgtggcgagttattagtagctcattcaactgagcaatttgatgcaacagtttaattattttctgcagttgacccaatgcaataattagtattaagggtaccatagcaaatgaataaagtaccttaatgactaaattgtaacaaaacaaaatacttgagttgagtttaggacacaaaaacaagagggcttaaacaacaacatttgcaattgtcaagaccgataaccaatataaatgcagtctaagaatgaggttataattttaaaaaacaaaaaaggaaaacccagaaagagaattgtttcaacagtgattgccctaaattctctccttgttctcttattggcatttccacaaacacctagaagccatactaaacatgagcccttgttaacataacaaacaatttaaaagaaaattgaaaaatgctaacctcgtctttcttcttgataatcaacatcaaattttcctgacgccgccggagccgagcccggataaaaaacgaccaccacatcaccacaacagctgcaattccggcaccggagacaaacgaccaaagacaccatttcatggcgccattgcccccaaacgcagaagaagcaaaacgacgaagcttcgaaagcaaaacatcaaatcctagtcccatccagctggtggagtctcctgatattttgaccctggaatcggacgccagcggtgattccgggtcagatgcatctgagtcggaaggcgagaacgacgaagacgaagatgaagaaaacgacaaggtagacgatggaggtgttggtgaaaatgaatcttcttgtacttcagtaaagcgtagattttcatggtttgttggagggaaaacggagaattcgtttttggggagagagtctcggatcaccaccatggacgattctgtgaaatgggttttgtggaaattccagagattgatgttttcggtgtcgtttggttctgggaaaatgtcgtccaccatcatttttggacgactgctactgctgtgaggaagaagtagaggaagaaagtaaggtccacaaatttcagagaaaaggaaagaatgaaccaagcaaaggcaagccggaaatgtgcgcgttgtgtttttttcattccaaaaaaataaaaaaaaaaaaaaaacttttgcaattggctgagtgagtctctcctctctcattttaaggaggtaattaggaatttttaccaatgtccctaacttttcaactcatttttttttttaacattaagattgttagatgcaataattgctgtttaattttgcttaattttactaatataatgattgtctatgtatcaaattatactctcaaactttgacatttacaaattcatactttcaaacttcaacatgtacaaaattatattttatgaactttcatccacgtcaagttttttttagtaaaattagataaaaatctttaaatccaacagttttaatagttcataggaatttgttttagcctaaaaagttggatgagtatgaattggtacatgttaaaattcgggatcaaaaatcctaattattagatttgaaaactaaaattatactttatttgatttgaaaattttatcctcttcacaacattttattttaaattttggaccaaaattgaatgtcacaagtgtactgtacacaatttcacctcttagagcactagcttataattaaaaataaataagaatgttaattcaatttaatttgtaatattttgtttacaatgcattaaatctcggatttcata

SEQ ID NO: 185780 - DNA, 3632 bp, Cannabis indica
ttttttttggtttagttcctatcgtagtttttccaagttttggaagttccagtcccatttttgttcaatttgctcttgtagtgcattgaaacggacaaattttggtggatatgtattatgggtaattatatatatcttttatatttatgatgtagttctaatggcagttccggatataggtcattaactgatcagctggtgaaggttcaaattgttaatgaggttaacaaggtaaaacaaaatattctttccctttagataatccactttttcttcttgtttctcttaatgcatcaattgttcttgtcttgtgtgcttctatgaaggattttgtcattgaagcgattagatcaattgccgagttgataacatatggtgaccagcatgatgatgcaacatttttcgagtgagataacgagactttgaattgcttgtttcttgttgaacatgtttcactatgagcattttcatgttgtccttgatgtatccaggcttttcatggagaaacaagttatgggggagtttgtacgtatattgaagattactagaaccttggctgtttcgctccagttgttgcagactgttagcattttgattcagaacctagaaaacgaacatgctttatgtaagttcttaaactgttatgtatctgatttctttatttaattagcataatgcaaacttgaagatcttctccatcttaatgcttctgcagattatttgttcagcaatgagtatatgaactacttaataacgtattcatttgactttcgaaaccacgacctattatcttactacatatcattcctaaggtttggtactaactactttgatttgctctattgctaccttctgcgaatatacttctgaatgtattttactgatctggtgtaaatttcatgtctgtggtctgtgaagagcaataagtcgaaagctagacaagaatacaatttcgctgcttgtaaagactgaaaatgtaagttttctgagatgtctgcttcttttcttcatacacaattataaagatactgctacttaaacatgaacattacaaagatactctgaaatgctcaagtggttgagtgtgttggggtggggccaggggttcaaatctctgttatataaaaaaaatattgcaaagatacttttaaggatttggttatggaattgctttggaaggatttgctggcatacgagaagctgttttagaaaaaggaggatgtaaattggaactgtcacaggtgcatggttgtgtagtgaatggttaccccactgcgttttgagtgtaatagtctggcagattagtcctaaagcttttatttttttccccttgacatttaaattttcaatcttattaaaatggcacagccatggcttcagacttgtccactgcccgtgtttgtaggacacataactgacttgctttctcacgctattgatcttgatctaatagtctggtcttttgtggatggtcaacatgtatgcatgctatttaccattgtagaaagctccgtaggaaaaaatttctttctcattgtgcattcatcatctccataccttggtaggtttggtttggaggcattctagcaactaagggttacaaggttttttgaatttttgatgttaagaattgtacgttgagacatgagaactagcagcgagtgtttctcacctgcatcatagtttttgagaaagtcaggagacaaattatggtttgcttcttgctgccagtttctcaaagaggctcataatgttatgataagcttttgcaaacatagagaaaaataggatgaaacagagagttgtattgataatccaagaatttgagagcatgtctctcctacgcaaataaaaaatttctattttccctactgttcataatcccatgctggaaggttgccaaaatatttttaaagtcagccaatcattgttcccaccttaaccgcatattgtggcgagtcatattgtgttgatgtgacggtcaacagcatttcatgctttctcctagcatatgtaaaagggtatttgtggcctatcaggtttctagagtcaattgttacctttgagtgattgcccattcaattgtatgaaatcattgagtctttgtttcatgttatggaggcaattctctaggtgcttgcctgttgttctttgatgattgagtgacattctcttgcctttattgttggttatcatttgaagtgaaccttcctttaatattgaaaatcaatataatatgaaaatcaagtaggtactatatttgaataagaacaggaaagtacatgtttgagatgaaaattaaacaaacaataaatttttgagtacttggacaatttaaggccaacaatagatttatttgttagctttaggagtatcataatagggcttgtgccatctggtgttttgctagtgtgtttgcttttagccaggaggtgctttgtataattttgatctctttgtgtctctttgttatcctctatttatataggatgaagttgtttcttttcctttatatgttgaggcaatacgatttgccttccatgaggagagcatgattcggactgcggtacgtaatttgacacttaatatatatattggtgagtttcggttctttcttctctctgtgtctatcttctttttcctttctctgtctgtctattatcttcttatcattcttctcaaagtgaaactatcttttgttaaatgtatattgattggtgatatatgattttgacattttcagttggagatgattgtgtaaatagatacgtcacaagtgctcctcatgcagattattttttaaatctggttacatttttacagaagcagtgcattgatttgacccaattggtctcttatgctctgaagtaagatttggagtttctgatttttaatgtgggagcaatatgattatattcctctaaaatgttaatttatatatttttttttctttcgagacagaagtcccactgaagagataacctcatcaatttttgccgctgtagatgaaattgaagattctctctactattttagtgatgttatgtctgctggaattcctgatgttgggaggttaatgacagacaatcttttgcagcttttgatttttccaattctagttccttcactaacgataaaagctgtgaatgtatgaattccaagctctccttatttttttttttgcatcttttcttaaggatgtttatttggttatgcataggcaacttaatattatgtaacatttgcaagcttgtcaatccaggatatgagaagtggtatagtcacttccctgtatttactatgttgcatcttgcggattgtcaaaaccaaagatttggcaaatgttattgctgctgctctcctttgtcctttagaagctttcatatcacagtctctagctaaaacgaatggatatatgcctgctcatgagtgctcacatgacatcaaggtggatgctatcagctcaaactttgacgattcaaattcatctgggacttcccaaactcacccagtagattttgttgaaaatggttgtgattattcacgtttggcattgaggtaacatatattacagctgagttcagtttcttggggttttttttttttttttttttttttaattttttagttag

SEQ ID NO: 185781 - DNA, 5086 bp, Cannabis indica
gctacgaggttaggttgcaaactgtttcaattttataacttctgggctaatcataaggagtttaaagaggttgttttagacagttggagcaaaccgatgagaaattatggtctctagggagtttatcttaaagctatgaggctaaaacataagcccaaagagttcaacaggcacttgtttggtgatattaaagaggcttatgaaaaagctaagaacaattacaaggaagctcaactagttctccaagctgattctctaaatagtttactcatagatagagagaaagtggttgtgcagcaatttcaaaatttggagcagatgtacttgaatttccttagtcaaaggagtaaagttagatggattcaaagaggagatgctaatacggcttactttcatgctttgctgaaaaaaaaaaagaaaggaggatagtaggattgtttcgtttgtttcagatgaaggcatcttgattgacaatttctctgatgttgctaatcattttctcaaccattttcgaaacataatgggcaaagaaaattcgacatctttggctattaagcaggagtgcattgctatgggaccaaaactcaatcttgaccaacaggtttctctcttaaaacctttttcgctcaaagaggttagagttgccttgtttaaaattcctaatactaaatctccaagtcctaatggatttggatcaggtttttttaaatctgtttggcctgaggtggggaaggatatccatagtgcgatcactcatttttttacacaaataagttcccggctgaacttcacaatactgctatacttctaattccaaaaattgatcatccttccagggttgttgattatcgaccaattacttacaacactactttgtacaaatgcatctctaaactcttatgttctcgattggctagagttcttctgaatttaatcaatcaaaaccagggtgcttttgtgaaaggcagatcgattgcttacaacattttgattcttcaagaccttttgaagaattataagaggaaaaattgctctcctaggtgcactataaaaattgatatcagcaaagcttatgatacaatcaactgggactttcttaagtagttgctaatttcttattgcttccctactaaattcataagttaggttatgacttgtgggagaaagacatcttattctttacttatgaatggaagatttcagggtacttttaaaggagagcaaggtttgaggcaaggggatccaatatcgccgcttttatttattcttataatagaatacctgtctcggagattccagcttgcagccaaggataaaaaatttaggtatcaccctctttgtagaaaacttaagctttacaaatctctgtttcgtagatgatcttgttgttttctataaaggggatgaggattcgactcaagtgatcaaggaggctttggaggagtttagtagaacttctggcttgaaaattaattttgagaaatcccaaatttattttgggggagtgagtcctgacgagaagtaagctgtactaagagattaacagttggtaggagtttctctaaaatacttagggattcctcttagacctaccaaatggagacttgatgattgtgatatcatcctaaaaaaatgaagcaaagaattctcacctgggctaataaacatctatcatttgctggtcgagttcaactaattcaatccactttgattggtcttaggaactattggatgagagttttccttctgcctcaaagtgtgattaaagagatcaagaaactttgtcgcagatttttatggggtctgaaggataatcagccaaagattcatttgtctagctgggagaaagtttgtcttcctaaagtgcttggcggccttggcttcaaagatggtaccctttggaataaagcttcccttgccagtttatttgggatttaatgaataaaaaagatctgttgtgggtgaaatgggttaatgcagtgtaccttaaggggaataacatctgctcttacatcttaaaagcagacacaagctggttttggaagaagttgtgttggatgagaactgagctcacttaagctagaatcatttgtgctggtgttgggggaactttcagagtgtttaaactctataatatgtcctaaaaccaggttttagatcctcctgcgaaagcgatttgttgcagcctcaatgttttgaagcatgggtttatattgtggcaggcggttcactcgaaccttctcaccagagatatgcttggcaggttttagattgttgttgagaatgactgttgtgctgtttgtggaacatatttggagtgccatcagcacttattctttgaatgtaggctgtcaagaaaggtgcttgctgatttgcttgtgtggctggggttcaaaggctctggtcgatcagttttagcagctggtattgctggttgtgtactgctccggtgagtttcattggcaacaactatttactatttatggaggaatatgaacaattgtatatacttgaattactctaaaacagtaaattgtattgttcaaagtattaaaaatgttgtaaagtatagattgagcatggtcaagaatagaaaaaggtctagatcggagattgatttacttgagagaatgatttgtaattaattgttgttgtgaggttggattttttcctttgggaaatcttgagagtgtattcagtttgtgccattaatgaagtttttcttattgataaaaaatatacataaagcgtgtctcaatatttttgttaattttttgtttctattgtacaatatttttgtaagttgtccaaatatatttaaggatactttcaatcaaaattagacatatttcacatttttataaaccaaagagaagacgctttactaggagtgaagaacttcttgatataataactttcacatcttatttaaacttacaaatgttgaacttgcagtacaaaatcaatacttcttaataaactcataaatgtgagtggtaatctcctctggtctggcttggttgatatagtgaccaacaccttctattatcacaatttcttggagagaaggaacatctttcttgaattcaccactttctatgtattcttttccacctaagaaacaatacgtactgtctttatccccacttataaactttgttggaactttgatttgtgattccgtccatggtgctaaaagttcccaatttctgaaaatccaaaaagaatatattaattaataaaatacatagggttagccttattttttttcatcaccaaaatttaagtttttgttttacaactattgtttatgggactgttttgcctagacaaaaatggttttacacgtttcacacatgcgagtctgttaattgagtgtcaagaaaagtgtttattttttcgtatctctcaaagcaagacatgaaaattcttttgtatcctacaaatagtacgcgaaaaataaaccaaaacgacacacattccacatcccgcactgtgagacacaaaagtaaaaattttcatgcccccgtagcgcggaagacaaaattctccaaaactttttccaagtccctcactttttgtgtagtagtggacttctccccaaattaaataaaatgaaaatgactattaattgaacaagcctcatgtatatatactgaaaatagatccaaattaaggcatgcatgaaggaataattgacatacaagttcaaagctcgataatagttgactcctccagtgaatcccttttggttgaacttgtttgcacaataattgatgtagtcttgggacaaccaagagggtaatggctcaacaagttttagtaatcctaatcctccttttggaatgataagaggtgttgtatcaaaagaagtatgaaatattttaagcactgttgcagtgtcaacagaacccaattcttggtcaatctctcctatttcttcctaaaaaaaataacataattaattaatgaagatcaataataatcgtaaagggctgcaatgatatttttctaattaatttaagtttttttttttttccttttaagcaaaaattatagcatagtaaatattctcacaaaacttgtatatttttttataaaaaatgtaattttcattaatacttttaaaatattctttttagaccccactaaaatattagactggcttagccactcaataaggataaagagtagccggcctaccaactactaaattattaacaatgatattggtaagtgttttactattttattattttattagacttttattaatattgtgagcaagaaaaattaaatagtacgttaagtaatacaaacaacacactaaaaaattaaatagttaactaaaaaattctgaataattttcattgtccaaaattagtttgaaaatcgtttatttcacttgatatagacttcaattattattgttgattattaattgtctttcttttaatggttactaattaagttactttattttcgataattatataaaatataataaaacgctcgtccccaaactttggatcatcatgtaataaagtcaaacgaaagatatagcatatatataatacatatataaaatctgaaaaatatattatgatcatgatcacctgaaatctgcagatatagaaatcatcccccataagagtcttaaacctttcatcaaagaatttaacgtgaggattcctatgaatgaaaaccacaccgaggttgaccaaagctttgactctgtcaggcctgagcaagcagaggtaccaagccatggctgctccccaatcatggcccaccaacaacacctgctcgatacccagatggtccaatagcccaacgaggtcaccaacaacgtggagagccgtgtacgacgccggagacggtggcgcgtcggtgtctccatagccacgaagatcgggagcaatgcagcggtaaccaagagaggaaagagacagcatttggtggcgccaggagatccaaagctcagggaagccgtggaggaacaggatcgccggaccagtcccgattgatgccacgtgcatgtttattccgttggtggtgatggttgaatgttctattttctccattg

SEQ ID NO: 185782 - DNA, 4579 bp, Cannabis indica
actaaccaaggaggttctatcattttggtgcggtgagctgcggatggcacccaagaaagctgtcgaacggtcggaaaacatggaagaagagatggagacaatgaagattgaactggcggcagtcaaagaatccatccaagaagtggggcgacaaatgcaacaacaactccagcagcaactgaaaagcttttttgagatgcaagaaaattcaagaaaggaccaagatgcgggggagaactcagccaaggatttcagcataaaagatacgtccaagatgccagccgagagtccgaacgatggaaattataggggaacttcattcgatacacgccggggcagccctcgattgggagaaactcaatcagaacgttcgctgggtcatgtccaatatcgacaagaacagcgactgcggaaactcaagatgccgacatttgatggaacaaatcctgatgggtggatcatgcaagcagaaagatatttttcttgtttccagtacgatgaatcagagaaaattgaggcagcttttatttccctcaccggcgacgctctgttatggtatcagtatgaagtcaagaaacgggccattctcagttgggaagaaatgaaaaggctcctgttgagacatttcagagatacacaggcaggttcattctatgaccagttcctgtctatcaaacaagaaggttccgtaggggaatactcgagaaattttataagattattggcacccttggacaacatcacagctgaagtacaactgagtacatttttaaacggactcactccagcaataagagccgaactacgggtgcagagaccaagaaatacagatgaagcaatggaaatagcattggacatcgaagaaaagaaccgtgttgcaggtcttttccgtcaaagaggattaggatatggacgcatgacaccatccagcaacagccacacttaccagccactcaaccacctgaatcgaagcggaaacgtgcgccaaacaggggaggtaaaacgtttgacagatgctcaagtgcaggccaagagggaaaagggattatgcttcagatgtgaggataaatggtctccgggacatcgctgcaaacaaagggagattaatgttcttctcattcctgaggaacaacccgaagacttccaggaaccactggcggaggagctgccagcagaactagaaacagaaactgtggaagtatccctgcaatctgtggccggtctgtcatccaatacgaccatgaagttaaagggaaacatagaggagcaggaggtgatcatacttatcgatcccggggccacacataacttcatttcgcaaacattggtggccaagttacggattcctattgtgtcaacaggaacctacggggtcaccatgagaaatggggattccatgccaaataaaggaatatgcaagacagtacatgtgcattttcaaggaatagatatttgggaggattttctacctatcaagttgggtagtgcagacattatcttgggcttacagtggctgactactctaggaatgacgcataccgattggaaactccaaacaatgacatttaaatttggtaaccaagatgtaactataagaggagatccatctcttggaaggagtttggtgtctttgaaaaatatctacaaaacattattggcagaaaagaatggtttttgggtggaattaaatgaagcaagaatagaacagccatttagtacagttaaactgcccagatttttagagagaatacttgaggagagcccagaaatatttgcagaacctgtcggcttaccaccttcacggcaacacgagcattccatcaacttacaaccaggaactatgccaattaggtgcgcccctatcgttaccctcactgccaaaaagctgagattgagaaactcatcaaagaaatgttggcagcaggaattattcagccaagcaacagtcccttctcaagccccgtacttctagttaaaaagaaagatgggtcgtggcgattttgtgttgactatagggccctaaatcgaactaccatccccgacaaatacccaattccagtcatagacgagctactagacgaattacatggtgctgccatattttcaaagttggatttaaaatctagataccatcaaatcttggtcaaaaaagaggatgttcacaaaactgcattcagaactcatgacggcattacgaattcttagtcatgccgtttgggttgacaaacgccccagctaccttccaatctctcatgaatgacatattccgaccatatctccgaaagtccattttggtgttctttgatgacattctaatatacagcaaaacagaagaggatcacattcagcacctgaaacaaatattcagcatattgggaactcagaaattatttctaaacaagaagaagtgcgcttttggacagagagaaatttcttacttgggacacatcatttctagccaaggagtatcagccgatcccgcaaagatacaagcaatgacagattggccaacaccagccaccttgaaacaactgcgcggttttcttggtcttactggttactatcgaaagtttgtagccaactacgccagcatagcacaaccccttactgatcagttacggaaggatcaatttgggtggacaacatcagcagaaaaggcatttcaagctctcaaaactgccatgaccttagttcccacactcaagttacccgatttctcaaaaaaatttattgtggaaaccgatgcttccgggtttggtttaggcgcagtcctcatgcaagatcaacacccgattgccttcttcagtcaaatcaagctcgaaagaaatctatctatgaaaaagaattgatggccatcgtttttgcaatagctaaatggcgaccgtatttaatgggtagtaaatttatagtacggacagatcaacacagcctgaaatttttaatggaacaacgagttattggctcagaataccaaaagtgggtttcaaaacttatggggcttaatttcgacattgagtatagaagtggagcaagcaaccgagtggctgacgccctttctagacaacagccagccgacttctcccatttaatgatgactgccgaatggaagctatggccccagctagaaaaagacatagcggcagaccccttgctgcagaaaataaaagaggacatagaaatgggaaggcaccaccacggctttacactccatcaagggatcctacactacaaaaatcgattagtggttcccaaaaaatctagcataatcaaccagatcctccaggaatttcattgcagccctttaggaggtcatgcgggtgagctgaaaacttataaaaaaatacaggcagaattattttgggaaggcatgaaaaacgacatcacacagttcatcaaaaggtgtgccatttgtcaacaaaacaagtacctcactactactccagcaggtctccttcaacccattcccctacccgcccaagtttgggatgacatcacaatggatttcattgaaggcctccctaaatccaatggttgggacactatacttgtagtaattgaccggctgtctaaatatgctcattttttgaaacttcgacaccccttcaccgctaaaatcgtggctgagaatttcatgcaagaaatagtgcgccttcatggattacctttgtccatcattacagaccgcgaccgcattttccttagcaaattttggcaacacctatttagcctacaagggaccacacttaaacggagcacggcttatcacccccaaacggatggtcaatcggaggtccttaacagatgtttggaaacatatttacggtgcttcacatatgataaccctaagagatggtcgcaatggttagcgtgggcagaattttggtacaatacttcgtaccactcggccaccaaatattctcctttcaaagcactctatggtcgagaaccaccacccctactgccatacaaaaaaggtgccacaatggtggctgaagtggacagtttattggacaaccgcgacgctatattggatgacttacgcatgcacctactccgagcacaacaacaaatgcagcgccaagcaaacatgaagaggcacgatgaggaattccagctgggtgatcaagtctatgtcaagctacgtccctaccgccagcaatctctagctaaacgacttaatgagaaactctctcctagatactatggtccgtttagtgtaatccaacgcatcggcaaagtagcttacaagctccaactaccatctcattccaccattcaccccgtttttcatatatcacagcttagaagggccgttggtaatgctgatttctctccagatattcctccacagctcacctcggaattagagcttcgcgtggaacctgagatggtgttgcagcagcgacaaaagaccacaaatccaaccaaaattgaagtcctcattcagtggaaatcacttccagcatttgaagcgacttgggaagactttgagaccatcaccgaacaattcccacacttccaccttgaggacaaggtgaatctaaaagggggaggaaatgatacaccacctatacatcac

SEQ ID NO: 185783 - DNA, 2381 bp, Cannabis indica
gttactcaaaagttgaatcatatatccctcccatgactaattttgatcatttgtaaagtttcaataatatacataaataactattctcattttaaaatacaaaataaatataaataattatattgattgataggtctagtataggcgggctagacttgtgcatgcctagactcacttaagtcaggggttcaaaaaaaattacagcaaataatatgttttttttattttactttgaaaaaaaaaacagcaaataatatgttacatagtactttttaattggtcgtagtctacaaaaattaaaataacaattaattttataagtttggaatgataaatataggaataatattaaatgttccacactttgatcctaatatattttatttttttataataacatttcatattatttctgttaatacagatttcttgacaaagcagcagtgaagactggatcaacctcaccatggatgctaagtacagtgacccaagtagaagaaactaaacaaatgatcaaaatgataccaattttgatagtttcattcataccaaacaccatagtagctcaattattaaccctattcatcaaacaaggcacaaccctagatcgaaatttaggccctcacttccaaatccctccagcttgcctcatagtactagtaacaatctctttcctcgtaagccttgtggcctacgatcgcctcttcgtcccaattgtccgacgttacaccaaaaaccctagaggcatcaccatgctccaaagaatgggcattggatttgctatacatgtcatagtcatggttgttgctaccctaatcgagagaaagagattgggagttgctagatcaaaaaggtgccctaggaaaaaccgacatagttcctctctcgatttttgttctactccctcagtttgcactgatgggagtaggcgacacttttatggaaccgtcgcaaatggagttttactatgatcaagcacccgaaagcatgaaaagtttggggtcttctttgttttgtttgagcaaaggagtagggttttttcttagtagttttttgttatcaatagtgagtgagataactaagaaaaatgggagtagtggaggttgggttttggataacctaaatgtgtctcgtatggattattactatgcttttttggcagtgttggcttttcttaactttgttttgtttgtgttttttgctaagttgtttgtttataattctgatcatcatcatcaccaggtcaatacttgaaaacctatgtgatcacttaattatttttaattattaaagcttaattgtcaagttcaattaatgtctttaattgtttgttgtttatatattatcatatatagtcttataataagtgttcttttagtaaactaatctaagagttatgattcactaaatatcatccacattcatatcaaagaattttcctttatttgatattgcagaatttctgtttactttgattgcattttcactagagtagaaatatagaaaaaagattgaactaagcactaattcttttatacaagttaccaactttatggataatggataatggtaccatacattacaaaacatagaagaagaagcttattcttctttaattgatcaaactgggcctagatgaggaaattgggcccagtgaaaagatgggctgagattgcttggatcaagatgatcttgttgggctctcagaaaacgggcttttaggctggttttatgtaaaaatatcactttttttcacaaaaatttaaaaaaaaaatgactattgtatctcttcatgtctttattctctactttggaaaaacagcttttgtgggcaaaaagacaattattggccaccatatattatccctttatcacaatactccataataaaaggaatctagctaaggagctatacacaatgtaagctcctcctaaattgagttaaatatgtacatgaggatgggaagaattgaaagattgtgcatataaactaagcactaaaaacaaaatctaagggtaaagtcaaacaaaatatttaagggtaagtatatagtacattctttaaacatgtatttcggtagactcttatttgttttcgacacctaagagagcttttaaattagtttaatttttttttatgtatcgtgtatgttataattatttaagttcacctgtaaaatttcataaaactctgagtagttaataataataaataaggttttaaatattttgttttaacttatgcgtactgttttttcttataagcttggtaagtaattgtttaaattttacttttaactctgtaattattcagatttttaaaaatttacaattaacctaaactagtctacaatgtacgtcaatcatgaaaaaattacttt

SEQ ID NO: 185784 - DNA, 1452 bp, Cannabis indica
tactacgtagatataatagggtaaatatataatattaaattcctaagtggtataaatttaatagtttttttcaatggaagtatgcacgttagtatacgtgttaatttttttttctacttttttttttcagtatagactctatattataaattattaagtctgaactagaaatatatatagtatgagttaggttaaacacttctttcaaaatttttaaattaaatcattaaatttatatataccaattacaaatataaaattttaagtatttatatcattatttatcttatataataatatttatatgtatgcatttatagaaattatggtgcatgtgaacatatgcgaacaaattttgtctctctacaagttagatatggataaccatgaattgcgagtcttttattaaaataacttttattaaaattaattttattaattttattaatatgatataaaaaaaatcgtacatgtaaatataataaaaactctatctaagtatatacttgtaagtaaattatactagagaaaattacgaatttttatattaggccagtttaattctacacacactgatttttattcttatcaatagaaataatatcttgcaatccgttaacaatcttatacattatgttaatacattaaattatataaaactcgcacaatacatataattatataaatataataagaataaaaaatattgaacaccaatagtaacttttataatatggtttctctttatccaatgatggattaaaaatagtttataaattatcaaaatattttcaaatataattttataaagattaataataaaaagattcacatatcttcatgtgcctgttatgaaaaattgaaattacgtattttaaaataaaataaataataataataaaaatggtactatttcttggaaaatttgatagccctcctaaaaactaggtaccaataataattcagcaagcctttaatgctattggtaagtgtattaaattcatattgaaaatttcgtatgatgggactttgcacatttggattgagtagctagaattgaatcaattaattgtgcttggatcaacactagctagaatcactacatttctgataactaataataaaaaccaaacttttggtagttgtgagatgacatttaagagcatccctttcagttaatcttttatttttgatgcaataattctagctaatataatttttttttataattattaataaaatttaaaattgtaaaataatttgatgaaataaaatatttatttaattaattaaatatttttaaaaagaaattattgaaagatttaaattcaatattgattctaatatatgctactatttcaaaatgagaaaataatgattatacaaaaaagagtttaccaacaatatatcaagtatctaaaaaatatcaattctcaaaatacttcaagtctt

SEQ ID NO: 185785 - DNA, 2676 bp, Cannabis indica
ggtagtagcggttcaacgaatcgccggagacaccatggcagccggcgtagccaccaccacaaccaccctcctcctccacctcaggtaccaccccaaccagaactctcagccaaccgctatgttgttactgcggcaacgccatatcctgcccaatacacaaacccgaatgctccccagtattaccaatacccaggttattacccgcctccgccgcctaccacgcctctgcccttgccggcgccgtacgatcaccaccaccgcggagcacactcacatgctgaatcgggtcacgggaattgggtcggtggcaggtacccttgtggaccggttatgcaacccgtggcaccttatgttgagcatcagaaggctgtgactataagaaacgatgtgaatttgaagaaggagactcttaggattgaggctgatgaggaaaatcctgggcactttcttgtggctttcacattcgatgccactgttgccggaaggtaaacaaaattttagtcttacatacccttgttcgagcttttagttttaagtttttgagattgttttccttgatgaatttatgatgccaatggtttcttgcaaatgataattataactgaagtcatgtgtttatatgggttaacttgttaaggagaaaagagaatatttgggtttgtttgtgttagtggaaaatattagctcaagagatcaagattgtaatacactttcctattatagtattcttgaaatgcagtagaatatgcctgatactgttatttttactatttttagattgaattcttgttttgatagattgaattcttgatctgctggtttaagtccttatctatttggagtattaatatctatctagagagtttaggatagaagaaacttgacacgttatagagctaatagtcttggttactgatacaaattctcacaattcatcttctggtacatttaatctgattgtgaaatcatgctttttatgatcgaatttcttctttttatttattctcatttaaacagcataactgtaatattctttgccaaagagggagaagattgcaacctaacaccagtgaaggaaaatcacacacctgtgactgtacatttcccacaaggtttgggccagaaattcagacagccatcaggaactgggattaacttttcgatgtttgaggagacagagttatcgaaagctggagacatggataactatcctctagcagtgaaggcagaggcttcctcagttctcccaaatggatctgaatcaaaccaaggatctggaacaatgaattctcagataactctagcgatttttgagaaggagaaaggtgaatttcgcacaagggttgcaaagcagatattgtgggtaaatggaatgagatatgagctgcaggagatatacggtattggtaattcggttgaaggtgatttagacagcaatgatccggggaaagaatgtgtcatttgcctgtctgaaccacgcgatactacggttcttccttgccggcacatggtaattatagtttcccttcttttccttaagttcattaaatgtactcatacctttgaaaaaagcagtcaataatgttgcagttcattgttaaatgggagtacttcttcacatgggttttcagattgctctgattttgtttgtgtgatttagctacttcaaattctgcaagctagcaatgcttggaagaaagaaaaaaaacatcgtaaaacaaatcacaaaagagaaggaaaccttatcagagtttcttctggaactaatgttcattttaccgtgactcaagacagaacactagcaaagctaggaacaaaaaacaggaaaacaaatcataaaggacatgaaaaccttatagcaatcttttgaactaatgttcattttactgtgaccaaagaggggtagctcaaatggagagtctctcttgtgtactcttatatagcattttctgtagcttattgatctccaaatgttcatcttgatgtaaatattacatgcttgttattgacacccttttttctttggtgcagtgtatgtgcagtgagtgtgctaaagttttgcggtttcagaccaacagatgtccaatttgccggcagcctgttgagcggcttttggagataagggtgaacagtggttcggaggaatgaaagggaggtaggggtagtgccgcctccgccaacattgtgtatatcccagctattatattttggtttccttcatcagctcatcgtcttgggttttatcatgcatctaataatctgagaaggaagttataccccattggcatggataaaatgctgttttcctttcgttcttttctttttttcttttcttgcaccagaaaaacattacgagcaaagcaaatggcttcttgtaatgcttgtgtgcgtgtgtgagagccgctatttctctgttttatgacattatttatcgctgttttgctgaagctgaagccttgccaatttctgtttgcctattaagtttttatttttcattgattctgtagatatataacaatcaatgtaattgattggtatgagcagagagaaatggagtgaaggcttttcatatttttatttcattttagccttgagaaagagagaaaaaggctggtcgttcatctcattctcttatggttaatccctttcggaactatttttttttttttttaagaa

SEQ ID NO: 185786 - DNA, 5562 bp, Cannabis indica
tcttgaaagaacttgctttaagagcacattaatctaaggttctcattaccatttgaaagagctctccaaaagatgtattctgcagcgctttattgtttgttgaaaggagtttgaatgtttcttctcttaatgattctggtatagatgcaaggaacacttgtttgaggtttggatcgtcaacaccaccgataagatagaacctcttagtcatccattggaagtgtaatcctagatcttctttctttattgagcagcatttcatttttaaaaatttggccctaaattgttcaaccacttgagagtcttgtccgcaaaatttgacatacaagtgatttagtgcaactttaataaattttgcctgtagaaatttaagttgcatgtactctcttaggcttttccaccaattttgtagaattcttgtgaatcttgatgctagatatagcaagatgtctctaatttcagccctttgtttttctgcttccaaaagggtccacgcctaacattcttgaaagcatgaccttcattgattcgcagggaaatcgtccgacataaatgtgttgggcttgccactaaactgttgtttagcggaggtatgcctttgttttgaagacacttctttgtctatggttagctctgtctagtcaaactttgttctctttctacgcttgaggctactgttgtgtggttaattgtcatgttgagagtttgtcgaatttttgtattagtcaaatgcattttattatcatttttcaagattattttccaattgaaatattgagatgtgaatatttcaattgagttttatattttgaataaaaatatatagggatcaaaacattgacaaagaaaagtttgggcataatcatgcactaattaggtgctgccacataggaattaacttgttaattaacatgtatctacaaaaatttaaacgtcaacaaattatacttaaatgcttatctgcaatagcgtattaaatttaagtatttataccacaaattactctatatattatacatgaattttctcagatcactttatttataaacatattttcatcaaaattaaataaaataaaagctttcctcgtttacaaagatagatgggaaaataaaacaaagcaatttgcccatgcaattataacaaagtataaaatgggttgacacttgacaatatttgacacgttgataacaagggccttctagaaaaccacacatttacaatggatgccctaagatacagtagggcaagtaagtttactttcatacataataattacagtaggaaacttatgatttagatctttacagagaaaataccaataacaaacttatcacgagtgcagagagcaatgatcttttgatcccagaaattagaaacagaactgcacgaaacccaaccctcttgaacttgttgtaatcagaagaacatctttgcatacactggaaacaggaataactatactcgaaaccatgaagcagctaaaattgatgtccataaaataaaaacagttgagacaaaccacaccatcatgaatgaaatgatgcttgagcttctacatgaatactcgccagaacctgtcaatttaattaattaccaagttcaaagcaaagcagactccagatcatggcatggtaaaaacatcccgcaaaaatcaacatcaatggcaatgagggaaagataaaaatccatattcagacatggtggcaaaagttctagcctgatgtatcagcttcctttccatagtcttctacttgaatatttctttttaaccttttcaaccatatagcatagtccattggatatggtgtgccacatagactgtccacataatctgcaaatgcttttaggacagtggagacatcacctaatttctgctgaatcagtctccttgaccaaacagtctctctccactgcaaggccccctcaactgaatcaagttcaggtagctcaccaccacagcaaaaatatagcatataaacaaggctctctgcatctgaagcagaacaaagcttaccctcctgcagagcaaaagttgaagagaagtggagattcattgcaggacggtccctttcctctaaaacagcatgtccccaaccaataaggacaaaataaggatgcctcactccatttctcacacaaatcacattttgaggtttgatgtctccatgccgaattcctgcagaagcagcagttgaaagtgcagagagacagtcatgacaacacctgatagcctcatcactaccaaaccgacctccgcttatcatattgtccactgtttctccaaccgggcttgtaactagaattggtgtgccacaccaagggtgttcacagtttccacctgagctagacctctgacactgaccaggatggataatcctgccagatgcactcaagtcaggaagatacttgctagataaacctttctgtttcatgacagtcaatattttagtatgcctctgaacttgataccacaaatccataccttcccacgctggttccagcttagaaggatgtgaaccgacatatagaaaacggtattttcccggttcgtccgcaggtgaggcaacatagtatggatgttctcctgtaataaaaacttcattgatctggtaacccttttgccaatttgagtcctccaaccataatacagatcctacttctaatttcatcaattcttctgactcaatttttacagattcttcctggacttcaacaatttctggtgagatactgcactgctgtaacctaaaaagaccatttccattggcatcacccaactgcctctcagcccttcttgtctgcaggcgagaaccgtgatcagcagctaaatcctcgactgagtgattgggaagtccagcaaattgaataatggagtggaaggtagcaaagagtacctgtaaagcaccaatatctccccaattggcatttcctagcttgttccagatcctatcaattggagacactgctattctaaaatgttttttaacccattcagcagcacattcataaacattattgagattgaactccaacttattcagatctccttcaaccttgacaaccccgccatattgagaatcaacaagaataatatacacagagtttgaagtctcagagaaattcaatctactcaagcttcttgataataacactcggatagcataaaaaagagcctcacctaagacagcgagcacaggctgcccatcattgtttgtaggaatgtttttaataccaggcctaagcagagccaattcaagaatatgatcccacttaccatgtggatgtctgggattcctcagcagtataccggtaccacaaagacctccgagttttccattagtaattgccttctcagcctgataaaatttcatgttttcattgtacagacaagcaacagagaaaggcatgggctcctcctgaccccaaaatgcttcccacaagccctttacgctagcatgtaaaaaatcttcaacagcaaaataagcagttgcttccgcagtctcagatgttgaagcatagacagcattgggcatcctaatcagctgttgaaatgaaattccttccaatgcataatcgaatttctgcaggtctatcagctcaaaaggaacatcaaaagctggcttcttggaggatgttgattcaaaccagtcttcaaggtatgcagttagcccctcactgtccacaaatttacgaaggaactccttgcaattcccaaacctactgccagatacacttgaccttctcgttccagattctgtagactcttgatcaggagacccacctacaaacatcgtgccacagcaccatcagctgattgaactctacgaaaactcgcatgaaacaacattttttttttactttttaggcaagggcagtattatattgcgacaattgcagatgtaaaaactacaaagaggcattcccatacaataccacgtgtaccaataatatgtcttaaaacatcactagcataacaagatatgggtagaagagcatcaaattgtacgtaagaggggttactcacgatgtttttgtagccaaaacaggagccatctaatccttaatgttactcttatagttaccagacacacatttgtttatggattttggagttgtaagtggtcttaccacccttgtctttgtaggaatttctcaagacagttttatgtcgtcccatatggaccgctgatatcgagtgtttcctctgcttgtttaagctccttgctagttttgcctcgtcttcatcatctgcagactcatccttctgaacaaccaaaaaacagaaaaacagtacgagatttatcaattatgaagaaatattcaagtatcataaccatatttcattatggtttgtattgcatgatgaatgttaaatatggtaatggatctaaaataacgattctcaacaaaagccttggaacgtgtaataatatgagcacacacactatacaccaaaccattccacaaacctatgtgacaagtattttcaacttaatgacactaaccttaaatatatgtaattagttgaaaaaattaacatataggtgtgtaaaattctggtgcatattgcgtgtgcacgtatatcattacttggaactttttgaactgagggttacaacatgcactgcaacacaggtgcacataaagtggatcaattaaaaaaaattgacttttactcatcacactatatacatgtatctatatctttctattagtttgtatcactacaaggaagttaataacagagtttaatgtaattttcaatatttaaaggtcccaaagtttgcatgcattactacaaaaaaatttgcttgcgttagttctagactcctatgtgataaagcatattcattatatcagcagaaccaaattataaggctttatttactgccaacaaaaacatgtagattcaatgacattgggagattcttgaagatgctcaaattaatttatagatagggtattataactaaactaaacataaagtaatttccaggataatctcaaatcaatactcatctaaggcttcatttactgtcaacaaataacatgtagattcaatgacatctggagattcttaaagatgttcaaattaatttacagatagaaaattacaactaaactaaaaataaagtaatttagcaggataatctcaaatcaatactcatctatcagattgtgcaaatagtgttgaaaaaacctaaacagcagactaaagacccaggaaagagttcagctccaaagagtttcaagaagaaagaaaataacacacaaactagaacactctattgaaagcactgacagacaaataaatgttgagtaggaaaaaagagagacctcattgccatttgtatcttcagtcacaggtacactgctttcacctgcttggtgatcacgttctgtgttcttgagttccgcagcctcgacagaatctattgtttgctcgtcctgaattagaaaaaagttttaaacatcactgtaacaccattaaacgaaaaataaataaagatgagcatgatttcttgttttctcaaataaaattccagttcccattaagag

SEQ ID NO: 185787 - DNA, 2813 bp, Cannabis indica
aaaataaaaacgaaaaaattacgactccaagtaagactgattaatcagtctatgaataaacccctaggctaatgatttcagttagtcttttttgaatatacatgcatgtattttcaaaattattagttccctaaactcctagaaaaatattaacttctctttttctttaaatgcattatatgttatagtatacacccaagcatctcttacctctccatttgttggtcccatagaagtgcatatcgatcatgtatacttcctccagaattaattaaagcatcaactacagcttgtttattcctctcagaacgttctctttgttgtctgataagttttcctcgaaaatcttgaggcatgtatgtcataactgcaaaaatattcaaagtcacatatatcaatttttaaaaatatattgttaccacatactactaaagaaaatcccaaaaatcaaaacaagcagatacaggcagccaaacaactgcatatctataatgatcaattagaatctagattaaaattattgggtcaagaaaagcagcagagtgcaaatccaactaatcatcacatttaaatcctgtcacaatccttgcacaaattgttgttggtgtgcttcatatgtataactataagttttcctagattttgtgtttgtattcagtagtccattctgggctttgcccaactaatcccatggggtgttggcagttcgaccaggagacctcccacatgccccaagtttttaagtctacgaaggatttgaacaatggaatacccaccgcaccccttcacgggtacatataggggtacatatacaattttagatcagtaagcacccagaatacgtcaagtatttagtttcaaaaaacaaattagaagattataaaattcaggttagtgaaatgcaagcattaattgacatgcctataaaatcaacctgtattgaacacgcgttcagaatttgtagcttggaatgtttctaaagctttcaaagtgttctgaaatttagatttgatctgccccaaaataacagcaagttcagcatcatcaggagtagagtgctgttggagctgcattcagtcatgaaaaactccatgattaaaaattaatgtaaaacaaccataagacccaaggtatacaagtagacatcataatagctcttcaggtagttttcaaagcaagattttatcttattcttaccgtgggaggccaatgagatgtatcaagtaagaagagaatctcttcaatatgttctcgattcttccacatgttctcatcgattttatggggtggtggagagtcagattcatttaataataagctttcacctaaaaaaaaaaacatataaaaaccaggaaaacccagataacaaataaacgacaaaagtaaaaaataaataagaacaaaagaaaaggtgattttagcatgagtttgattttatttttttctcttgctgaatatgagtttgagatacttggtaccttaaaagcatcacattcggggacatacaatacacaatgcaatcattgcatacattgcttcctaagttacactaaaagctaaaaatcatgatgatagcagtatcacatcaaagcgtttcaatacaaaaatctttagcaaaaaaaaaaagatttcaatttaaagactttctaacctataatgggagagagcctaagaaaacagaaaaataactgtgctatattgagaaaaaaccaaaattttatagccctaacaacaaaaggatcatcaaaataccctgaaaatctatcacacaaattcgaaaaataccttgagaggggggaaggtcacggagtaaattattagccatggaacgaatttgagaggagagacgagagacgtcgtcggataaaggagcgaaagggtatttgtcgtagtaagatgaaaggaaagttctcgttataggtacaagaccctccgtggacgccatttttgttggctattttctttagttttggttttggttggttgggtgatccaagtgtttcagttgttggtgggttggaaggagaagtaatgaaaccgaagaagaagaaagtaaagtccacggcagcgtgctctttcgcgtctttgccttcgggtccactttacagggtcccacaccgctttccccagcaggaattaatccattcgagcgaaaaaaaaaaacggaatcaattggatagtctaaattggaatttagaatatcaaacaaatatctataatatactcactttttttttatttattattatctcaaaataattgttttaaattttaaaaaaaaaaatcttcagcaagtttaaattaaattatttgaaattagtactaactaacttttcttggaaaatactatttttaatggaatgatactttcacattttagttttattttttttttaaattttcttctaaaaaaaaaaaatatttaattaatccccaaaatcttacggtcaatactcttttaatcaaatcctaactgttgtaactaaaaaacaatcgattttatattatcacaaaagctaattgtgttacaagataacttaagaaaataattaagtttagctttatttcataatttttagaaaaagaaagtatgaagagagagaaactcttatcttatagagagaattataagtgtgaataatgagttaagggagctaggccaacccaacttgaaactgggccgaaaaggttgtaaaaaatagtaggccaaatagagatgggttaaaaaaatcgtgggctgacttatatgggtcgaaattgggttaggccttatatggcccatgtaaccgatcccgacctaaattcttatgatt

SEQ ID NO: 185788 - DNA, 1665 bp, Cannabis indica
gtaagtgcgacgtttcttctatagaaaagaaaagtcttatttcagttttcttcccacaagatctgatcaaactaattaggaacccgtataggataataagaaatacgacttgaaaaataaagaagtgatttattcataaaagttttcaattttgtccaactttctgaatttagaatagttggacaccttttataccttaaatgaatcaatcaattaaaaataaatatatgggaataaaaaaaataactcaactgaaatccatattccctttataaaatatttttgtcaatctaaatataataaaaataaaattaacaatctccccccctttggcacattgattaaaaaagtattttataagaagaaaacctggatgaagtattagaaataaaatagtgtatagaaaatactctccctacatgaaagcatactcacattaagaaaatagatttttaatgaaaaagttcacaaaccacaaacatacaattccccttaaaataagggtttagagttgtaaccaaaaaacaaatactactctctttttgtctatcaaggagccaaagacaactaaaacatgaaaaagagtcataatcgttcaataaagcatagatattaaacaaagacttaaaaaaaattaaccacttaagcatcatcattgaactgaaagaactccatgatgtccatcctcctaaggagcaaagcttggcttgtttgcattcttcccaagtaaaagttgaattctacaatttctgtagttgcaaaagtagaagttaaatcaacattttgctcatctggagcaccaagggatgcaaatcgtagttctttttttttttttttgagtcttaccttgatcgaggaggtttttctggtactttaaaggtagtaccaacaataggtgcttcaatggactcattctcaagagatcaattcattttggtcaaataacatcttataaaataagagaggaaaataagatcaatcattagttttttgtcctttttgaaaagacacaatttgatcccaaatcatatcaaccaaatcaagttttgcacaagcaaaaactttatataaaaagaaagtaggttcatttaaaacatttaccaattggagcatggaagccagttggacaaagtaaaccccatgaacaagacatgatgatatgtgagttaagacatgtgcatagagcctgagagcataacatccctgtcactagtgagataccaaaacacttttgtcgatcaaactccacttcagttggttcaactccagtaggcaattgaagagcttcagccacattcttcacaataaaggattatcagtgttcctgacaaatactttcccaaacatgaaggagttttcgttgagactctctttgattatgttagcataaaattccttgataatatgatccacgtaaccatcaaaaccaatcaaagtgtccaaccattgtttttctttaacagattaagaacctcaaatggcttatgaccaagcacattaaaatttttctcatcaataaaactccttccctcgtaaaattttatatctctagtattatcactataacaaaaataatgagaatgtggcatgaagttttcaagaagaatactagtaggcctttttctcttcagatgaggagcagtttttggaggaaccatgggacat

SEQ ID NO: 185789 - DNA, 2315 bp, Cannabis indica
acagaattatgttccatcggcatgtaatggtggcagaggtttaacagaaagaaatatagatgacacgcaatcccaaaacaatttaaaaagcttaaaagagaatgcatttttagtgtaaagtcttctttaggatgtgggagtatacagaaacaaaaaaatatgtacaatttttcacaaaaacagaagttacaaaatcaacaaatcctaccccactctttctttcccccagccccatttaaatcaagaaagcattagagttcaaaaccagtaagtggagagagccacaacacttgttaaaatataaattacccaccaaggcgtttcttagatctcctgcccctaaatatataggttgagcaacatggcaataacccatcaaacgtggaactgttggtataatgtccctgtgatttacgactctccagctatctttgactttctgtaaaaacacaaacgaagagggttgtacaaacatgacgaaatagtatctagttaaataaaaagtagtctacacatattaactaaaatgaccttcaatttcagaaaaaaagaaactatgatgtatatatatatcatagtgaatcataatttaagagatcaaactcagtactttgtttctgaatttaaatcaccaggtaaatcttcccaagttaagaatactcatataggctgacatgatgaagccattacgtttcagttagaagcacataagttttacaagagagctagtatctagtgaagaatcagtatatggcaaagattatatttactcacctccttaagcaatacagaaaataatgacaagatactatggtgcactcttaagtacccacgctccccacaacagaaacagtataagataaaaaaaaaataagtggtgattcatacagaaaagaaactttaaagtggtacaaagctgagagataacacagtttacattcaaaagtttgaaaaaaattaggccaaaaaactgtgccagctacaatatttgcatagggctatcgataaataaaattccaagcagagctcacttcggtaaaaggattgaaaccatttgtaagagtagtatgaaaggcatatatggtcattaaacaaatgaaagtgtcgtgcaaaaaaatgaaagggagacgcattcttttttacctgattgtaaatatctgcaaatcgtttgttaccaactctaggagatccaaagttatacatggtcagagatattgccccacgtctaaaacacacaaacatagaaaaatcaataaaatacatacttaccaactttcattctgcataaagatttttcatagttacacttcattaagaaattatgcatagtagagctaaatgtatgattacacaaatgtccttgacactcccaaacaatagataaaataataaaacagggaactttaaagcataaattaagcatgtgccactagaaatataactcctgcttttgcaatgttggccacaaacatcctcattttgatattaaagtcaagaagcatccttccaaacattgaatacacattacttaaaatgagaatcaaaggaaaatcttagtgtgtcatcatcctagttcactttgtactcaattattgccacatttttcacttctcctccatatgatagtttaaaacataaataataccacaaacatgtcagaacgaaccaatttgactcatgataattcgtattttgaaaaacaaacctatatcaacccacatgagtaaattaactaaagtttagggaaaaagcaaaaacacggaaacttgttaaggtgttatacagtagtccttgcttgtgttttaaatgtttctttttttttctctttttttgtagggcttgttaatatatccatgtgaccgtattgattgaacttaattgttatgagaaaagaaaataaaagaaaagaaaaggtaggacatgaaaagaatatgatgcataacatgtgagcacatatagtaacaagaacatacagaaagaactcactttgccaattgactcgatgaaagttccagagcaagaagggtggccaacgcacctcctaaactatgaccagttatataaacatgccatttgaatgatacctcctgatcatcactgccaatgtaaaacaaataagttatatgcttattcaactgaaaaccgatacttaacaatgcaaatggattaaagcttaattaaatctagctggtccataatattaacctgcattcctaatcaatcatacatgtaacagatgccgactagcgagattatacagcacataaaagaatcatttacaattctagtccataataagtttaaaaggcagctca

SEQ ID NO: 185790 - DNA, 1411 bp, Cannabis indica
acgttcgtaactctctctctctctctctctctctctctctctctctctctccctccctcatggattctctactgaccaaatgggtttctctcttttaaggtttcaacagccgtccttgatgctcttctcaatgcatccgcttctccacaatcctcctttgaggtaattctactaattatttctcctcagcttgtaaatttgctctctttcgttcttcatagctactaagaagccacttatctgccttacttctcgtttatccacatttgtttccattgccaagaaataccgtttaggatttcttttctattttttttttcacagatacataatgcccttatagttttaagttgtttttatgtttaagatggtcacattcagcttggtaattttttttaagtttagtgtctcaacgatctgttgatgctttgttcctttgaagtacgcatttgttgttaacgaactcctttccacatgcggattgttttgtctcatattgattaagtacagagttgttaaactatagattgaggatatggtagttactaatgtaataaatttttactacaatctaggtttcagcaattgtaactcagccatcttcaagaagggataggggaaggaaactgatgccttctccaatagcacaatatgctcttgatagaaacttcccttcggaccttattttcacacctgaacgagctgctgaggtaatgtgagatatttttcttgttatattcaagtaatgtttggtgtatatcacatgctaataatgctatgctttcaaatgatagattacaagtagtggaaccccatagaaattgtagtgatgctttcttctgtttttaatactattatttatcttccatttcttgttaggggttcattcttctttcttacttttgtgcaggatgcattcttatcggatttaagagctttgcagccagagctttgcatcactgcagcatacgggaatattttaccgagcaagtttttaaatatacctccactaggttagtacttagtcttacgtgtttttctaatgaaagttagagacctctattggtagtcactgcttgtaagatgaaaacatgtcgtgtgcactgcaagtttacatctgacctttggaaggtgcagtaatcggtatgacaaattttatgtggcttgttcatcaaagaattgattgtgctcatagcatagataaacaatggaagttaccataattctcttgacagttagaagtacaattatcgtattacaatttagcgatgatgtttcacgcttagttagttactctgttaatttatttagtgtatagtaacaatatgtatgcatcagttcagtatgtagattttgttgaacactttctttgatactttaatgcattatctactaatgcagtgctgttcac

SEQ ID NO: 185791 - DNA, 1515 bp, Cannabis indica
aaaaaaaaaaacaaaaaggaagattcattgcagaatactactaaaattagctatgtttaatcaaaatagcagacagccacaggcagagatgttaatatatatacttctaagaagaattgacaaatggcaatgctgttacagacaactgtcaatatctgaatctacagcacaaatcatagcttctccctttgattttagagcaaaaattaacttgcttagaatagaagtggtaattggctacatcaagatatacttgcagtggatgcctcaagacatagaggaatcaagagtatcaaaatgctttgtaagaataagtgtattgtaatacaaacctcaaaatcatgactgccatgtctgaatttttagagaaatccaggatcatatcttcagccatcttcttagcttttccatatggattaattggaaactgaaggaaaaataatattgacatcaattagacatcttatggaatagaacaaatacaattcctctaatagcattccaatatcaactccatgcaaaatatttagaaacgtcataataatacatctaaatatactaagctaaaaaaacacatttgtccaaaagaaccaatttccttccaaagataaatgacaaagtaaaaacaatttccacctgcttagtttcttcagtgattggcatcttctcaggttccccatatgttgcacatgtactggagtatatcaatgtctttacaccatgtgcggccattgtttcgagaactatcaaggtatttgatgtaatgttgtgataatatctgtgtagagaatttaaaagatgttacaacgtctccggtggttaaatgattttaacaaccatgcatgcccaaaagtatattgatctataaaatctatgaataagactactcaaaaatgaaatttgagcctaagttaaagattctaagtacagcaaaaggcaaattttaatgacataatttcactcacttgaggggatcaagggtgctttccccaacataagctacggcagcaaaatgcattacagcatcaaatgcattctctgaaaatattttatttacctggagcaatcagttaagtaaacaaccattcttgctatttccaaacaaataattgttttcaagaggaaaaaaatattgagaagagtattataaggatacagctttcgcatcccccaagtcagcataaataaactgaagcctcccaggttcaggaaataagtcttggagaaccttaacagcacccaggtttccccgtgaaagattatcctgtaagaatataaaatggttaaatatatataaaaagcaaacatcaacgtgatccaactggctcaaaatttaatttctcagttgatcagaagatgacattaccacaatagttacacggtatttatccttaagaagtctcaatgtagcatgtgagccaataaagcccgcaccacctgttactaggacatgagttacaccttcttcatgacgtgaaaactggaggaagtgatatttaaatgacgtgttagtaa

SEQ ID NO: 185792 - DNA, 2414 bp, Cannabis indica
aaataaaagaagaaaaaaaaatcttcgaccattgctgccaatttttgtacataaagttgttaactgtagcaaaatctaccatcttgaagttttgccatcaatttttttacatagtaataaaactacacaaagaatttagcagcatattggataaaaactagaaaacttgaaacttgacatataaagcaataaccaataactatttaataggaatcattttgctattcacatcttcttttcaaagcaatattgctattcacatcttaacttaataaaaaatatgaaaagccaataaccacaccacctaatttgttgtttgcaaagactttttatgaatagaaaattagcttttgctaaaaattatggttaagtgaaattttaaactaggtaccgttattttttttttaaaaaaaaacgataaataaacttcacattattctgacctatactgcatatctcacctacccaagttgcagcacactgacctgcttccagagagtgtaacccctctcaacctctcacgaagccttgcccttgcaagaagcacagctccagggagtctttcgtttgcagtaacagattgcctgctgctcggactgataaaattttcggtatcaattctattactgctggaaacagattgtcctgtactctcctcgagattaaatgtcatacggtcctgaacaataaatgcaaatatattagcacctttctacaagtcaatatccttggtaaattaacggattcaatataattttatgtaataacttttggatagtatcgttaaccataaccaattgcaaggtaacatgtctaaaatgtgctaggctcttcgtgtccaatagcaatgctcagtttaaaaacattgaaacaatgtcaatcaactcataaacattacataataccatataataagtttttagctgtaaaccccgccaaaaccaaaggacaatccgctaacgaacgttatggctagttctttatcaatcctaaatgcatgacagtgacagtgacacctatctttctttgaaatgaaactcaaaaaccagcaatgacaattaagaactctgaatagcataaatgtttttgtttaattttatatattgaaacaaaatcaattttacgagaagataaatacctggttagaaacccggtgggagatatggcgggagtgagggtatcgccgaaggggatcacagccgtcaatatcatgtcgatgattactaccatgatggttattatgatgatggcggcgattctggttgacactatggtgaaaacttcgatcgggagggggagaagaatctaggccgagatccagactggttcggccgaaacgagacctcctggtgtagaataactccgaagcgctcgtcatgcacacacaataatcccacctgtattccaatccaaaccctaaaatctctaattttgccctaatttttatcagaaaataaattagaatttcggcgaaagagaagggaaaattaggggttactttcccatggctctaaagatcatctttttctttcagtgactgaagaagaggctttctttctttttttgcgggcgaagttggaagagactgatggagagaccagatctttccacgtgtcaaacgtacacgtgtttggaataactggcgttggatttagattaggctttgtggggtccatattctcaagacaggattggattagactttttttgttagctgaattggattctttattggcatcaaaacgacgacgttttgaatgagatttttgagaatttatgtcagaaaaccgtgtgaatataatatctcaatttgattagtttttttattctcaacaacaaaaaaaatattattttgattaggttttatcaaagcaatccaatgtcacacttattagattcttctatgagacacacgtgtcgcaccctcattttttaagatagttatatttaacaaatagtcaaagaaagaaaacaagacaaaggtttttcgagcaaaagaaaaaagagaaacatatatataaacataatattttgtgttggtagccgtatgtctatttaaagacatccttttgttttaatctcaattttaaatattattagaataatgatgaaattatatattatccaactaccatagttgtaacttgcttgaaccttttaaattctcttgacgcaaatatttttacaaaataactaaaatatgtttgcagttgcaccactctataatctatatcccgacaacaagatgatatagatatttaatgataaaaaataatgttatggaaaatatgctaataaaaaaaccaaatttcaacataaaaatttaattattaggctcaattcttttaataaaattgtacattaaaactacttctccttcacctaacaccaacttccatattctctctctctct

SEQ ID NO: 185793 - DNA, 1354 bp, Cannabis indica
catgctatgcttatgtatgtatatatttataatatgtatattccaacaaaaataaaaaaaaaaaaaaaactaaaaaaaaaacgacaaagtgctaatgattataacacttttttgtgaactaaataataataaaatgtcacacgttaaataacaatgaactatactttactataacagagagaagtgtagtgtatacagttagaagaatcaatctcaatcaattaattactatgattgattatgatccttaacatcatcaataagatatttttgagtacagagacagaatgaacaattaaattaataaatgtgtaaaaaatgaaagtcatgagtaattgatattacttcacttttttttcttttttttttgttggggtactgtgcgagaaaaccccaccaataatgaataatgaatctcgtaaattataaaataaaaaagaaaaagaaaatgaatatagtaatttgtatagacccttaattaatgaattagtaatggcaatccacaagaggagaggctgagaagacgatgacttgttctttggctgcagcgttgaacggaaatttagtttcacggcggtgatcttcatccggcgccggtagattaagatccaactccagaacatgtcttggctttttcttcatcaccatcgccattgtcgtagttgtattattattctttaatttttcgtgatcatgatcgtgactagcagtagtcgtagtactactcgtaaacgacgtcgtttgtgcattgttgttaaacggtgtcgttctatgcctcctcatgtgtccacccaaagcttgtccagaattaaactcagcaccacaaatcgaacactcgtgaaccttaggaaccttactattcatcttgacgttgttactgtttgatatttgtaaggaaagagctgtacttgtactattaccgttgatgatcaattgttgatgatgatcatgatcgtccattacgcccacttgaaacgacaacgtttgcttattattattctcttttacttgatgatcagcattaataatattcatattattattagctgtggttttaggtttcttgtgactcgctctatgccctcccaaagcttgaaacgactgaaaacatctgttgcatgtcttgcattgatagatactagtcgtattagtactaccacaggccgccatcttctccgccgcttgaaattcattttcgggtgagctcaggcgatcgttgtgaagacccccttgagccaaaagaatcaaacagttagccatatcctcttcctcctccgtagtcttaataatagtttcggttaattcggttgaagaagtagttggagaagctaaagagaaaccgcccccaccgcca

SEQ ID NO: 185794 - DNA, 6856 bp, Cannabis indica
aaaaataaataaatgtaccacttgaatacgtccaaaaatagattgcatatatttatttatacatgcggtacagttaccgcttattgtattatttaaattattgatggtatatttgttaattacttaagaattaagtatataattaaaaattcccctatttttaatcgaggttcctaaacatgggcctaactcgcctggttgtgttgtgctcaaaaccgactctgataaccgcaccatatagtgattaattgtaagtaattaatcgtgacggtagcaatagaattattggttcattttcaaaagaaaaatatggtattttaaaaaattattaaaaatgtgtatattttttgtttttattattttggtctctaaataaagtaggccttaagcttgcgcctaacctgtctttttattatggaagaggacaaagaagattgtatttaaatagctaaatattgttgaaagcaactaaaactcaacaactagatgtgtttgtctaagcttattacaccaaaagatgttgcaagttcaatgtcaaaattttcaaatgatgaggcatttaagcaaagaacgagttgtcaagaacttaccaaagaacacataagagtccgtcgagttgaaagcaatgtggaactagagcaagaaaataggagtcaattgtgaacaaatctaattaatagaaagggcaaaacaactcattattaagaaatatatgtatattttatttatattcagataaataacgatataagtaactaaagttttaagttattataaatatatatgtttatttttagcggcataaataccgaataattttctttcagttttttcagtttagattccgtcttgaatttattaaaacaatatttaggagtaactgatactacatgtttttatgtagacctaatgatctagattctgggtcttatatgtgtcatgtttaagacaataacagagcatgtactaaatgtactaacgaaattagaagaaaaattacagtattgcaaatattgagtacttatactgctaaaaataaatataaaatttatgccacttataaacttaaaattttaagtgtttatactattatttaccatttatatttttttttgttttaaaaaatttaaataaatttatatgtgatttgtgatgttggagtttaaccataaaatagaaataacttttttaaatattgttacttcttttattgtatgaaatttgagaaacatatcacaatttaattagaattcttttggttttttattttcatgcaattgttgtataaacgtgtgtattagaatggtaacaaatttgtaactcgtttgtgtttgataggtttattatttcctttataaattatccaataacattgttcttgtaaaatatatatatatatatatatatctaaaatagtaataaatataaataaaaaaaatatttattatttgggagttctctcagaaaagaaaaatcttaattttttgatgaattttaatcacacaatatttatctaattaccaaaggttaaagtttagtattatgagtgtaatatatccatatatttagtttgtgtggttaatattaattttaatatatttatgtaaacttttcattttttttttctatagttttgtaaataacattttttattttttgtatgatttgttttttcttacaacaattttttagtagtatgattcaagatactaaaaatacaattgtcaaaatatatatagataagtgcactatggataaaaatgctattgcttcacacaaatccaccaagaaaagacatgaaaatgtttgtttccaattgagaatttgctgaatgctgatatgaatcaacattggatgaacagagtaaaaacataaaggaaaataaattatattttaactatattactgaatgttgtgggattcagtcacggcgagccgattttaaggtataggggatctaaaacaaaattaaattttagtagagtggtaactttattaaaacctcagaaaaaagaggactagaccataacattaatcataagagtctacttacaaaacagcagcaatataatttggatagccagccaccaaacataatgatcattcaaaaaaagtattaacttagctaaagtgctaacttacctcctaactttaacataaaatttaagatgaagtatcgaaatttcgagaccctgagtattatggagcccaatgcgtacgtcttgcttgcctcagatcaagactgacccttaagtaatttaataattgtgataatttttttttacaaaatgaaattatttatattatatatttaccatcaatattttttacatagataattaccaagaaatagatatattatacatacactaaacaataagaattgaacataatcactgaagatatcttccaaaaatgtttgccaaccactttggtttcttggagataatcacaaatccaccaatggctccaataacaaaactacatccatacccaatcaacactgcctcccaaccaaatccattttcatcagattcatcacattgctggctatactcatcaacagcatttgtgtcttcacatttctttgacaaaggaaaatcacacaatcctacatttcccacaaatgatgtattttcaaaagtattgaattgcccaccacttggaattggcccagaaagattgttcccagaaagattgagataagaaagaaatgtaagagttgccaattctccagggattctaccaaaaaggttgttgttggagagatctaatgattcaagttctttcaaattccctataaatgttggtatgagcccatcaaaagtgttgtttgaaaggttgattaccttaatggcaagaagatcacctatgctgcttggaattgttccattaaatttgttgtttgataagtcaatagcagtaaagatagtcaagatcttctcaaattcaatttcatagcccttttgcactgtaaaaagtggaaattatcaaaatttcattatagggttaaagcttagtagtactaagtgtaatataaatctcacaaattacttacacgagcaatgtgctcgtaggacaaaacacacatcttaaaacatgaaaaggaaattattacctataacaattgagtctttatagtagtctccaccaccttccatgtacttcaattcagacttattttctttagtaacttctgtattgatggcactccatttgttaaagtagtctgatggtaaatttccactgaaatcattcatggacagatcaacaatccttaactttacaaatccaatatcatgatgagaatcccatattggaccatgaaatttgttggaacgtagcacaagaacttgtaactctggtaaattctgtagccaagaagggaacacatcattgatgacattgtgtccaagattcaaaacttgcaatgctctgcagttgatcaaagatttcggaacctttcctcgcaatcggttgtgactgagatccaatgtctttaaactgtttccattcaaaaaagtctcaggtattttcccactaaacttgttgtgtttcatatccaacaccagaagtgagctactagagttaaccaagcattgtgggattgtgccactcaaatgattgtttgacacatctaaaacttgaagaacacttaagttacagaacagtaatggatcaattcctccacccaatttgttttctgagatgaaaaagtgtgttatggatggtggcgggacaataagcgagccttccaagctgttcaaacgcagatctagcaatctcaaatttttccaaggaagagtaataagttgagctctttcccaaccagtgaatgagttgttagaaagaatcaagtttgacaaagtatcaacttctatgttgaggaaccaacttggaatcttacctttgattttgttgttggaaagatccaagtatcttatttcatcttgggtttttaggaactctggaaaagtttcaccaatgttgcatgaagataatagtaatgtgtcaaacttatgtacacttgaatttgtactccatgaagttatggctaaatcattattatctgaaagaccaaggatctgaagctcactattctctgggaagatttccaactgaagttttccacttaagttatttgattgaagctcaagctgaagcaggtttgggaattcggaaacagaaatgggaatttgtccatctagatggttgttttttattgatagatagctcaatggtgatgatgacacattttcgaactctagaggacctgtaaacttgttgttttctatccaaatctctgtcaaaagaggcattctataaagagatgaaggaattggtccagtcaatgaagtatctgaaattatcaagtatgaaagttgggttaagtttgtgattgtctttggaagcatcccattaaaactttcaccataaagcttcaagagactaaggtggctgagatttcccagtgaagatggaatttgaccttcaaactttccagaaattgttaaggactcaagaagtttaaagtttcctatccaaaagggaagttcaccagtgagtccagtatcaacaattcgaagataagtgagctttgcaaggttttgcaatgtagatggaagctgaccctttatgttttctcctacaagattaaagtgttcaagttgggaaaggttacccagtgtagctggaagttgaccaatgaaattactgcctccgagagcaaggtatttgagttgggaaaggtttcccaatgtagctggaacttcaccattgaaattgttgcctccaagatcaagtacttcaagttgggaaagattcccaagagaagatggaatagtccctgagaaattgcatctttcaataattaattcaattaaagacttaaggttgccaatggaatctggtaatcttccatgaaactttgtgccataaagatgcaaggtttgtagttgacttccattatgaaaatcaggaaaagaaccaatgaggttttcattatctgacaagacaatgacttgaatattaggcagttggaaaatgttcatgggaaattcaccatgcagattgcaatcataaagagataaagatatcaagtgagcaaattttgaaaaggacagaactgacactgaagaaagattcacaccatccaaatgaacttctcttaactttgtcatgttctctgaaactgttttcatagtcaaagattcacacaattcacacccttctcctttaagaatatcaaaatacgcaaatgaagatagatctagtgaaatcaagtttgacaataaagcaatttcagatgggacaaacccataaaaatttgaggaagataggttgagatgggttaacctaggaagctgagtaaacaaccttgatggtatagttgagagagtgaagttgttataagcaaagttgagcctttgaagttgagtcaaactaaagaggctgctattagaacttagaggcccttgaagacagctgttactaagatcaagccctattacatgtcctgtttccaagttacatgtgacaccatcccaatcatcacaacaatcattaccttcaatccaagacttcatcttttggttagacaaagaacaagaatcagtgaaactggagttgttaaaagcaaaatcttgctttagttgtaacaaagcagaactttggtgtgagaggcatcttgatgttggtatagaggaactagaagcagaatccacagcatataccagtactagtgttgcagcagcacaatacatcatgattctaaaatccattttctcaagaaagatcaattaagttgtgaaagtactgtgttggggttgggataacagactgtatattaactaggtaccacatattttgaaaatttgtataattttaaggatttttttctttccttctttctaatttcttctgtggtcaaatgaagtagtagtctaagatgggtaaccattcatagtctcagagttttaaggccatacactatcaaaaaattgacttgaattccgtttgaacactattaataatgttaggccacttctaagaattttaaaatacatcagaaaataaatttattttattttttattaaatttttacattatattacatcaaatatatctagactctctaactcataaacatttgtaagagatttcaacattgagtacataatgcttcttctatgaattgaaacatttttccagagaagattcagatcaaatttcttcaattcagcagagtataatactaacaaaaacttgatatgaagcacattgggaaattagttttggattaaaagctttaatggttgggattttaactaaacttaattagtatctgatatatgttgtttgtttaatgattaaactaaatgactaaaacaaattaaacacaccaacaacaataggcattgataatggctaaagagatacccaaatgagaattcatcatgattctacaaagattgaacttcaaaaatcaatataaaagatcataaattatacatattaaaacaaatcacctgagtttcatcaacttccattactcccatttcaacactgctattggttcctgaaaatgacaaatttacatccgaattaaaatttcaatactatttatttactatcagcaaaatgacactgattgacatgttaaaaaaaaaaaaaaaaaaaaaaaaaaaacctagaaaaaatcatattgaaataaaccaatcaaaatttggaacctgtataaattagggttaaatcaaattggggcaaattctacgttctctcaggcagaatcgtttacccttacaaagtcatgttttgttcaatataaatggaatcattattactaaatagagttac

SEQ ID NO: 185795 - DNA, 9431 bp, Cannabis indica
aataatatagtctctgtttcttatcctaaaaataagaagcaaaacttttttggatataataaaggatgtaactcttttcaactacaaagtgaccaaaaatgacatttactttttaaacattcctactcattgacattcagtgtcatttttgttttctgggctagtttccatgttaaaaatgctaaataacgtcaaaaagcatatcatactatagctaactattctctgcttgtaggatttcactcttggggaacatatagaggaggaggatggggagcagggaagtgacagctcaaactcaccatcctctaggtcaatgattttcgaacaagtatctcaaaattctaaaagggatttgattatggtaaattctgtttctcttttgttcttatatacatttaaaagtttgttatctatgtgtatatactttggttttttttttgcccttatgtaggttcatttgcttcgacttgcttgctcttctaatgggccactgtctagctcactgcaacaaatatcaacagaactgtacaatctaggggtaagacttttcaaattcattgttcccatatctttcttataatagaaagctacctcatctaatttccccatgttctccttgatgctgatctttgaattgggtgaacagattctctcagaacagggtaaggagttggcttctgaaccatctacacattttaacaaaacatttgatcatgcattccagcagtatatggtagttttcttattacttaatgtttagttgcttagtttggcttctaattcttaaaaatacgttgctatttattttaattaattatatgtaggtttcatcaaaattatctcaattctggaaatacacttctgatactgaagggcggaatacatctcttccaaactctcgatatctcaatgactttgaggaattacagtccctaggtaaagaaaatcactgatttttcttgttacttttttcatatggttttcttactttgggagctctttccaacataattccgattatggtttccctctctctgtatgtacatgtatttaaagaccaatagtatatgtatttgtacatcctaacacactgacaaataaagatagcatgcacgtgcatcctacacaaaactaattgattattagaaatgtgcatgtatacattaatatataatattatatatatatatatatatatatatttatagactacgctccctgcttaccactacaatatttgaggacaccagaaaaagaagtgtgcgtacattgttataaagctaactggaaagtaactacattgcgttacttactacttctggttatgttagttgtgccagtgggttacctatgcagtatgggataagctggcctttagttattattttaacttctgtgcaccatgtttcttaatttcttaactgattttattgaagattgaattgaacccaagaagctacttctctttgttagtgtgcaacttatttattttattacctagcttttgtaaaatcagtttttacacccacatgttttatctttgatagctttatctttttaatatatatttcctctattgttcttttggcctacgaattttacttgatccgatactatttttaaattttattcaagacaaaggaaataattagctcaacccttttccttattttgtactttggtattcttcttaataggtcatggtggttttggccatgttgtgctgtgtaaaaacaaaatagatggaagacagtatgcagtaaagaaaattcagctcaaggacaaaagcctgcctctaaatgatcggatactaaggtttgctttgttttgctgctacctatagacaaacttaggagtctttagcccacaaagaatggaagctgtaagatattgtacgagattatgttcttgttttgaagtcataatttgttaatgttcttgttttggagtctttagcccacaaacgacagttacttgtaactaaatcatctcctattgttaatgaatttcatgtaaccatagtcgtactggaacaatatctctcctcgttctggaagttatgcccatgcacacgaggaggttccatggcccttctggtcatggaatgcaccaaaagcccactggattctaatcccaactatagggagatcgagagggactttgatggtctggaacactagaagtatcatggttttagactcaatggtgggtaagttttcaatttcagctttgattaaagcagaaggttaagacccttggtggttttcaagggtctatgggccttgttcgtcttagaactgaattttgggatgaatttggtgggcttgcaccaaaagcccactggattctaatcccaactatagggagatcgagagggactttgatggtctggaacactagaagtatcatggttttagactcaatggtgggtaagttttcaatttcagctttgattaaagcagaaggttaagacccttggtggttttcaagggtctatgggccttgttcgtcttagaactgaatttcgggatgaatttggcgggcttgagttcaatttgtggtgaatcatggtgtttagggagggacttcaatgtggtaagaagagatgaagaaaaactgaatagttcttcttgtactagaagtatgagaatgtttgaaaacttagttcgcgggttgaggcttaaggatccaaaacttaacaacagaaggttcacttagtcgaatttcagatcggttcccatttgcagcagattggatcgtttccttttcagtaacatatggaatatcatgtttccctttgtcagacaagaaatgttgatgagattggtttccgatcacagtccaataatccttgattccaaagctcccaaatgggcctggctccttttcagttttataatcaatggctggatcacaattcaaatgataaaaagtgctttggagagaaggttggtggatttggatagaatggaaggaaacgttggctggaatcacgctttagtggaggaaagaagccaaataaaaaaggaatggcagaatttaacttttgcggaagagagtagtgcatggctgaaagccaaatgtatgtgggctaaagaggatgacagtaacacgagattttttcataacatgctaaatgcgagaaagacaagaaatactatttcaataattgaagggaggacagaacgttcatccaaaagaagaagatatggctgaagtgatcatctcgttttttaaaaaattatacacttttgagaagagaaaagggagcagtattgaaggaattgggtggcaaaaaattttggaattttgggtggaacaattaggaaggccttttgaagaagaagttaaaagcacgatctttagttgtgaagacaataaggctccaggtcttgatgactttagtatggccgtttttcaagctaactgggaggttataaaagaggacctaacggaagtttttaaatctttcgagaaaggtggaactattcaaggaatcatctgttttattctaaaaaagttaaacagttgtaaagttagtgatttcagaccaatcagcttgataacgagtgtgtacaagatcattgctaaggtgctcgccaatagactcaagggggtaatggcagacactatcctggaaactcagtcgacctttgtagaagggagtcaaattctggactctgtgttgattgctaatgaaattgttgaagattatagaaataaaaggaaagaaaggtttgatttttaaaatcgattttgagaaagcatatgatcaggtggaatgagattttgtggacccgttgatgaaaaaaaaagatgttttggagtaaaatggagaaagtggattagaggatgtatttcctctacatcattttctattttcattattggtaagccaatgggaaagtttaacgggtctcggggactaagacaaggggacccattatctcatttctattcatgttggtggcagatgtactaggaagaatggtgaataaagaaattgaatccaagtgtatctcttgctttttagtgggaaaagacaagattcaagtcagccacttacagtttgcgaacaatactctcctctttgttgatggggaaatctcgctccaaagattggtaaaattagttgatggcttttgtgcgatgtctggactaaaggttaacatgagtaaaagccaactgctgggcttatgtatggttgaacaagtggttgctaaccttgctgccagaatagggcgtgatatggggaatgtgcctgattaaatttgaatcaggtacaaaaggcaaatacaattatattacaatgaagggtgcaaacacaatcacatagttacatatcagacacaacgtaattaacaccattttccaagacactaggagctacaatttgaaagtctaccatccatattacttcttggggaggttaaggccgagcatcggtcagtttggtcggtttttttcaatctaaatattcagattttggtgttttgtctggattggtgcaatccaaaaaccgaccgactatgtaaaaacctcttttgaaccgaccaatgtgagccagagtttggtcggttaagaccgttgaaatcgattttttttttacatgtaaaataaaatcaatgtctaaatctattttttggcattttcaaatctaacatagaattacaattttttttttgtctctatagaatataatcaaagcaaaaattagaaaaaactaaacaaacttgtaaaaaatcagtaaaatataattaaggatcgtaaacaacttccttaccgaacacagtacactaaaaacatgttaaaaatcaaagtagaaaaaaaaaggttgagataccgattgaaacgagacgtgagagtgaagatgagcttagaatttttttgagcagagcaagaggtgtgggggactcgacgaccggggatggaggggtgaggtggagttgggcggcgtcgatttcaagcacaattggtagaggtgggaatgagcggttagggtcgagaaaggaagctagggggctgtgcgtttttcgtggtttaggcgagacaaaacggggagggagatggtggtggtgacgtactaccgtggtgggtttctggtgcgagtttgtgccctggttaattttggggcttagatgcaaaatgccataatggagagagatttgagaaagacaagcaggcaaagagaaagagagagagtcatgagagaataaaactattctgtttatttaatattaatatattatatataaataaacttacggtcgatttcggtttttttggtcagtttgtaactgaaatataaaccgaccgtttaatggcggttttaaccgttgacagttttttcagttttggtttcaatggtttcggttctagcggtgtttggcaggtcggtttgaacgactttctggatttcatgcttagccctacgggaggccagtgagaatgagttcaaaacattcaaactgttgggaaggccgttcttaatggcctcttcaaatgccttccttgtgcccttatcaaacaatagcactctagtcttgtcttgtttttaattattttctctttaaaaattacaagacttaatttctttcctttaccactttccccttgtcctctcttttctctctttccaactttgttgattaactttggtggggtacttactatgtagggaagtagcaacactttcacgtttgcagcatcaacatgtggttcgctactatcaggtgtggtttcttggttctttcattgctttgcttctgatttagtgttccattttttctattttttttcctttatatgaactgaaacatacattttctaagagagtaacattttgtagttgaaatttcattttttaaattttctttcggttgctgcgtatttgttcttttacattcacatctatatctttgtcataatttgaaatgatctaatatgtagctttatttgtataccacaaacatacagggtttaattgctattttcctcaaaatttgagtagtttgatgtaatacaaagtttattgttgtgaatgttcttcatgatggttctaataatggtatgaacttcctaggcatggtttgaaacagggatagttggttcttatggtgacaccactctggggtcaagaacgacagcaagctctagtttcagcttcaccaggacaagttcagcagatgcccttggacaggacaccaatcttgaatcaacttatctttatatacagatggaatattgtcctcggtaaaagcctttttcgttttttttaaataaaaattcaattttgtttggataattaggtaaaagctttctctaatgtttccgtcatcattgaaggactctacggcaggtttttgattcgtataatcactttgacaaagagttagcatggcatttggtacgtcaaattgttgaaggattggcacacatacacgggcaaggaatcattcatcgagatttgacaccaaataatatattttttgatgctcgcaatgatattaaaattggggattttggtcttggtaagatatatgttcatggtaatttgacattgttttcttcattgagcacgagtttcagtggtatggttatgtcattgggtctctatacaccaatagcaaggatcatcatgtatcaaaatagtaattgtctcaaacttcagtttttgctgtataatcattacttgaaacccctaaattgttattaggcaccagtggtgtccaacatcaccacgaggtactgctttacaaatagttagcggttttctataataattattcaattaaaacgtgtgggatccgatacttaattataccaacaactgtatgacacttcgtggtggtgtcatgagtgccctttagcatctcacaaattaaaacgttgcttccagccaatggttctttttagaacttcatcaaggtatatgtttttgagttttttttttttctgtggaataagttcatttggaaatcttctattcacaggcaaaatgtttcttgactggttatcttagaaagataatactagttaatggtgtaaagaaaaaggcctcaccttgatatttcttacttatgatgtgtgatgcaaggaaggtaataagaagctagagagttttaatttctgaatcagtgaattgtagtgtgagcagagtatggtataaattgtaatgatactgtaagactgaaatggtgattgttatgaggaaatttgtggtgatgacaattccttgggtcatttggctggaaggaaacagccatagcttctctttgggcttcagtagtgaaataaaataacaatatcaggccttctttagtcactgatggctgtcaaaccactttgtttagaggtttttattttgaatatgtttttttttttttttttttttgtgaggtagtatatcattattttctgtcttcgaggataccttattctcccatgtcccgtaatgttaattttgattattacaacaagttttgtttgttgttgttgctgttattgtttttaaaacaacttaacgcagtacatgctactgaatttacttttctgggtattactttttacgaggccaaacaagaaccatttagagaccacattcacagttacactgcaggttgtgcaatttgatgaatagctcactgaaacctatcggtcctattattgatatcttagcttgtagattccttaaaggcttaagctattagtaggatgcaataatgtctgatactccccttatacgtatttatgtatctggccatccactagtaattcacttgctgtaaaatatatggagcacttatattggctgttagctaacaactatttatttctctccttgtagccaaatttttgaagtttgaacagttggatcaagatctgagttgtcctccagatgcaactggtgtgtctgttgatggtactggtcaagttggtacctatttttacactgcacctgaaattgagcaaggatggccaaagattgatgaaaaggtgaatgcttgtcttgaaagattcttttgtttaactccatttgtttggatgtgtgtttcttttgctccatatttgaatgctctataacagaacttttgagataaattgtttattcagaattggacttcactagtgtttgaataatttcaaattgcaggctgacatgtacagcttgggaatagttttctttgagctttggcacccatttggaactgcaatggaacgacatgttgtcctatctgatttgaaacagaaaggagaacttccatctgcatgggttgctgaatttccagaacaggcatctttgttgcgacgcttaatgtctttaagtccatctgaacgtccttctgctacagaactcctacatcatgcattccctccacgaatggaatccgagttgttagacagtaagtaaatataattttggttatcggagtcatttaagtgcttcattacaataaataagattggacaaagcaatcttaaaagcggacaatggaagaatacagcacataaaagagaaagagtatgatgatgaattccttaagtttcatttcctccaaaaaatatcaaagtgtgcaataactaataagcctataaaacctaggaaaggtgcttgacttgacttgatttgatatgtatatatatgtatctatattatatcattatgttgtgacaacattgtctattgtttgtatattctacgggcttctttctgagtagtgtttggagatatttgtttctagtttatggtttgaacaacctttttgtacaggtagagtttgtaagtgatggttatttctttttcgtcaaactggttttcatctcttccatcaatataaagaaaatgtatttattttctctgtttctttctttctttattattttattttaagtttatatttgtaggttattggtggcagttaatttcactgttctcataattaccggcctccttgaaatgttttgtgtgtgtgggtgtgattggattgaaatatttacgataaatatgatcaatagagttgattttctttttttgtattttatgtcatcagatattctacgtacaatgcaaacttcggaggactcaagtatatatgataaagttgtgaatgccatttttgatgaagacacattaagcataaaagacacacatcatcacactggtagatttaggttatcaggaggtggtccttcttccatccagtatgctgatttagatactgaggtccgtgactatgtcactgaaatcacgaaggatttctttcgaaaacattgtgcaaagcatttggaaataattcccatgcgcttgttggatgattgcccacagttcaataggttcagtgcttcataaattaccttgtaatcatgttaaatatttgtttctcttaatctttaataatcaaatggtatttctgtcataacatttatga

SEQ ID NO: 185796 - DNA, 2967 bp, Cannabis indica
tacttggtgaggagggaggtgctgtggtccaattactttcttattcttatatcttacaataacatggagaagagattacctttattttctctcattgagagagaaagagagagagagagtcagcttataataatattagtattgtagccagagatagaccaaacaacatgccatgaatcagcctggtcggagaaaaaaagaatgaatatggtacggccaccgccaccaccaccacactaggatcaaatcttaatcaggctgccaagattggaagcatggagaggttttcgaaatttagcgtaaagacaactttcaggtcaattaaataacttatagcaagggtgaagaataatactagctctaacacaagatcatatcaagtttgaagtgactaaaggtatagcaagggaagcattatatgataccaaaaatgaagaaaacaaagccatataaattataacaaagaatcatccaaatatgtagagtaatgtttccatagttctcaataaagaaaaaaaaaaaaaaaaagggaacaaattgcaaataaccaaaggaatatatatgtggaaaaatttgtctgatacaaaatttccctacaaggggaagaagcatagtgaaaagtcatgctcttttgtggggtatacatataataacgggaatcatgccaacgcagacagaactaagtaaacataacaccctagcactgtgattgggagcagacattttacagaataagttaagaaacaactccttaaaaaaaataattatgtacaacaaccgcaccaccctttagaactcatgaatttgatcgatcccccaaacaattttcccaaagaatgataataaatttagctgaacaaatcgattggcagagccgagtcagtgacgcaccagtcatcgattgtcagatgaaaccttcatgaagagtcacacaagccgctgcaagttgaactaacctttacagaaacagatagacatcaaaactttatgactagaagaaaggatcagctcagccactctctcttatgcaattcccaggcaaaaggaatttatacttttctgcattctccaatagatatgctggaagatgaacagctgagaaagaatgaggaattggtcccattttccctatgatatctttgaaggtgtactcttctggtagcatatcaaacagatcagcccccttgcagattacattctgaactctcttggaatgtaagaaatgagtaaatcgaactctatcaaaatgactgtatgctttcatcttaaatatgaattcgctaattcggcgaaagcaaaagctacaatgccatcctgcatctgctaaaatatcgtctgtctgacggtaatgggcatacctggtctttccagtttgatacctatgcacagaagctctccagctgttattatccacaagaaactcaaacgaataaagataattcttcagccgaagatgaagaacttgaggtatatcatcacaccacctcagcagattaatagtgtgcttgcttggaatctcatcaacatcagacattatcagcaagtcatcatctgaaatgcctgctattctgagaagctgatccagtgccactcgttgataagcttcttcaacaaatgggttttcttttttcttaaaccgtcctccaacagtgccatatgtcaatctaggttcaacaaatttgaactgatcacgattactggcaaagaccagaggctttgtaatcccagtaaacgttgaatttgactctagaagaacaaactgagtgatgtagggatacaactctttccagcgaatggtcaagatgtctagctcattactaaacaacacagcatcataaacacgcctaggatactccctcactccccaaccatgaagtttacaaagatgttccattgacacattctcatgataatagtgcggcatatcatgaaaaggtttaggtggtgattcccacagtggccgcaagaagtatgagatcttctgtccgtgaacatagatgaaaaaaatgcaagttgggataagggcaaagagaaagacaagagttttcacatccaaaccacggagaatgcagcgaactctagacatgcttaacactttgcttgattcctgctccataacgaagatttcaaatttgtcagaacaaataatcaaaaattcccaaatcaaaatattttatatcaactagattcaccatgtaaattgagtaatttgacatcttctttccataaccagagtaactttgacaagttcaacaactaaaacaaaatgaaataaataaataaaatacccataaacgacagtatccccataccaaacgaaaaaaagctcatttcttttttaattctgttaaattgcccaaacaacaattacaggtaatacaacgtaaaaacaggaaaagaaaaaggaaagtgtattcattgattgggtcatgagaaaaaacgaagaaaaaaattcctggatcacaataaaaccataactaattcaacagaaaattccagagatccaagcgtatttattgccacattatctaagccacaaaatattctcagatcaaatttactcgatactttctaataaccacagttcaataaacccaatctctaccactatatatttatatattatacatcatagggatgggaaaagagagagaagaaaaaacaaacctggccacaaacatcagcgcatatatcatcagtcttcttagaacagtaatgccctcctccttcacccatcatccaccacattttcacttcgaattacaacaattccgccaaatcaaataccaccaccagatcactctcaaagccaaaaccgaagaagaagaagaaaacgattctcagatctctgaactcagatcaaacttccccgatctccgaatcgaaatcaatattccttctccacagcttcaacctcttcacctctctctgttctccttcgtcttctacactctctctctctctctc

SEQ ID NO: 185797 - DNA, 2937 bp, Cannabis indica
acacatgaattagagatgcttccactagcatatcttgacaggtcaatactagcactaaaaaaaagtttctttttcaattatacaagggtactgtagtgaagccacgtggattaggatatatagcgttaacacgtggatttcttccttgcaggcttggacgttaacttgatgaagtcaatttcaaaaagaaaaaaaaaaaagacagaaagaagagagggtgtgttaggtaggcataatattagtgacagaatattttcattcctagaaattagagagaatatcgatggctactgcttcacaaattatggccaaattgaatctggctccacacccagaagaaggtggattctacttcgaaactttcagagacaattctgttatgctctcaaagtctcaactcccaccccaatgttagtcactcttctctctttcttgtattcatctttaccatctaactaaatcgttttgaatttatttccacaatttcttatgttggttttcatttatttttataaaattgattcttatgattctgctttaagttgtgtttttgttacgtatagttttttattcgatagtttattaatgttattgacaatcacataatccatttgtcttatttgttggtcttcagttttcttagtagtatgaactatgaatgtgttatggatagtatcttaatgtctattaatagataaggtagaacgggctgtgaactcatgcatttacttcttattaccatctgggaatgtgtcaaaacttcatcgaatcccatgtgcagaaacttggcatttctacttgggagagcctattacggttagtaaagtggcatacttgcttctccataacttatgcatctaagcatttagagactctgatcttctttaacacccatgatgatttggtttcagatagtggagatgaatgaggaagatggagaggtcaaattaacttgccttggaccagatttgattggagataatcagcaacctcagtatacagtgcctcctaatgtgtggtttggtgcatttccaactaaagactttaacattggtacagatggaactctgctcaaagctgctacaagagatggggagagccactactctctcgtgggctgcacctgcgcacctgccttccagtttgatgattttgagctcgccaaacgttccgagcttgtggcgcgctttcccaagagtgagcctctcatttctttgcttacctttcctgaatgagctgaagtttttcttcattgaagaatgcaccagcacctctctttgttgggttgcattgggtgatgctacgctatgcttccttggtggtatgtcccaagaggaataaaacctatctgaactattgtaccaatataaaatatacaatatacatattgctcaattgttgtgacaagtgaattattgattgaaatgttaagaaagttgtattagagtttgatgcgttgcattccttggtgacaatcattacttgaagttaatatatttgtttactgtaattaggagacgagggcagttcataacttgcaaacgaaaacaattctaaacccaaagagggaaccatccatttcagaagcttgtcatctccgtggaaataaaacccagatcacaaaacataaatgggttggtatctgagtctggcctaaaagatctggctacatagtagtaaaatttaagttcccataacaactctgggttgagtgccagaaataaaaccatcccacaaccccatcaaggtaagctggacaattcaaacaatacaaacagaaagaaaaagaaataaaacagagcatttagacccaattacatgaatggcatgtatcaagtaaaaaataacatgcaatagaggaaatagacaccacaaattgcctccaagaggtacaaactttgcatacttttccccatcatctgtaaatcgagtccccaatgctgttgcagctttgttctgaaacccctcctcttgaagtgaaattgatctgcttagtctcagactctcactgaccatttcacccatatatgaaaaatacaatagttacccataatagaattaatcaaaatcaagaaactccattctctttctcatggtacccttaagatcactagcatccttttctactttctgagcctgattgaggagaaacaaaatattgcacttaagagtttgaaaacaaaagtagcaagaaagactgctcatattctaaaagagcacattccatgaatatcaatgggacattcaagcttaaatgtacagtgaatcttaccctttttatctcttcttctgagacctgagtcatatgtggaggaagctcctccctatccaagtcctgtgaataggatattaacttaactattgacaaggtttaaaagtttctaaaactgattaaaaaaaagtaagaaagaaagataaattgcccataccagctctccaatcaacaccacattttcacctcgaattccatatagacctaatgggatatcacagtaaatatcacccacaatagctcgttcacaagcaccttcaagaattacattagctgtccatgaagaagaaaactccaaaatcagcaaataagtaaagaataacaaaagaaagcatgacaatgtgggatgaatacattaccaaactgatcaaaagatctcagtaaacccaaaagctttctcccatctctcaacaatacaagaagtttctctgcaagaagtagaacagtattgtcatagagaaaaactaaaagactaagatctactagttcactgttcacatacaactctaggtactcttctaatgttgtcattttgattgttttggtgtttgtatttgaggccccaaaaacaaaatgcaaacaccaaaaaagccctgccactaactccattcccattctcctaaatccatttccacaactgggcaacattaaaaaaaaaaaaaaaa

SEQ ID NO: 185798 - DNA, 2423 bp, Cannabis indica
ttcttcattgtagttctccccacaagaatgatgaataaccctgaagttaaaaccaccagcttcatatcatcattaaactttattttggccacatcatccagcattctttgtatatacttcttgaggctttctcccgattgtttcttaatattagtcagggagctgatttccatatcgtagtctttcgcagctatgaattttttttaacattacttgtagatccttcgatttatgaacggatccaagagatgatcttttccactaatcttctacagactttaacggagtcaatgagaaatagagacacttagcgtcatcacttgtcttagccacttgcatcattagggtatatttagataaatggaacctaggcgtcctaccttcatacagactcatttgtggcattctaaaatgttccagcaactgtgcttctattattctttttacacatgattttgtatattcttctttagaattagacacagttccattctacttccaggatatgcgttctgtgagcttcgtcagctcttaaattttttgttctagatgcttggtggttgcatcttgagattcaggtctacgaatttgatcattgatatggtttctcaaatcatcaccatgaggcctcgctttctcacttctagcttttgaccttctagcattcagtcgtgctctgagattattttttgaaagacttccactttcgtcatctgatattggatggactttatccacattatcactatggctagtagaactctcgagatgatttttatcatttttggaagtgggcttttgtgcctaagcatgaaacttttccttatgtgtaattctactccaaaattagtctggtgacctttccctagggcatttgttcctttctttttcttaggaggttgactggcaggattttttctcctttactgatcgttgggacaactttttttgaggtctctcccatttttcccttccttttattctcaggaggattatgggtgttaagatctttaggatccgttttccttgtattattatcctaaaggagcagcatcatcagatacattttcatcaggatcctggtttcctcctccaaatatttcttccaacattgcaaatttctctagcattaaatgagaaaattcttcttatgctgtcaacttttgttaagttgcttctagttttttagccatctcaacgacctcatgattaggctcattgtgctcactcccttactaaaatttttatcttctagatatgtaggattacgatctttagattcatcgtcttcttctccttcattgatgggatcatcgtgacgaccttgcttatcatgttgatctttttcttatatgacttgttgcctcactggatcctcattgaatcaagttttggtatttggatcaacatcatcatggtaataaagaccatatttggtttgggtgagtaccataattacagtatgtaattgttgatggtatcactgatttctttagctctcaatgaaagcacaaaaatatttactaagattttttgaaaaacgataatttaaatgtatgagccaaagaaatataattcaaaggaaataaaataagaacactcaaggattttacgtggttaggacgttaacaagcattagtccatgagtcaatattattatcaaaggctaaaaaagcctaagggattacaataaaatatgagcactctattcttccatgagtaaataagccaagaatttccaaatatttgcatgtaagatttattgagtatttatagtgcatagaggtcatactagttaccattttcccaatgatggggtgtttacaaataatatatcaactttaggcttatctggtgaagccctgcccaaggggtgctttatgtatgttgatgtggatttcacatcacaatgctagttttcaaaattgtgttctatctttgtgggtaattgatgttgtattaattacatgatgggaaaatacgcttgtaatgactgcattgttaaatcatgagaattaacaaataattaaagatttaattattattttatgattatatgtctcttagtagagattagggcttatttctaaaaataggccttaagaaaatattttcttaattacagagatatatttgaattctagatgcattatatatgttgtatatgaaatttcatgattttcatgttttgtgcctgataatagtgaaatgcgatgatttgaccaatagagttacctaagtatgattgaatatcttggggttaacaaggtagtatagctagactttgagaatgtcgggattatctagggttataattttggactatatatcttacccctaaagcttaaaaatgacttaagcttgaagaagggcaattttggaaatttacccaagaagtcgattttgtcctttatggacttaga

SEQ ID NO: 185799 - DNA, 5558 bp, Cannabis indica
cttaaaatgaatgtactgatgtatttttaatttgtttcgtcatccagaagatttttttttagtctaattttttttcatattcatgtacattatagctatttaagatattttacaaaattttgaaaaattcggaataagttacaatatagaaaataatgttcaaacagactacgtataaaataaaatagtcactcgtgcaacacattgtttgaacgtagtttttggcgtgttaaacttttccgaatttcttaaaattttgcaagatgttttaaataactataacgtacatgatcatgagaaaaaatttgactaaaaaattatttcggatgctaaaacaaataggggtgcatcaatatatccattttaagggggtgcattgtagaattttctttttttaattattctttaatgaagaagttttaccatttaaaaaaaaaatgaataatgtgtagttatttatgttatttatgaattatgattatttatagattttttaaattttttaaatagtttacaatacttgaggctgaacatcggacaggttgacaagtttcgaattaaaaaaaagtaaactcgaacatgcatgttcacggattgcgggtgtgtaagttcgggttgggcgcgttgattgggtcaacgaattggctgggtcaacttttttattttttaacccaaaaatatacatattattgatgtaattgtagagtgtcatgttgttcttgtgatctgtcgttcgttgccctagtgtcttattttggctgattttttagtgttgaacgctccctgttgtgtcccttctgagtgtgtcgttggcctttccttcctttatttctgttgacctctttgtttcttgtgtgtttgggtaagtgtttttgtcttgctctatcccttgctttctgtctagattgagtgtctcccttattatggtcttgtggggttgggtgtgttggtgtttgggttgtgttttcacgtgcgtgttggttggtaattgtcgtgtgtggttgtccagtgttatagcgggtgttaatgcacagtctttgaattctaaaagtaggtgcatcacctttaatgaagctaccctttctttggtccccagtgcttctactgtccttattttatccaaatttttccttgtggaaaggtgctatcttctaaagtatttgtggaaagtgaagcagaagcctactgtgctaaaatatggaatgtctaggtgaaagtggacaccccgatctctggtagtgctttctcaaatgtgttatattttggctttgctaatgtagctgatagaaaatgggtgctcaagaatgggccttggtgcatcaaaggtgatatcattgcgatgctctcttggtcctcgggttttggctttaaggaaatatcttttgattttgtctatgtgtgaattcatatccacaacttgccacatgattttttctcctgagttaatgccaacctcttaagtgctcaagcagggaaggtgattttcattgagctggatgaacagaaatctgcttcatggttataatggattagagtgcaaatcgagattaatgtgaacaatcctcttttctgtgggcgtttcatcaagtttgttaatggtgctgagaacgagattcaattcaagtatgagcaaattgatatttattgttacctttgtggtcggctgggccaccaaagaggcagttgttctctatcctcaccagtcacggtcctcaatcctagtggtattccttatcctctctatgctttatggctcaatacctcgtctaagtacccaagttgtttctcgggcaatttagaactttctagccattggacaaaatctagcaaagtgttgaacaagataaagccgcagttgggtcgtcttctcaagtgaaggaaggtaactcgcaggcggtgaggcagggtgtttccacggttgttcatgcacgagattcgagtaacagtcggttgtagaaattgaaggctagtgctggcaacagggctatgaaggcgtgggtacccaaagatttgttgactgagcagtgtaaggtcgcgagggagtctcatgttgagggtgggtggtattgagcctttgttgcaggtgagaaaggaggttgctattgtgccgtttttagaggatattgtggtttcaaatggtaatgccattgtagatacttccaaggtgaatgatgtggatgggtcttattcgaaccctaccttctctttgggtgatgggcctggtgtcacttcgggccacgtgtctaatgtgggagttggtatcttaagtgggtcgtcccaaccatctatttttaatttaaaattgttaaatgagcttataaaagatgtggctagttctgggccgtatgaagctttttttcctattgggtcgcatgcttctcctcgggttgatgatgggccaactcctattttgctagttgattataacaaaggtgactcgtgtagttctttaaagggccaatacatctcagctaatttggatgagaatcgatctctagccaatttcttccaatctcaagagaggtatattaaggaacttaaagaaattggtaactctgggatccttaaactgaaagcttcttgtgttgatattggcatccaaactccttctgaagttaatgagcaaacaactcctataaagaagcggagattgaactttgaagaagagtcaagagggtggttcgtgagttttcgcacgatgttagcccagtttgtgcgttggatgttgtgaatgtttcgcttgactcaaacgagtcttgggaggagcccctggctagcaatgaattgactaaagtttctcaggcaatggatacttctaattgttcacaataagttgacaaacctatttctttgggtcagtcagttaggctcacaacctggaaagccagagctagtttggtggatttagtcatcccgaacaaagttgaggcaatcattgaggatgagggttttgcggtcagtgtgcactttgctgcttttacccctgtggaggaggatgttgtccctcctccacaggagccacgagaggccttgcttggaactacagagagttaggacagacctctacagttcttgaattaaaagccttcattcggtcgtgctctcttgatctcatcttcattatcgaacttaaagtggatgcggataatctggtatgttctcttaagaattaacatttttactttaatattgtggttcttgctgtgggttgtacaagtggtatcattgtggcttggaaggccagttatatctttgaaagtatttgcatttctaaaaattagattattggtattgtgtactcagatccagagaataatccttggttgttatcgtgtgtttacgggcctccttacttccatgagaacaagaaattatggtcgaacattatgaatattggcaaaagatttggggggccatggttgattttttgggaacgttaattttgttctaagtaactctgaacgggttggttccaaaggaaaggatcaattcctaccctttattgcagatttgattaattgacagggttagtcgagccgcccattaagggtgataatctgacttgggataatcatagagatggcatggctcacattaaatctgctcgtaataaagcgctggtgaatgacgagtggtttcagctcttcccaaaagcttgattcttttgttgcatactagtaactcaaatcactggccactctatatctttacaacagactagggatggcaattcgtgttcgtgtcgtgtcgagacccatatataacgggtacatgctcaacttgaatacgacccgtttaataatcgtatcaaaaaaatgaaacccgaacacgacccgtctataaacgggttgacacgacacgacccgtgtaacccgtttatatgctttatttaaatatgtcaatcaataacacgttttgaagtattcaacacatttataacccatttatgacacgttaaagtactaaaataactttaaataggtcattaacgggtcaattttgtgttagccgtgtcaacccgaacacgacccgtttattaaacaggttagacgagtcgacccaaacacgtcccgaacccatttaaggcaaacccaaacctgctaactcttatgcgggtttcgagtcgtgttatcgtgtctgacccgttttgccgaccctacaacggaccctgtataggacaaggatgccttttagatttgaagcttggtgtactagggaccccccgtagtttgttagtggttgaccatgcttggaggtcaattactcatgattgggccccaacaagaattttcaagaaagtgggtgctacgcgacttgctctaagaaaattgaatcgagaacaatttagcaagttagatactagcatctcctggcttgaaggccaacccgagcgtattcaaagtttgcctaccgggacaagaggttgggcttaagaggcagaagtaaggggagctctaaatgaagcgcttagtcagaaagccctgtactggcaacagcgagcccgcgtttcttagatcaagaatggtgataaatgctctaaattatttttcactactgccactatccaaaatagatgtaatactgttgacagtattttgagcaaggaagggatttgacttacaaatagtagggagattggtagagagttctcataattcttgggagacattttctctaatcctgtggagagacatcttcaactgatctatcctacccaggctactcttgttcttgggcagattattcaggataataatgtgttagttcaagagatcatcttttcattcaagcttaagaaaggaaaagagaggtttttaactatcaagattgactttgtcaaagcttattaacatggcagtcattcaacttaaaaaaaaagtataatatataatgggttgtatcccacattattcatgagtgtggttaccaaattagatcaacaaatcagttacatatagtttgtatgtttaacaaattagtactagataaatattatatgagagatataattttaactttttaattgttttttattaacatggtttgtattatgtaagtgcgtattttaataacatggctgacgacaaatatattggctgaagcaataatgtaaatgttgtcttgtgtaagacacacagtaaaaaatttgaccatgcaattgttgtcttgatatttttatttttattttctcaatatatgtaattcaaattgcttctaaatgatatcatttctaacaagcttatggtttctccatatggtggcacaacttttctttagtttcaatttcctttgtaaagtgatccgcgaataaaattgtgcatgcattgacgtacgtaactctgttcatatagttgattgtactgaaatgtgcgtcttctttgctaaatgatattttatccttaatttgggatgatttaagttagtgaaattatttaaaaaaaaattacttttatttgattattttaatatgtttttagcatacaatattaattaatcaataagaggtactttgtaccatttgccttgatgtttttattttctcaatatatatatatata

SEQ ID NO: 185800 - DNA, 1919 bp, Cannabis indica
catttctctacaaataattacttattgcttactaggtgtagtataaaaaatatttaaattatatttttaatattataactataaaaatacttctaatgaaaatacaaataagtaattaaaagttaagctataaatttttagatttttgacacatggattgatttcaagatcagcaataatgtaattatttagaaccttttgtttagaaaaaaataattatttagaacctctcagacaaaagtttgaaaaattatgaataatttatagtattaaaaatacaaaatatatttttttaatagaaaataaacatattgttcttaagctgttttataaagggtgtgtgtcttggaggtcttgggttcgagtcccatataaaacatgactgtaatatataaacgcttaaataaaaaaaaaaataagttgttttataaataattttttttgacacttttcagtacagaaattcgtcaaaaaataataagttttttaaaatgactacaagttaaattataatttttcatgtacctaaacagaaagactcttactagtggggcaatggcacgtccctaccaacgtcctatatatatatatatatttattaagtatatggaggcaatggacaatgttaggatgctacaccactatattcctttttcatatattatatatagtaccaacaccaacttgtttaagcccgtactgaccaataactgggccacattattgcttctctaacatcagatccaggatccacacataaacaagtagataaatatattattttttatgttcaataagtttccaatgcagaagtagagatcatgatgaccgtggtccatgaggagtaaagtattatatacacacagaatatatgcactatatatggctttagtatgatgagcaactcttatatattattagctgaacacacgagggactgaaaactgagaaattgaaaacgattctagttctagactcccaaaataatttgaaaaaataagttgtaaaaaagaaaaatgtgtaaatatgcttgatttataagaagaaaacctgcgcaggggattggtacttactagctagttcctgccatttgtaaaaagccaaaatgtaataaagtaaaataaagtactgatttaaataatttttaagtgagttaaactcaaataagaaaaaagttcaatcaaataccataattacatgaatcttgcaagtacaactgggttggtctcaagaaaatgcggctaaatttttattaccatactccacatgaaaagcatatatacctagctagctatttagtcacttgtaacttggttggtttaataatattgctacgtactttacctaaaacaaagtgccatttttggaagataactaaaccttttaaggattttgattatagttaaatatcttttgagggttttacgcctgtaatttatattgacaatgtatcatttcatgaatcgaaaatcaagatgtatatatgtatctcattttgttcggcgtgcactgtagagaaagagtttgaaggcacatgatctcgtgagttggcaactcagcaccacactttcatctctttatgttataaatctttttattttatttttcaaatgaaaagaaaaaaaaaaaacaattgtgtgaaggcttgtaacttgaggcataataattaatattttctatctatatctattcaaaggcgtgtttgtttaagctttgactattcataaataagcatgctgcaaataatatagtcatagagatgtgaaggctgtaacttgaggcattagctacagtagctttaaagaaactttattcctttattgtactaaacttattgttacaatattgatactaattgttttgttttgttttgtttttttgatccaaacattgctactcattgttaccataacgtgtac

SEQ ID NO: 185801 - DNA, 5508 bp, Cannabis indica
ttatgtttttaattttaaaaatattactttctttaaaaaacacacaaaatattaaattttcaattataacataattacaacagaaaaatcaaaatttaaaaataaaattacaaaagttaaaaacacagcgtaattccatagtataataataaaataaaaagattattcccaagtcaagaccaaccaaagccaacttaaaactccttacccaaaaaacaaagagaagaagacgccaacttaaaactgtattttcagggaaattattacgctttcctccaaccaaaaaaaagtaaaattaatttttattcaaaatttcttggtagtttatcataatgatcagtctacatagctatttttcacactttacataattgttaccaaaaactaaaatcttagtataaaaacaagaagtcacttggtatgaacagttggcatgtaaaacaatgatttaatataaggcattcttcatggacaaaaatacactgctttatgagacagacaacaaacaactgagcagtcagtcagcaacagtatatcaatatcagtacaatgttacaaattctccaagcctacattgcctagacaaagcttcacaaacttgggatgatattcattcctgcaaaagtagaatgctcaacacagacaagttgacattatcaacttaaagttaataataacatgttaatgttttttatacttatcattcgtgacattttcacttcaacgaagcccttcaatactcaccattattgtggtaaaatttcccactccacctttgtcatgtcaagaaattcactatcaccatcttcatacatgatctgaaaaaaaaaaaaaaacattatgtcaagactttatttctttttactctctgttgggttttaagagtgtaagtagatacttttctaaaggaatagctgtccattaacaggagagaacttcattttccagtatcaatatatttgatacccagaaaccgtagatttttaatgtcatctttcaatttgagcaatttgcagcatcttcaatatttcatcactagtagtagtcacagcattaaaaattatgtgtacttttctttccctatatttgaattttagaaaatgctgacataataatttcagttcaaaggatgtcaccgaaatattgaaatgtttcaaaaaatgccaagataatcctcccacttaacaatgaccgagtaaatctcttaccaagtgttttttggaatatgcatcaaaccgttcgataatcccaaatgacctgtggaaagttaaaaaaatatataaatatatagaattaagatttaaaaacagcatttcaagatctagcacaataaatattaatttctagaaatttaaaatggaacaccctaagcagatcccaacaacataaaggaaacatttaaaaaataaaaagctgtgaactgcaaaaagtgtaccacataaaaaacaatgttcaacttaagagaagactcaagtgagtagcaacatctagaaaagaacggaaaaagggtatcaaattacttgaaatcaaactttacgatacaggccaacaaatgctagaaagttgaaagaatcaatgaaacatgttaacattaacaccacctttccatgaattgtcaaacaaaattataataatatcaccaatgcagtttttttaagttatcccttgctacaacataggcctcctaacaaaatctaaagttatatttagggtaaaagttgtagacattctgaaaggaaaatacctattagtctccatagggtgactgatcattaccacttgaccaatgcaattgtaagaacaagttccttgcttaagatcagagcgggaacttcctgagatacaaaataaagtgtaacaaagtagttttgttctttcttccttaaatataaaaaacaaataatatataaataactaaaacaaggacagtcatatggcatacctatatgcggctctccattctggcaaaccttttccaaaaatgattacagaattagattccagtaagaaaataatgcactaaatatctgatgatgaagaaggcaagctaattgaaatcaaaactcacaagctttctgaaaaattaaggttatatttcaagttccgtgtctactattaaactgaggatagaataccttgattgttgtctgatcattgaattacaaaaagttattaacttgaaatcatgcattaaaaaaataaaaataaatcgacctgcacaaatatatcaagccttccaggctgtagtttttctgacaccataatcattttactgtgctcttaaaacagtttcccaaacgccaattacatatctaaatgtatgccccaccaatacaaatatttctttttcttttttttggggtgaaacaaacatttcattttgtctctcaaaccgagccaccatgattattactcatttcattttttaaatagcgtgaggtgataacacaaccaaaagtattgtcgaacaagggttagtcaagtatcaacctgtataattatgagatgcagttttcaccaaatgtttgaagaatttgaaagagaaaggtcattaaaacaaaatacatacatcatttgcagatagaattgcctttaatttgggagaggacacagcaacctgacacactagttttaatgcagcatccgatgacattttcggtttggttggttttacacccagttttcttctgcactcaacagctccacaatggcaatcttgatctgcaccaaattgcacaaacctacaaattttattagaccgaactacaacgtatatagctcagtttcaaaagatggtatatcaagaccagagtccccaaaagaaatgattgcctacagagtagcaagggaaaaaaaacaataaaagataacaagtgttcatactgataatcataggttagatgttcgcccttcttgatgtcacgtgtggcaaatatgccaattcttgtttcaccatcaattatccttgaagaaacaaaaatatctaataaggtaataaactaaaatttataaaattaaatcattggccaagaatcagcaaaggaccatttctgcatctcggtattggggcaacagctatgattaatatatcttgacttgtttcccttgtaagtggcatcaataaccatatctcggttaatctcacataagtaaaaatttgtttctccacggtgtttcatttgccaaagccttgtttcacaagttttatcatcgataactgcgtagaagagtaaatattacttaatgattttaaacataatattaatttaatataataaacaaacaagggctcttagttatcaccttctccaacatattctataacaaactctccttgactaatatcttcaagggccacaattccaaaaccacatttcttagtctgcatgcaacatgcaacatcccggactttaaatcacaacttgaacaatctaatagctcaaactatttaacaaaccatgcctaagaatatacaaaggttagcatgttcaaaaaaatacatagattctcccagcaaaaaaatagaaaaatacatagattcaggctttaccaaattagaaaccatatgcctacgtatttaatatgaagtgcacggcacaaattaaagtttcaccaaactagcaatgatatggtaatcagtcaaccacacaaacatcagtacttcctatttagcttgtatttatgagaattagatagtttgctataaaatggtgttggctaatcatggtttatatctttaattgttgattttttttattattttaactactcgtcatcctgttgaaccctacaatctttgggaggtagaaagatctcaacctaaatctcatgggggctattcagtcagactaacactatgtttggtagagtgaaagggagaatagagaatgaagagttgatgaaaggagagtaggaggctgggagatgagagtactgattcctttgattgtttagcaagagggatggagatgtataatgataaattactacttatttatgactatattttccttttaattatatttcaagagggtatacttacaattttatacaaattaatgtagatagtataaacccttctattaatgggttcaaaatggttgattaaagaggatttccaatccttctgcctcttctcatcctcccaccattgctctacctcctctccatccactcattctccgtcctaccaaacgtcacctaaatgcttcatactataggtttttaaacctgtacaaagtagctttgataaggttgaagcttacagctggcctcaccaaacaaaaaacgcttagtacacaaactagcattttaaaccttggtgaaatctaaacaggaatttaattttataatccaactaaaactaaaaaggatagtagcacactaataaaagtactagagaatacaagagaagaaatcaccatgtaaagaaatgaaataaagacaaactaaaacaaaaacatcaaaaaccttaagaaaaaagaattaaccacaaaattattatattcaaaataaattggttttaaataaagcaattttctaggtaattctaatagtctgtgaatattcacatacgtcactaccactacttctgagctataataaagttctacaaaacacataatcgtttattaggaaaacaactgccaaaagagaaaaaaagaacagtgacagaaaagtgagaagaatgcccaattactctatgtagaatatggaatatatctcatcattataaagcatggctgcaaaggattacttctcaagacatcatgtttctattttctaaagctacccttcaaaattttgcagaaaaaatgtcaccaataaaatttgcctgtttagagtccagatgtaatcgtccaataacacctataataacttataaggtcatatacctcaaagtgaaggaaaaaataaataaaattaactccttaaatgtctctctcatctaaatttaatgtaattatttccttaaacaatacaaaaatattataattaaaaaattagtcaaaaatcaagacaaaagagggcctagaccattaatgatatcttacatgcttatacctgcacaagtttcattctcttcacaggtcggttctggaatggtttgttaatgcaggaattgtcacatttacaacctgatgagcagctagacagaagcattctgcataaacaacagtcagctaatgaatggaataatgggatctataattacttatgaaaagttttaaaaaaaaaatcctattttagtgctacaatatgacactgtgtctactctacacatttcataaaacaaaacttcattttttttgttattctatgtttcaatatcagcaacccacacactgaaggtgaaaggcctcccaaaatatgacctttcatccatcaaaacattagagaggatgaaaagacaagtataatggaatgaatgtttccatagaaaattagctcgatgaatatgtaagtttgaaaaagttgtatgccagcagcttaatgcgctaaactgag

SEQ ID NO: 185802 - DNA, 4693 bp, Cannabis indica
ctctctctctctcttatttctttattaatatttttacgtggcacacattgctttgtgtttcatttatgacaatggttgtgatgtcaaaacacaatctctctttcccttggaagtttttagctctttacagttttagcaaaaatgaaaatatgacgagtaaaatttgtgcaggaacttagtggccaataactttacatttgacagctcaaacagatcgtgagtatttcacattgttgatgattttctatttttatttttaaattttctttctattaggaactaaatattagtttagttcgacaagcacaagatttctatagtgttaatttttttttcctttcctttcaataagcactaattatcctctttgcttgcagagttattcctggattagaatgtctgcagaggaactttccatgcaatcgagattctccactttgtaaattacttatattcaattacttgttagcaatttgatgcattataatgttaagcatacatgtcctggctctccaatattatttatttatgcatttttatcaacacttcattgtgataaaaacaagttctactaaggatatatgagactgtaatgattttgattatctgtcgtttggaaactatccattgtgaaccttacacaacaatctaacccagttccataagtctttattttatagtatgtctgttttgagatggttgtgtatttgtatgaataagtgcacaataaaattaacacacttaaaaatgaggtcaattacattgtcaagtgagttatttattgtttcacttgtgtaactgaaaaattgagaattttcatttattacttttcaatccttcattcacgatagttacacagtttatatttaagttgctttcaatctatgacatttaaattcttttcattttccgacatgacagttatgatgtattggatcttacagatgctgacttctcaatcaagtgtggtggacctaaggtgattggaagaactggcatagtgtatgaacctgaggacttagttcttggtcctgcaaagttttacgtaatcaatgagagatgggcagttagcaaggtgggcttgtttgctgacaaaacaggtaagatggatctcgaaggtacccaggcacaagtcacaggcacagatgagaatccggatcttttccatactgcaaggatgtccccaggatctctaagatactacggtcttggtcttgagaatgggccatacactgtaactctgcactttgcagaaattggttttccaaatcgaaactcacagacatgggcaggtctagctaggcgcgtgtttgacatatatattcaggtaattgtacaattaaataagaaaatattccagttttaaaaactcaatgttaactttctgagtagaaattacaattaatttatgttattgcaaaaatataaagattttctgagcttacctctggtcgtcttatttatagggtaatctcaaactaaaggactttgacatagcaaaggaggcaggtggggttgagagagcaattacaaagacatacaacattaatgtgtctgagaactatcttgaaattcatttgttctgggctggtaaagggacctgctgtatacctaaagaaggttactatggtccattggtagcggcagtccatgctgcttcaggtaacatatttctatatgtacacattcatagtcagatggtttaattgttcttcattgcttctgttttcttaaatcattttattgaatgaatatattttcttgctcagattttacaagtattgctgggggtcgacaatctactcaaggaaagaacagaacaggcttagttgctggtattgcggtttcagcagcagttgtggtccttgtattggtattttcaatactatatatgaagagaaaatcacgtgatgatgatgatgaaggtaagataatgtaagtaggagttacagttgaagtcctgttaatgaacatcaatagataatccatttctgaagtcaattttgttttaaaccttcactgatggctgcaaaacagtattcctgaattaatcaggttctcaggctatattaacattgcattgaatatttctttagattttcatttgggacacttccattataaaatttaattaactttttcccaatacttcatatctacgcagtttatctgttagtaatgctttcatgttatgtaaatagtcttaagctcatctcttgttatatccctactagatcttatatcgtgtacattcttgcatgaatatgcagaacttcttggaacaggccctcgtccagttacttacagttatgctgaattaagagcggccacagataatttcagtccgtgcaataagctaggagagggaggatttggtgaagttcacaaggtgatctttatgcttttaatattcaattgtagctgaattggaaaatagcattttcagcttttttttttcataatatatcccagttctatcacatttctcattttgtggtgttgattacattgtagggcacactttcagatggaacagtggtagctgttaaacaaattgctgtagcatctacctacgtaaagcgtcagtttgtatctgaaattgccacaatatctgttgtgcaacatcgcaatcttgtgaagttgaatggatgctgtattgaaggaaataggcgcatcttggtttatgaatatcttgaaaacaaaagccttgatcagttactatttggtacgaagctactggatatatgctatgcttgcctggtattttaaaagctttaatcatttgaaaccttttgtgatagatgtaaagaaaaagagaatagtaccattaaattgcaaaattctttgggctggttttacatcatatccaagttactgtctggaagggctaatatatatttttttattcttttcttttcttttcttgccccttcacttttaggtgtaaatatttccataatcccaggctttgacagtatttatgtgaaacactaaatagttcacagttagaatttttattggtatgtatctttgtggtacttaatattgatgcagccaaccttgcaggaaaagttaatttgcatctggactggcctacccgcatcaatatatgcttgggcacagctagaggacttgcttatcttcacgaagaatccatgccaaggattatacatcgagatgtcaaagctagtaatattttacttgacgatacattttgtcctaaaatatcagattttggtttagcaaagctctatgatgaaaataaaacccatatcagcacccgagttgcagggacaatgtaagtctctttaaccaacttacaggacctattctttctataattgctcataattccacaattatctaaatgttcttcaggttcattaaaattgatgctacaagatagtttttttatgaatctattttcattctcattgaatatgatagtcttaatgaagaactgattgtactgatgatggttgtcctgaagttaaaattacattcatattctagttataacttaagaaattttggagtgtcctaaagcatgaaagcattatttattgaaaaaataaagatagtgaggcattttgtcatcttacagaggctatctggctccagagtatgccttgcgtgggcgcctaacggaaaaggctgatgtttttggttttggtgttgttgtattggagcttgttagtgggaaaccaaacatctacaatactccagatggtgaaatcatatatctccttgaaacggtaaaagaaaaattaaggcattcttattttctttctttccaaactagcgttattgtttcaatgtataatgcttgattagtcaaaatattttacaggcatggacgttacacgaaaataaccaaagtttaggattgctagatccaagattagtggaatttaatgaaaacgaagtaatcaaattagtacaagtggcgcttctgtgcactcaggcatcagcaacattgcggccgtcaatgtcacgtgttgtaggcatgcttgccggagatgttgagattgacactaatatttcaaagccaagttatttaacagaattgggttataaaaacatgagaaatttgaatcaaggcgatgttatgattcccccgggccctataaatgatcccatgttcccttctccttatagcctagctgctccaataagtgatgttattactgaaggaagataaaaacttccttgctcatgctgtaatgtcatccatattaggtacaggaacaacctttccctgaacacggaactcctacatcagcacgacctttcgtttttgttttcggtgctgctcttgtttcttcaaattcatggcaatgtgaatagcatatgagataccaaatagagtatagggtagtcaacattgttaggaaagttggattgtgaaaaacatagaagaaaaaacgttttgattcagaaacttcttgtggcaacataagacatttattatagttttggaatgttgaattgattaaagtgatattgcaaagatgtaactcaagaattctttgaataactttttactaatttatacttctcctggagccttagtgacatgtaagtatattgtcactttcacttattttgatttttctttttcaatatatttattgagtatatatgtttacaataatgcacatattttagaaatttattgagtatatatgtttac

SEQ ID NO: 185803 - DNA, 2920 bp, Cannabis indica
aaaagatgaagagttgagtggttaaagaagtgctttctattgaacattataaatggttagatttttctaaaataatagtttacatggaacgtcaagacatcgaggttattggtgctatattatgtttcttgcaatccctgcaactgcttccttcttctgattgttatatgtttgccatgtcctctcacgaggtattttgtagaccctgatatgcaaatggagattgataaccatatgttcagaggagaagcctcgtttagtgttcttttgctggtatgcctggtttttcttctaacggttgtattattttattcttctgcaatttctatctttggtgtaatatgatctctgatctctcaactatagtttaaaaggcttgtagtttcacgagagttatatgtcctcattgtgaaatgcaacaagggtgaatattatattaaaagtggtttccatgattagttaaacacattgtttattttcttaaataaccttttaaattttgttaaaatctttgaaagttctcttccatgttgggtggtttgttctggggtatgctgctctctattaatttcaacatcatatactgcactttatagcttaaggaatttatctcagtttgcacatttttcttgtttttttgttgtaggtggattcttctgagaactgggagaggacaacattgtttttgagacggtctggcttccaagttgagatggatggttcagaagctgttgtgattaatgagaaattctccaaggatctatcagtatgttctttaactttggtgcattgagtttagagtttttgtgttgtattataggatggctctctaatgtagttttgctatttgtcaaataggcatagctaattcttgtggtctagtatagttccagggtagcttttgggaagtattgagaaagtttgaaacatttgcatttaactccttttaaaacaaggaacactttcactacagaaggtcgaaccaagaacctattagaatcggggctcttcctttgtgcttacagttacctaaaaaaacatttcccttttgttttaagttgtcagagttttatgtttctttataagatcccagcaatgttttcatggtctgctactatctgacttgctaaagatgatttctgtgctcggaaaacttattcacgagtcatcactaggtcttgttaagtactatctttacagtgattttgatttttttattctttttcggggagccaaggatagatttcatatatgcttcttaatcacagaaaattgagacaatcaatggttgcatagaaaacttttctctacttcttgttctgcagaagtaacatatgtgtttgttgcagatcaaagttccctgtggactttcaacacaatttgttttgatgaccggtagtggatcttctcatccatttagcacgtatagtgttcggtatgctttcattttatcttcgagatttcagtcaaataaattataaaactatgttttatttttgccttttttttttgtagaatgcgtgatactcttgtgctaaccatgaggatgttccaagcaaggtatgcatcttatgatgttgttttctttatcatatttttggctattcttgtagcatacacattttagttacattattattttctctacttttctttgagggccctcttaagagtgagtttgtattttctttttcttttgaataaaacatttctttgttctctttttgacttccaactgtttttgaggcaggcacatgatgataaaaagaaaggaagagcatagctccccaacaaagcatttttaaagccaatattcattcttagtagaaaggagaaaaaccataaattgaagaataatttatctctttagtttcttttaattataataagtgttgctgtgtttatagtctactacttttattgtataattttgaccataattcgcaacaaaataggcttgttgtatacctgattagcatgcaatgataaatcccaatatattttcatgtattagcacattgatgaaggcactttggaatgcttttactttgctacaatcaatattgaagttgtgggttgggatcataagtttaaagttggagtatgactgtatgcaactttatgatacaatagaatctatatatcagaatcttcttgtgtattgtagatgacatttggttggaaacatgaataaaaatgagaatggaaatagaaatagaaatggaatggaatcaaatttaatacgcataaaagagattgataaaaaaaattaataaattttttcttattttgcattagaatagtctttcctcctatttcagagtggaatctcaaaagaatgcatgatatgggagatggagcaaggcttgttatggggcgaatttttttttttcagggggaaaactatcgtgcattattttgacgaaattattaattcctagaaagagattgttttgttgcattttggaaaattaagatagatatagtaggattactatagtgaagaagagaagcaaaggtgctaacatgtatggcttcctgaaggggtttttagagttgtttgtggggataaaagagaagaaagaataagccttgtagggttgcagtattggaatggatgttgaccacacattagatgctttccacatgcattgttttaggttcgttggttctagctagtttaaaaaagcagaaagcaaacccatcatcattcttaaaagttaatgggtctcaaatttcaccctggttattataaccactcaaaacaataaaaatcaaatcatgtaaattattactcaatacggcttactctttagagtacttggtgttcatgattggatgagtttttgcataaaaaggaggaaaaaaaagttttgccttgcactcaacattaatacccaatttttctttcttttttttt

SEQ ID NO: 185804 - DNA, 3984 bp, Cannabis indica
ttttaaaaaaaaaaaaagatttactcatatatccgagtgttgtattattgtacgggacgttccacaattgtgaagatcgaactcatacgccagccgttggattaaatttgatgaaggtttctttcggtgtcgtcgtcttcgtacttcgccactcgtcgtgttgcctctctacaaatcacctctcatttcaaatccatctctgaaacttctcgtcgtttaaggttcggactcctcttctacaggtacggttgttaacttccttcattccctctcgtactcgcatttataattatacatctatatctgttctttttaaaatcgactcttttttttttcctttggaaatcaaacagaaatttaggtgttcattggattatacaagcttttgattattctgtactgttctgaattcatttatttccattgattttcgactgtatatttatcattggttctcttgatttggctttcaatttctcaatttactagttaattgatttttcaaatctggaaactcatttttagggtttctaatcacattttagggatattgtcaattttgatatatttgggtgcaaatagattctaagatttggtttttacctttttcagtgtcaggggattgagtttctagctgtgcaattaaagtttagggtccgttattcttttatggaatttgaatgccaggagactattagggtttctgagaaatcggcattctttgtagtaaatgcttgtaaagaacaacagattgatcagaatcaggttgattccaacaccaaaattgaaaaagctgcaagttcgaagctggacataaaatttagctgtaagaaaggaattttggctggttgtagtcagaaatcgagtaacgatgttcttcctaatggtcacaggtcgatgtccgaccttcctgcagcattgatatctgaaattctggattgtcttggtcccaaagatttaggtatcatctcttgtgtatcgacgaatcttcacaggctcgcatcagaacaccatgtctggaagcaattctattgtgagaggtggggtcttccagccattccagcaaccatcgatgcagggcttaacaatgagaagtcgtggagggatttgtttgtggaaagagagtttaggagtaggacttttatggggcgatataatgttgatgttttgtatggtcacactgaaggggttcgcacagttttccttttggcttcggctaaactcatatttacttcaggttatgattcaattgtccgaatgtgggacatggaagaagggttgtctattgcatcatcacgagcccttggttgtactatccgggcaattgcagcagatacaaagctattggtagctggtggcactgatggctttatccactgttggaaggcagtggagggtatccaacatttgtttgatataagggctcctcagaatcagaatacccagttccgtctatgggagcacgagggacccattacttctgttgctttggatctcacaaggatttatagtggatcatgggacatgactgtccgtatttgggatcgcttttcgcggaagtgcttaaatgtcttgaggcatagcgattgggtttgggcacttgttcctcatgatgcaactgtggcaagctcatctggttcagatgtgtatgtttggaatacttcgagtggggatctgatgacagttgttcgcaatgctcatgttggtaatgcatactctctggctcgaagccacacaggaaatttcatatttacaggaggagaggatggtgccattcatatgtttgagatatctggtcattgcattgagactgatgtcttgaaagttgcaacatggattcctcactcaggtactgtgtattcactggcttttgagtttccatggcttgtctctgcttccagcgatggaaagttgtcactgattgatgtgcgaaagctgcttaggactaacaaaggtgcttcaaagagaagtgtagtcaagcaattggataggaagagtttagccaagaaactggatcaatctagtgtagagcccccacagagaatgttacatgggttcgggagcaatctattctcggtggatattggtgcagatcgaattgtatgtggaggcgaggaaggtgtggttaggatttggaactttactcaagccttagaaatcgaacgtagagtgcgtgcactaaaaggaatacggttagagaacaggatgaggcggcgcaagcatcagttagagatcaacaataaaggtagccacactgaccaatgttcagttgctgccaagaagaattcagttaatggcgataggaatagtattaggtacaacaaacgcgggatgaccaataagctgaaggcctaacagctgttgttgaagtccccgcatattaagcaacacatgatttattattaaaaagaatatttggcacttatgtttattatattattactagtttgcactaataaatgcttttgctgataacacaacgagtatagttcatttttagctacatatgccaatatatggcatcaatgaagttatgttggctgctaagggatgagtttctaaagtcctttcgttagccaaataagcgtatctaatgtctatctttatctttattcatagacttgacaatagaaaaaaaaaattatggtggcatttggttggaggtaatgaaatggaatggaaatgaaagaaaataattttcattatattcttttgtttggttgcatattaaagtgttggaatgtcattttaatagaatggtctttatactattttagtgattatttcattttaaaatggaagatacgactattccaatatatgatcagaacaaatttaataatttttttataattttttttatgcattttaaattttattcctgttaatcttatttttattcttatttttatgttttcactcttttcaattaaatgccacttatgtgtttgattgacaaatgttgattttttatttttatttttcgtttgtatgttagatgttgattttgtaacatggaaatgtagttattgctcaacacgtgtcttttttataaactcaagcacttttagttttatggacgttaaataaaaaagaatagataaattttaactttccaaatatttctttaataattacaaacttgttcattcaagtcgtattttgttcattttgtaaatagtttcttgatgtaattgatgtaagagtgattggaaattaatttaatataattcaagatttcagacgaaaataaaaaaattaaaatttaaaatttctatatttgtaatttagatttgatgtttgaatcgtaaatttattatacttattaattagcttggttttagttagtttaaattagtagctcgtactcacagtaatgaattattttgaaaaattaacaaaatagagaaaaatttgtaattatttccactagaggaggcaaaacccaaaagactaaaattctatttattcaataacatatatcatttactttaattttattcatgagcattgacctgagttggctgcaattactcaataattatcaattatttcttaaatttgttttaacattagccgtgttgccagccccaagtaaaaagatcaataaaatagttcaatgaaaaatactgagatataatttctgatgaattcttgttcttcaaaaattaaaataaataaattaatgtatttttacgtaccaaatataattgagattattaagaaatacgtcctttagttatattttctttttatcaaaagttcaagtaagttttttttttttttaaattacaaacatacagcaaatttcgattatactacactggttagattaggggtatccatcgaacttctcaaatcgctcgtactgtactgcaaacaaaatatagattgaaattttttacggtgcggtcgcgatttgaatttttcttaaaccgcgcggtgcagtacggtttgcggattgcgattttaaattgttaatat

SEQ ID NO: 185805 - DNA, 2380 bp, Cannabis indica
gagttatattggacttttttcagttatttaaccaatgggcttaagttacttaagctgaaaaactaaataacattagttttggccttttgagcattcaaaagtccaatacgatttttcttctttttttttctaaggcccatgccttgatcattttcaggcatcagtcagatcaaaggtgcatcaccaatgtgaggcatacgcctcattgctacatatgaagatgtatgcctctttgttgcatatgaaggcacatgccatagtgcgtaaaggttccacctcaaagtgaggtgcacctaacaaatgcaattttgaacactgcacaagggtagttttgggacagcaagctaattgaaaaaggatgggtggtttggtctttgagtggttggccttgtgactgaatatataggccttttgttagaagagtgaggtatgcatgaattaagttggttcatcgcatcgagagcaccaagcctcttgaatacctggggtgcagagttttaccttttcccagttaattccaataaacactcatgtttctaatttctttgcatttggctattgttattgttcatattattgctaggttgactaaaagggatgtatggggcacatcaaaccatttcttaaaacatcattaattttagacctaatctcatacgaagtcttgttaggctttaagcaataaaaccacacactacgtatttcaaaatgttaatgcaaggtacgaggcatatctacttagtacaaaccatacaaatggacttgcataagcagaaatgcctttatgaaagaatgaaatattgtgtattatgattttcctaataaaagtggcaggctaagtcacattcattttctgacatgctgtacaacttaaatatcaatgatgaattacaacatgtttacattgttatagcagtatagtttgtgtttaacgcagacaattacctcagttttgccaagagataaattgaacgatatcataactgatagcaacacatcctgccttgcatattttatccggaaaggctgtgttgaaaagctattgtctgtatcatcaatcatccacactccatatacgtcatcagcacctatatctggagctggaatatagataaaaaataacattaggggacagcaaaacaactttaagacacagccttagtttgacatttcttttcttcttctcattggcagatttctatcataaagatgattatttcatatatactaacagtatcatgaaattcttctatttcgctaccagaatttaatgtgttttttgtttgctaacttagataataattagagctctattgttgtaattatcttagtctgatttctttgtccaatatctagttgcatagcctagtagtattaccattgtctcacatagaagacgtcccaagttctaatcataccttcatattggacaactcttgctggagtacccacagaattatactcgctgttctcccatcgcatggtaatcttgagttgataccagctacaacaacagaaaatcatgttaaacaaagttacagatacatattaagaatatcattttgatagtaaatgaaagaaatactcgataagcacttacccttgttgaaaaaggtcgagattgtgaaacctatgaatataaacagcaatctcctgtaccgtgtcaaacatagccacaggcttaatcttcgccgggtgaggctgggcatctgccaacctctttcctgaccagcttctataatttagaccaacccaccatccaagacgccgaaacatacgtaattaactatcaaataaacttgcatccctcccttcgttttcagtcaatgtcaattcccaatcccatttccagcccaattcaacctatcctttcacaagcctcactgaatagttgtaaagtctctttctttcactcactcactctctctctctctctgtaatgtaattacactttccacctcaacaatttaactttccaagggggcacaagagctttgtgcagctgcaaaaccagacacaaatcatacaatttagcctcagcttccgaagtgaaaacatataaacaatatgcataataaaaacaataaggattacattaacacttagaatcactgccaccatacacgaattcaatacagaagcttcaatcactaccccattaccattttatgtccagaacatatttattacgaaaaaaagtaataaatttctttttctggtctgaaaatgacattcaataaagctaggtggcaaagggaaattgatcgaacaagatgtcaacaaaacaaaaagatacacaaatatgcaaggactgtaaatgtaggaagtaaaacacgaaggtaccgtgagaagatctggcgcagtggagagggagagagag

SEQ ID NO: 185806 - DNA, 3356 bp, Cannabis indica
ctctctctctctctctctagtgtctcacaccacagactgaagtgtggttatgaggtttgtgttctttgctatcacacccaatatctcatgagttgagaatatactgtgattataaaattacaatcatccaattgaatctaataccccactctatttctaagtgttgaggctggcttggaagattatggtgtgaactcttcaacaagttcttagattggatgttcgataaattgatacgaaaagatagcgagaaaaccctaataggctacaagagatattatttctcttttcatgtagtctaaatttaatctatatatattatgtcgagattcttaggattaaggttcatattagattaaattaatttttgataagatacacttttgcttttttaactaagatatggaccataaaaaccaacaacttgaactttgagttgtgcctccctcatatgtggcaagccattccttacccactcatacaagtgtcccagtcatattaggctctcaatttcatccttcaaatttttgcattcattacttatatgttggatgtcattatgatactcacatctcttattggggtctctctggatactgtcttggaataagagtggtggttcttggtagtgagtgttttgtcgtgtggccatgtacacacgttcttgagtgtccactaactactgagggttatctccggatgccttcttcaccctcttgttttcacctcaagtgcttcctttagacgatcttacttcgagaggcatgtggggttgttattgcgctcgccgcaagcaaagatctgagcacgatattgtgagcatgttctcagagctaagttatgactttgcaacccataatctaaatgggttggggtagcaacaagattttgtgagtaagttagtggtgcctggaattgtactaggtgccccaccagcttggggagcaacaggatgcaagcctctgggaaattgtatcccagacgtaaacccaggtcctttggtaggataataagcttccaaaatttttaatttgcgcttcttccaagttaatgtatttctgagcccttttttaaaagtcttgtaggatagccgcaccttcttgctggagctcattctagaaagggttcccatccagattcttgcctgcagcatggccaattgtgtttatcgtcgactttctttatcttggagcctttttctttgaatctcttaatgaaattctttatggtctccaagggtagtttcttaatgttagttagggcactaacttcaaggtttatcttccttgtcgcgacgaactgtctccttaaattagtttgtaatttgccccaaaagtctacggaccctggttctagcttcttgaaccattcttttgcagatcctcccatagtgggaagcataaacactttgcatcaatactaaccctcaacactgtcatgaatttcttaaaacgagatagatgatcgcttagataagtgtctcctgtatacaatgccatctctagcactttgatgttttttgggagctctactttgagtacatttctggcacacggctcccggtcctcgcaatcagattctgagttgtcccctttttacctacatgagacttttgctattccttttggaggatagcgagttcaactgaaattccttcattgaggatgctcttcaaggctggagtgattttcctttggtcgagacgtgccctgaggtccccgtgtttggcattaagcttttgtcataaatcgattggaggatcccctttcacagaccctcttctttcccccaatttcttttccacagaaacacttcttcgatctccacggtcctaggggccagttctccctttaggaaatctaccccctgtggaccttttccttttgggagatcataacgaacattctgtggatcacgttattccctttaggtatcgtcgtggggttcgctctggaaggtggtcttttagaagggtacctgatggggataggctccctatccttttactttggttttttgtgggtcgtgaaggtccttctcctgccttctcgggcatgaatggcacaacagttgggtatacatgaatacctgtactgcaacctccattgttggtttcattgtgactaatgcctcttgcatccttttattttgctctctttgctctgctaactcggcgtcaagttcaacagctcatttccttaatgtaactagctatgtataattatcttctttgtatatttcgtaatcatttggaccttctgtatactcgatttccttagtatctccttcctcttcagcatccattctagaggccacaatcttattcttctggaggctttggagtgtcacgttggcatggtgggcatgaggtatttcttgttagcaccattatcgtacaaggttgattgtgattttttcttttagaaagcttcttacagctctcaatgaaagcaccaaaatattgacagagatttttggcaacaatttattcgaatcttgtagagtaattaatgcaaattaaagagaattatttttacgtggttggggcattaaaaagtcttagtccatgagtcatttttatttcaggcttgtgttatctagaacaaatgctttgcccctttcccctacatctttgaggtatttataagctcataataatggaaaaaaggtcactattgttgtgcttgtatgatccatactttgcacaattttccaggcttgattatagggcacgatcacctattctgtaatgatgtgtctgggcttgatatatgcatttggtgagactagacttgtctcaactaataatttgacaattcacaatgtagccgtcaaatgaggcataagatatcgtgaagtcaaagaatgattagtttaaacccttaagcatgtcgtccacatcaaagagtaagtttttcttccccatgctacattaaattcgtgcacagtaacttagccttgggccacacgccatatttcgtacaataccactatctcttctccgagaggagcctccttgtagagtgaaagagacaactcaactattctcctggggttccttttagagatgactaatctcccgaaatttttcttgattactatgctgacaatataatttattataacatgtcccgtaatgatggtcccatcgccacatggcttctttcaggagcgccacgtattttgacaagaaattcaggcaacataaccacttagtaaaaatataaaaatcatacataacaaataaagattgacatgataatgaatatattaaacatgaggattgctactgtcaacatcttattacaacttcttggctaacctctgtgcccgaaaacacatgccaattttttttt

SEQ ID NO: 185807 - DNA, 2027 bp, Cannabis indica
catgtcactgccattgctgataggtatcacgtactttctgaaaaattggaatacagaaatagcagtcaaaatttatttgatctaaccatgcatacatattgattcaattagtagatgttatttttccaatcactataaccttatagcaatcagcaagttttttttctaaagcttatataaaccacacattatttttcattaaaaaaataatataattttgattatcataaaataatgaaataaatactttaaaagttttttaatggtgcaataattttaaatatataaaaatatttgaatttaaaagtaaattttttttatatatagtttaattattcatataacataatagtcatgtcttttaattttttttttcggtagcaaaaaagaaaaaaatcttacttctcttaaatttataatgaatgaataataaataataagttagagataagtattgtactaagttttttgaatgctgaaaaataaatgatccccatttttacttccaaatcataaagcaacaaatttaggtatgatgtagaaaatacaaatgagtacattatatataagtacaaatatatgtattaattaaaaacaattttcactttcatgggaaagtgataaacgaggagaaagttgggaagagacatttcttacttaagacaattgcgtctccttgttcgagtctccaaaaatcaacactagagaatttcaggtagagatgtagcaaatgtgcataattatatatataaatatatatatgtataaacaactcgtaagaattggggtttagcttgttaattacatcaagtactatacatcagcccaatgatgtcacctatatatcaatttccaggaagaaaagaacaaagaaaaaaaaagaaagaaagaacaccacctatatatattaaaaaattataaaccattggctggttatcttaagcaactcattaacatggagtaaaaaggcaaattgatcaactttgtatacatataaattacttttcatcctagtactcttcaaattattatttgcatgtttacacctgatacgttcgtgattcgtgcatttatattttgagtttaggtttttccttcttttcttaaccatctacaatattaatttttaatcctatactcttcaaagattgatttttatctttctgttcatgcatggtgaattattgggacagggtttggtacttctggacacttcaactacaataaatttctagtacaaaaggataatttatatagaataatgggtactttttctttagaataattaaaaggaatagtcatatataacaacaaactaaataagtggaggggtgacccccaaccaaaggcaagcttcttccacctttaatgcaaatttcgccaatccatgagcaagaaaattagatgtacgcttgacatgtgaaatactcacactaaggaaaaatgaaagaaaactagtaacatttataattaagtcttgaaaagaagaaattgcagtagaaagagtgcgtaaagcattaacaaaaaggagagcatttgattcaaaatctgtaataggaagtcgccattgagatgcccaatttaaactgtgaaataaggctttagcttccatctcatgagaggtaaaatttttaattattggcattaagagggctgctgcaacctgactgagagaatcacatacaatagcacgaactccattcttgttaacatccaccgctgcatcgacattaaactttaaaagataggcggctgccatggaggaggagattcagcagtaggaggtattctatcatcaacagtatttggcgagtgatatttacttctgacagcttgagaattatggatgtaattactagcaaaagctgcaacatccatagctggtttggctttatggccatgaattacccgattccatttcgtccaaatcgaccatagggtacaaatgatgtgttccatttcagatttcgagtaaacagatgataggtgaaccaaataatcgcctttcctcattgtagctgatcgta

SEQ ID NO: 185808 - DNA, 3017 bp, Cannabis indica
aactatggctcaaagatggcgatagtaataccaagtactttcataccacaactacttctaaaaaaataattttattcataagcttaaagatgaaaatagtagttaggtagaatggagtcatgggcttgtttacttttctaatatctttcaagcagcaaccaattcaaatgggaatgaagttgttgattgcatttttccttctgtttcgcagattctcaaaaccaggagcttttaaagtcggtcactgctaaggaagttaaagcgactcttttagatatgaatcctaataaatctttagatccggatgggatgactttggcattctatcaaaagagttggtctatatttggagaggatgtggtgtctatggtcaaaaattttatttcatctggggttattttgcctggtctaaatgaaagaaatttagtctttattccgaagaaaaagaatcctacagggatggatgatcttcgtccaatcgctttatgtaatgtcctatacaaaattatttctaaagtaattgtgagtagattgaaaggttgcttgaccaaattgttctccataaaagagtgctttcattccagggcggttcatctcgaataatattttggcctcctttgaagtcttgcattactttaagaggaaatctcaggggaagaaaggtttcatggagcttaagctcgatcatgagcaaggcctatgatagaattgaatggacatttctggaagaaattcttttgaagatgggttttcactggaattgggttgctctgattcttagtagtgtgcaatctgtgcaatatcatattattcatggaggttagcagtttggtcccatcgttccaactcgtggtattcatcaaggcgaccctttatcttagtacttatttattctttgtgtagaagatttctcggcactattttgatggcatgagagtaacaagttgacttatgggtgtaaaattgctcgaggggcaccctccatctctcatgtgttattttcagatgatagctacttgtattgtcaggctactaagattgaagctttcaatataatgactcttttggggaaatttgagtttgcctccggccaaaaagttaacttggctaaatcttttatcttctttagttctgatactgaagaggttatgagggatagattatgaggatcactagtatggtacaggcagataataaaagtatgtacttaggacttcctagtactatgggaaggataagtctggctgttgggttttttgaaggatcgtgtgctgaaaaaggtggatagttgggatggtaagatgttgtctcgggctggcaaagaagtcttgattaaaatagttgcccaagctttgtctagttatgcgatgagtgtttttcttttgaagccttcatgatcataatttagccatgttgggtaagcaaggttagcaccttttagttaacaaaacttcattggttggtcgcatttttgaagctcagtactatcctcatggttctttactttcagcaagcatcatgaataatcctagttatgtctggcgtagcatttttgaaagttagtctttgattaaagcgggtttttggtggagtaaaacaagtggctcactagtggatgttttgcatcaactgtgacttatggacaaagacaacccgtatgtttcttcctctcacccaactttgataggaactaaagtctctcagttaatgcaattgagtttgagacagtgggatgaggagttactaaatgatttatttgatgaaactgataaggagcttatctgttctattgtgattagtgcttcagcaacccatgatactcattattggtactatgaagctttgggactattcggttaaaaatgcatataaacttctccaagttataaatggtcgttggtccagtgtcactaactttagtctatggaggatttggagtttgaaaatttcagcgaaggtctctgttttcttgtggcgtccttgttgtaacaacctaccaactaatgtcaatctgattgggaaacatgttgatgtccctgctgtgtattccttttttgtcagactgaaagggaagctgtggaccatgttcttgtggattgtgcatttgctcacctatactggtctcattttgatggaggtattctatgtattgttggagctccgtttttagactagttttcttcgcttttggtagtatttccctcttcggtccttggtcatgttggtgttgtttgctaggccttttggaaggtgagaattgaggttatgtgggataacaagaacccattagcaaggggttatagtgcattctattgttgctttctttaacaaatgaaaaaaaatgcaaaatctcatgttgttgagagtgattctcctcctggtgttgtcactgatcagcgataggaacctccaagtgttaatacagttaaagttaatgtggatgcctcagtatttgctttaagaggacatattggcttcggttggttggcaagggaccatgttggaagggtgctccatgctactgctatgttgcagcagggtttctttgaacctttaattgcagaatccattggccttaaggaagtgttgagcgggatgaagactacaaattatgatgaagttgtgttgaaaacggattatcaagtgcttgtcaacgctattcacattacagtaacaatgtcatctccctttggtttacctgatgctgattgtaagttgctactcaatggattaagtcatgtttcttttcattttgttaagcaatccgcgaacaacgtctctaatttttcggctaggcatgcttgtttatactccggtcgtagttatagtcgggggcttgaccctactgatttgcaagctattatcatagctaatttgctttaataaaagattacttttcttaaaaaaaaaaaaaagacataactattcttatatataggtatacatttaaataagggacttaaaatgtataactaattacaatttataattaattcaaattgggacttgattttttt

SEQ ID NO: 185809 - DNA, 5580 bp, Cannabis indica
gtaaaattacttagtacaatatatatatatatatatatatatataactagtaaaaagttatgtgcgaggcacatatactaaattttatgctagatattttttattttatttagaagtgataaattaattaataattgaagaaaaaaaattctaaaaaaataataattgaagaaaaaatattattaattattaggtgagattataatataatatatgatacacatatacattctaaatcgagaaatctttcctcatgtctctttacttttgaattgtgaatccaaataattacaaacaataagtactgtacattataaattgggtctggggtgttagcttttgcatgagactagaaaaagtttgttatttactgcgatgcctcaagatatatagggtctgcggtgcgttctaatacaagttgaaagggtcattgcttatgcttcttgctagttgaaggagttaacgttacccaactcatgatttggaactcattgcagtggtgtttgcactaaagatttggcaatattatctttacggggagaaatacgacatctatactaaccataagagttacaagtatttctttattcggaaagatttgaatatgagacaaacatagtggttagaattagttgaagattatgattgcaagactttatatcatcctagaaaagtcagcgtagtagcaaacactttgagtagaaaaggtcccaggcaagatttctgttccaaaatgatctctccttagctagaaatagatatgatcaaggcatgtattgagtttgtggttgacagactcaataatttgactcttcaatccaatttgctggaaataatttgatttgtgcaattagaagattttgagttaattaagttttgagaggacgtgttagctggtcaggctaaagacttgtcagcctcggatagtggaatgttactttacaagacttgagtttgtgtttttggcaacattgagcttagaaaagagattttagatgaagctcacacaactccatactaattgcactctggtaccaccaagatgtattaggatgtgaagccttactattggtggtgcagtatgaaaaaggatgtagtggattacgtatccaagtgcttaacttgttaactgatcaaaactgaacatcagaaacctgcagggttactaaatcttttggtgcttcccaaatggaaattggaggattttacaatggattttgtagttggtttccctaggaccatgggaatgtatgattcagtttggtttatagtggatcatttcataaaattaatacattttctgccagtaaagataatatatacagtggactagtatgcaaagttttatgtgaaagagatagtacgtttccatggagctccgaagtccattgtttcaaattgtcaatcagaacacgttcgcctccttcatcagcgatctcaactgtttgagtaggataggcccttcagttgaagatgtagttgctaagattgtatccacgaacaccagggaccacctgagagcgccataacacatagttggaccagtcaagtttctcagagatcactgtgcccattgtcgactgaaaagccacttgaagatgggaggcacgagctccaacattagaggagctagttgggcctattgaagaagatgatacgtgagttgccatgagacctgagctttgattcaaagtttgaacttaaagagaaagagagatgaattgtaaagagggtttagagatgcaacctctaatcgattgattcagagagtcaatcttgaattgaatttatagaagagagtaacacacgcacaagtggtgttctaacagcttcctaaaactcagagaattagttagaaaccattacattacaagttggaaatagactcagctaactaacaactacaatcaactgaagcctaactaatcttgacagctaatataactatattctagaacctctaaaagcactcccaacaactcctttaaaactagtttttctttaaaatgaagaagagaagaggtgaaaaaatgtgaaaataatggtccaacaagtgatgtattttaaagaacaatataaagaatgtaatagtgcttctctacatgtagagaagcactattcattcttcaaaaatattttaataatatataaatagtattttattcttattttgttatctttattaaatatatatattaaaaattattatttaaatgatatagagaaaaaattatagagaagttgttgtatgatataatgtaaaagtttgatgtaaaataaaaaagtaaaattttagtaatgtattttaaagaatagagtgggagtactataaggcttctctctaggtagcttcaatcgaaacacactatcatcattgaaattattgtcattaattaagaaattgaagtttataatacatcgaaccaaaaatttagatatatcatttagtaaaagagtctgaatcaattattacaattaaatgagctccaaaaactaaaaaaaaatgtatatactcatacatgaacaaaataatttagttgctttatatatgcgtaattccttatgaagtttaacatatatatataaatgggaaattttctatggctttctagtttgattctcccaatattgtttctcccaggagctcactttttcaataatattagcatttttccgaagaagtgaatatgaagacgaaggatcataggaaggagccatggtacacggggcactatccgcagaactattcaccattgattcaatcatgaagtccttatttcgtcctgtagctgtgcatgccatagactctgaacatatttcaatagctttttcaggtattgttggctcatattgtaagagcttggcatattcatttagagcatgaaacatgtaatcgtatacattgtccatttttaattccttttggataaatccacttgttctctttcccatttcttgtgcctataataattaaacacaataataagaaaaaaaatatatctcagagtagattattgattttgatcaaacacctaaaaaattcattataatagagtaaattaatttgaacttatattttaaggaaaattatgcaagaattatgagctagtatttacctctttctggtgagagttagcccaatcaacagcaaacttaatggatcgacatttatcgttatcctttatgggccaataatggtgcaatggtatcaaacctcgactgaagaaatcaaagaaacgtggcttcactattaatggaacagagtcacatgcaagaatgtatttctcactaacagaccaagcagctccttctatgtaaatcttgtacctgaaattagtacaagtacataaattatttgaatagataataaaatgaaattaatcagagcaataaaaattgagatggatgtacttatgagtgcattggtctgccaaatttgattgtctgtacccttgtctttgttctcgtttccagtcctataataatagaacttattaatatatatagtatagacatgcatgaatgaactagtaatattcaattcttcttttattgttcatgatcatcgacttaagtaactaaaattaataacaattaaaatcatgcaataaaataacaaaaaaattacaaaaatattgctcaccacctggacataaagacgagcattccagtcttgtttaggagagacattacatttaagaagatcttttcttgtggcagcaactttgggatttcctttccaataagcataaggttctttgtcttcccatttcttcttattgttaccttcttttatctgcttcaataatggtatccatggccttatgtttacctcaggcctacacaaacaaggatataagaccaaaatatctatacatatatatataattaaagaattataaggtgaaaaaaaaaggaaaaaaaaaagtagagatatatcttaccaaccccaaaaagaccaatcagggaagataatatcaagtgtatttttatctttgcagtaattaaaaactggaggtattgacgtggcattgggcccaataaatgctcttgacataacaactggtgggtccccacaattgaacatgaggtccaagtcaggaattttacctgggtacttccgtagcaactgtaggataccccatatcgtaaaaatatctctggtctgaaatgactttctataggtctctaggtaaaccttgccttttagtatcaccaatctaaagttggccaatcccatattctttgctttctctaccatttcccttgagatacctgtctgggcccagggcctcagatcttcgtgaatccatcgaaagaattctggacacgtggcagacgatggacggtcgagatcttcttcagggttgtaagtggcgggatagtttgaagggcaagttcttattgtaagattgtaagcagagcagttgagtgggatttcaattttcggacgaggtgttttggggttcttttgagtgtatttgtgggacttaatagcatttagaagatcctgacatgatcaaaacgtaatgacacaagaaaaatcaaggtaagcctaaatataattgcatttgaaggttttgaacactgacttcgttcaaaatagtaaaatagtatatagattagagaaatggtaatcatactaatggtgattacaaaaataccaattttatttacaaaaatacaaagaccaactttgtttacaaaaatagggattacaagtttgtaagcaactttcacatgtttttaaagagcttttgcatatatgtaaacaacttttaacatgtatattaacattttttttaaaagatataatgcaaaatataatttttttcacttttaatttgcgagaggactgaagaaaaagatgtaaaaagaaatggctaattagtaattttttcccccgaactttgacatgtactaaatcatgcaccctgaacttttttggcggttaaaaatttccctgaactattgagattgttagatttaaagacttttgtgtaattttagtaaaaaaattttaacatggatgaaagttcaaggggcatgatttagtttatatcaaagtttgaggggcatgatatgctaaatatcaaagtctgaggagtatggtttagtacataaacaatcactgaaacagtaaaattgaataaaattagacaaaactttttaaatttaacaatctcaaaagttcggagggaatttttaacagcaaaaaaagttcaggggacacgatttggtacatatcaaaaatttagggaaaaaaattactaattaacccaaagaaattagagggtatgtatgtatagtaaggacaaatctatatttattttaaaataactattttttacaaactaattaagacatatgtgtaagacattaataaaaaaattaaattgcaaaacaatcattagatttgaggaggcaattatattgtcccctcttgactttagtacgtaggtcctccaatgcattccagtaattgaaattagtgtaatagtgataaatacatttttagtttttatactaaaatatttatacatatttatgtgattttgttatatcatcgatcaacccata

SEQ ID NO: 185810 - DNA, 2119 bp, Cannabis indica
acattgaatttgaattgtattgttcaaaaaaatatccacactgctgaaactgttctatttcttcaaaaggattatcatcaatcaaacttcttctggtttaagtatagagaggaatatacactcttctgttttatgctgctgctgcattgctgtaaacaaagttgaattgtcaaaatctattcacaactcctcatcgaatgcgggtcaaatgaccagcaaaaggctctgtggcttcctgctgctgaagctactgtgcaaccatccgggctactgaaaacacatagaccaaatatgctcggttcagaatctgtttaccaggtaaaaaaaagttgaatactttgtataaaaatcattaatttacctgagccatgtaaagaactctagaggtatggccattaagctcagccatcttaaccatcgacgggtacttccatagagtgagctgattctgagtaaacccgtgagagctaagaagctctcgctcgttcttgttccataacaaagcgcatacttgagacccggtgtcaactgagttgaggcacgcaccggtgtgtgtgttccagaatttgatggtacgatcgctcccacctccaccggttgccaataagttgctttggaatggacaccaggcaagagctttaacagcagaagtgtgatccgacagcctgtgaagccattgagtggctgaattcgatgaagcggttgacctatcccatatgtgaattaggttatcgttcccaccactagctagctgctggcccgaacctgaccatttaagcccacaaacctcttggtcgtggcctcggtaagtttccacaatgtgtgatcggattctcacgtcgttgttgatgattcgaccgtccattcctccagtggtgaggatgtgattgttccatgcgagtgaaccaaccctagctcggtgtccacctttcagagttctcagctgaaaaaacaataatacaccacagcacaattagataatcgaaacaaatagggaaataaaaaagaaaataaaggcgtttcaaaagatgtacctgtttgtttgaagccgagtcccacagctgcacttcggaattgttaagtccaacagcgatatgccttccatcaggagcccagctaacacttgtaacagggccactttcatcatcaaatgtaacaagttccgaagtagagccttctgtagcgtcccacagataaactgtgcttcctaaagcaattgccagcacatttgcgcttccccaatccaagagattcaagtagtaatcgtctacaagatcaggagcatccaatgtcctttcggaagactgcatcacacacaaccaaattaaattaagcatataacttaacaacatcagtataagattgaatacaagaacaagaacaagaactccacctgaggaatgtggcgcctgggtttcgctgctctctccaccggtgcagaagcaaactcacaagggaatttctcaactggggcaggaggtttgttcttgaaagctaagatccgacctcggttcatgttgaaggtttctgccaaatgcttcttgtaggcttctcttgctggagatgaacttaccgggctttccttaacctttcttccctcggtcagcatgtagtgagcataatcgaaatccattgctgacctgtttgggatgaacctgtccagctgataatcacaaagagaaaccaatcaatagaagttcaaacataaaacaaaacaccttaatactataaagatcaatgaagctaaaaagcaagaaccccaaaattgaaattacgagaatatgatttcaaagaccacaatatcaaaaaatcaataaattcccaaattaaaacattcaaaattatttcagaccccaatcaatcaagattattaaaaaaaccctaaaaatattcaaatttcttattccacaatcaaaaccctaaaaacccaaattgcagtacccttttagcgatttcgaacaaaactaaaaaaacccagtgatgattatcacgaaaaaatccaaattgcagaaccctttcagcgatttcaaataaaactaaaaaaaaaaacccaagtaaagatgatgatcaagaattgatatgcttacattttctcgagaactttttctatgaagaaact

SEQ ID NO: 185811 - DNA, 3051 bp, Cannabis indica
gcacttgctttgcgtttatcttcattaagaaaaagaagatgagcacgaggatgtgaagataagaaagtatagatcttacagtaaagaaacagataaaagtagtagtcatatacttgtctttactgttgcaatcttcccattgctcttcaaagtggcacgagaaggaggcaaaaaaatgctacggaattttttcagcttatcgtgcatgcactgaccagatgcacactagaaagtaaacaactttgttatttcctgagacacttcaaaatcaaagcaaatattgaatattatatatgtgaaattggaatttaccagcaaggctccatatacacgccaagcttcatgcctcttcatcttgtccttttgcttctcgagtagcatttctggttcaagaagctgcatgtatggctcgagatttggtagaacaagcagtcgaacctgtgcagtgcaatgttggaaagcattagaaattgcacagactacactctaaagcatgtcaaaatataagacagaaggatgaaacacagctgctgatgtttcaaaatataagtggccacatataaaaaggatttcagtaaaccaataaagattttacaataatgcatattttaatgtgttcgtcaaaaaacaataccacacttggaccaagagctgctagaccttggatagctccatattgctgaggtaatgcttttgttgggtccaggaaagcatgaagcagagttctagtcacgcgcgactgcagattgtgataaacgtgcccaaatctgtttgaagaacaaaagaaatactatttcacatagttaaaggaaacaaaagctgacggttatgatataatctgaaccaaatattcaaataacaataataaaaaaaaaaatacttctactatatacttcttgaagttgaaaatttcatacatccgaaaatataattattgcagatttatttattaaacataaacataataagaattatgttttatagtaaattcagaagttataaacttgtaatccagtcactattcaccaaaacccaaaagaaaggtttgaccttttgcaaattgaagcaatcaggtttgcagcaaagtttctcagctcccaatgattatcagaaaccctattcccaagtcttttagcaacaaggcatgtgactacagatggcattaactggtgaagctgaaaataaagtcaagtggtctcttttttagagtacgcaacaatagctcatcattgatggtcaatgatttgtaatctaggcatcctatcaaagtaaaaaaaagaaaaaaaaaaaaaaaaaaaaaaaaacaaaaaaaaaaaaaaaagaagccacaattgacttataaaattatagtctccattagagatttcttacaacaggaaatgaaattcactagaatataaagtaagaaacaccattaatggtaattcttaacatgcccgtaatatatatatatataataagggtacatttttagacatgaaagcttaataggatattctctattaatttttggttgataatttaagagggactgactgattgggttgagtcctttcactgaagcttgaggtttctcatcctgaaatggaaaacatatatatttaaatagatgagcattaattaggattatataatattatatatatagccgaacaagaaagatatatagtttgtttgatactcatgatcatattggtcattctagatataatttgcgtgagtacgtaagaaaagatgaacataaaaaagaagctcaatcatattaacttacgccggcaggttcgtaagatatatatactatttattgaggcattgttctgctaaagttgaagaatatactagctattagagtcaaagtcttggagaatcttggagcataaagtataatttagatatgattttactgaaaggtacttttacgttctttaagacctactacatcgatgtaaattgaaaatggatttaaataacttaaaaatctggctttgaggcatgcatattcaagtaccataaaaggctaagttagtcaagagaaagtgtccttttttacggtagatatggcattaagtatgtgtgaaaagtgtggtgcttttaaagccatcgtggttaaataatattattttccgaatatggtaaaataataggcagtatataaatgtgttatgtttaggtccatggaattaaggttggaaactagtacctcttttcatcttcgtttgtgctgccttgggtactccctccagttgtcctatagtttgggaatgggacttggcctgactcaatatgcttgacatcttccacaaggagttcatagtgccttttcacttcctccggggtcttacccccaactgccttcgcaacattgtaccaacggtcaggggtgtccttgtcatacacagctaaagccttctcaaaagctttgttctgtttcacagtccaagagccacgagatgatattgaactagatgccattattactgaaatttggtgttaattatagggactgatgattcagcaatgaaatcaacaaatggtctagtgtaagttaattcacagaagcaaaagcagttttcgaagttggaataagaagaagaaactaaataaaacaggtgaagagaagaaaaagcttatatattgagaagagtgacaaaggtaatgaagagatatgaagactcaatcaagtccagggttgatgagcaaagaagtatgagtgcatgctttataagcgggagaagagcaagggaaggtggggtagcactattggcaacaaaaaatggactaaaatttaaatgatgtgtatacttaggaaccacaaaatgaaggaggacaattgtgaagaagaagaatataggagaatcagtactatcaagaattgttatgattaatatataaataatgtaatatgattatactattcatcatctcgtggcattataactaattaagccatgaagattaaaacagtatatatatgatgatagattctatatatacgtcaaaacactgatatctaaaaactaaaaagtggtggcttataactatgaactaatt

SEQ ID NO: 185812 - DNA, 1911 bp, Cannabis indica
aattatgcataagataaagtattttgttataaaagtttttagcaaaattatcatcataaattgaatttctgaactcagaaatacacaaaggaattggagattgagatcaaaggtaacaaggatatcagcttaactcctttgttcaagtcaatagaggagcttagaaaagctgccaccataataaacaaccagagaaaggtactaccactggttaaagttttatgatagtgcatgaaatgggcattgtcacgtattgaaaatgtgatttctctcaaggcagtggtagaaaacaaaggttggaaatccatatggaggaaagatcaatccaagctgagagagcttaatgacagactcatgatggctgaacgagcatttacagaccgagatggacttttagaaaggtcatggtataagcacttggtaagtttcttctatatttgctcttttcacattttccaactagtgcattttacttgagaaaagaattgactttggttggcaatggtaggtttatggaccttccaagtatgatgactatggatctaaatcctttcctggcattgatgatgctgttgaaatggcaaacaaattgaacacagctgagtcttggaaactagctcaacatgaaatttggagggtctccagagctgtcaagcaagcctcgcaggttcttaacggtgtactcacatgagaatgtatgcgtttatattggcagcatgttttgcctctttttggtgaaataggaaacatgttatgtattataagatttgttttatgtattagattatgtagttagacttggtttgatgtatttatactaataatgattaaaaactttccaatgtccactcattccatcccatccattgatctgacggttgcagttgaacgaaaatgcagagaatcaggtttctcccttaaaatgatttcgtgtgttcataggtggtgtggttagagaaatggtttaatacataaataaataacaccacaatataatttagtgtgaaggataatcaagtaaaatcatattgacaatcgtatacacatgagttggaatggcgtcacgctcccacaaaatgaagcaatataacgagaggatttttataaataataaaaaatgtaaaaacctatatccttccaaactgtacaaaatgagctaaataaaatatgcccatatagttgatatgaggtatatttgtgcctaatcaaaagctttattagaggcgagatatatatatgtacaacttcaactgactaaattatatacacgaggtcaaataagacttatacagtttgtttattcacttccagaccttgatagctccatctctactgcttgatattaagagtctttgattgagtttgacagaagccaatgagagaatggaatcacgatgacagccagcagtatcagtagcagcagcagtcagaactgtcttggctgagttcttacctgctgaaggaagtcgtctctttttctcctgctcgacacaaaagaaatattgaattcagcatcatgcattaatagtgaataagttcaagggaactgctacataaaaaattcaatttctcttacaaaatcaaaacgtagataaagagcctaccaagaacatggaataaatttgtaatttgtatagtaggaattaaaaagagctaacaggggaaatatatgtaaaggtattactaaatattagcagcaaagcagtggattgtgtatgtactacatgaaaattacactatctactaacctaacaaacttaaaaagatcctcaagtaagaagccctattcatctacatacctgtacaatttgcgccccaaaattagaacttgttttaaagaattcatcattcacaacttcatttccatttggcccacatacagagtaacttcgatcaggactgcaaaattta

SEQ ID NO: 185813 - DNA, 2342 bp, Cannabis indica
gttaaacgtagaactgtaattataacttttaacatgtctccaggtccccattttattttctaagacatggtataagtttattaaataaaaatttaacatgatgatgatcctcagaacatatgagtctccaaatgatatagtaaaagaagataaaaaaaaaaaaaagaacaccaccacaacaccaccatagtgctaaacagcttcagcaaaacccactttgagatcaccatagtcaaacactgtgtgatacactcccataaacacatctccaagaatcctgcaacacaaatcatataattatataaaaaaaatgcacataaacattatttggaaaatggggtgaagaaagatgattaataccatagtggaccagttgggggaggcacatcaaaagctgaaaacccactgatgcagactgaagaaatgccttctccagtcttcaaaatgtactgaaaaaccaaaacaattgaaatgagtcactcctttagtagtttaagggtaaccccatattaaaaaatcatgtcttttcttttgagctttgacttagtagactaacctgttcaggagtgatagggaaagattttcctcctattgtgaatgtaatgttaggcatgtttgaaatgctgttgcagttaattactgattccccagctgggcttggcaagctctcacaaagctgttgatatcaaagatacaaaatcttatattattcaacaactttgagtacatatcagaagccttaattgcagtagtcatagtcttgaagtaagtccttttacctcattaatgtagtggatcactttttctttggttcccttctgttttagctgattttgagcccaaataacagccatctcacaaactgtgcataaagcaggatcttttgctgaaactccctcctccctattctccttatcaaccattgtttcgatcccggtactgcacaccacagcagttaacttgtcacttacaatcatttaagtgagttgagagaaaaataacaatcattatgagaaaatataatgaaacttcatcggaagattatttgcaatgagaaactttcagaccttacatactcagccccattgaacaagcacaaaccaagctgagcacaaactttatcaggtcgtacctgcaaatcagggtatgattgaattaggccaatcttttgatatgcctaaatgaagtttaaagatttgaagaagcaagaaatacacaccccagagatcagtagattccatatgatgtctccatattgtgaaacaactaacttgcattctgtgctgactactcccttggctcctatagcatggttgatctcagccacaatagtctgatcgatacatgaccaagaaagaaagaaaactgagtattcttttgagtgtcatatttttcgtattggaaagattggagtacatactgttggaccagcaagcaaggacgttcctgaatcgacaatggcaccacatcctccctcacaaacacctgagaaaaacaatcattagtttactctaagtatatgattctgttatcttaatactcaatcaaacaacatgatcatgaaatcacctgttgactggttcccaaccaaaatatcacccatttcgatctgaaaagaagaaaatagtgagtgatgattagtgctgtttttcaatcttacaagagaaaatgcaatgtaacacaaaattgttgatttgacttacttgccaataaccctttttagtaactggaacataagtatgtttccccttaaaatggtttttatcaactcctccaagaacaagttcacctcccatctttgctgatggatcgcggttaaaccagaatgagaagacttcttcacttacaaggtcttgttgcaccatgttgtacctgtaatactctagtaaaaatcaatatatcctttcacacataccagcttttagaattactattattattgttattgaaaaatttaaggcaagaatatgaatggaaaacttgtttaccaaactggtgtaacatttgcaactgatatttcctgaaagccaagtccaaatattccatcaaacttggccaccaagaaagtgagactcccctctctagtggcctcaatgaaaacctgaaagttgagaataaataaatcaacaaacattaataagattgattatttcaaaagaaaagtgagcaaaaacctcacctggtcttttacaacaacatctccaacttgaacattgtcttggcttaaaaaaccagatattgatccagaaccatagtttatttcacaagattttcctacatgacatgccaagaattgattagtagtgtatttagtctagctaaatactattttagactctgtg

SEQ ID NO: 185814 - DNA, 2088 bp, Cannabis indica
gttttgaactgcccatggcatagagacgttgttggattgagtactttgaggttcagagccgctatagaccttaataaacccatctttgctggtttttcctcagaagacaaaagctgaaagacctgtggatacaatacaaatacgaaaaacttcccaaggtttgcttcaaatgcgggctcttcacacatgatcagaggacttgcttcaaagcacccactgtggttaaggacgaccaggggaatttctatccactatttggtacatggttgaagaaggatgcccaggataagtcgccgttcacatctccattggcaaagtggttccaagactgggtcctgcaaaaaaggttggggagggaccccatcctacgcaatcaggtgaaggcccaaaaggcaatcaaacacgggggtgagacagaattgagggagtgtcgaatgcaatttcctacaaaaagaagaattgtcaccgactccgacgatgaaaatggtgacccagcggcagaggaagtcattacccaactaccacttgtttacctccaaggcattggagaatttgccttttttggcaataactccaaaagggccatgatcagtgaccttattgaggcagctgcagaaaactcaaaaagtaaggcaaaaaacaaagctcaaaggggggatgaatttgaactatatattaaccaaaaaggggaccatgagcccgaaaaggcagtaagtggaagagaacttcccaactcggagggagacaacaagtgtacaaaggccaacataatgtttaatcccaatatggtagaggtgagcgtgaccgaccccactactcaaattttcgtttctgcagcatgcaaggagcaaatgtcagttttcagtcaaaaagaatctcaaggaagcccctcaacaccctataaggcctccccattaggctctcaagcccaaattattcaatggccaagcaaggaatgttgggctcagccaaaagctagggaattgcttatgggttctctcacagtggacaaattccaaagggaaccaaccttattcaacccaattacaaatattgaagactttagagtccaagaacatctcaatggcccatgcaagaggaaagcctctgatggtttcattttcagtcccccaacggcagaatctaaacctgcatcacaaggagatgttgatgaacaagtgagtaaagataatatcaatctccatgatgttactcactccaattgccactcctcagatataagtcccacagtaccactcgatccaactccttttaatctgggaagcaacaacaatagaagctcctccaaacacaggggaaaacccaagaaacagagcaacccaagtcatgcaggaggagtgacaccaaaaaagagaggaagaccgccaaaatctcaattgggtatgtcaaccactcctaagccattcaaatggaggaactcatccaagtcagcgaaaggaattggagctacaattactaatctttgggaaagaaaatcgtttgatcttaaggttgaccttgataaccactttgtagggattgaaaaatcggctttaacaaacacaaggtgtacaataagagaactaaatgatgtcaatcctggaggccaaccatcccaacaaccacatgagagtgtggatttttgctttggggctatggagacttgcccacaatagtctccacagtcgccatgaggatattggcatggagctatcgtggcctcgggaattccacgacagttcggcaattggcgacccttgtccgtcaacaccaacccgagatgttactgatatcggaggcccgtgtccctccaagcaagtttcaaagtctttgtaatcgcctgaagtttgtaaacagccactacattcctctagtgggtctatcgggtggatttggcttatgctggatgcaaggagtgctttgcaacataatctcaactaacaagttcttgatacaaggggaaatctcttcagaccccccaggagaaatttggcacttctttggtatgtacggtccgcctcatgaaagggataaagaatctcaatggagtaccattggagagatggccctttccaatcaagtgccaac

SEQ ID NO: 185815 - DNA, 4067 bp, Cannabis indica
taaaccctagaaatcaacaagaataagaagagcttacctcaaagtatgaacaactattagaattggtgacttcatctagagaatgattaaataagagatgaatattctcttattttaagaaagagttatgtgattttttcttagtttgatctttgttgaatattcttaattatttaatctaataaacctaaacttaataattaaaaaaattaattagcctaaagttactagaacatgaagacaaaaattaaaaccttagcaaaaagattattttaccctccattaaatacttaagctaatttataacctaggggtattttggtcaatactagataccccaactaaacttacaactcaacatactaaaccagtccggtacaataccaataaaactcaatctattgtcgtcgtgacacctttggccaatctagtttccacggtcgctgaatccaaaaatattttatttcaaaaatagtatatataatacccacatgttctaataaaatctctataattaataaattacactcaattatttatttactcaaaaatcactaattaactcataattagcttatgtaagattataatcttaccataatattcatataattatatatttaataaaatatgtccaataaaacataatttatattttttgggatattacaattcatctctctctttggcatgtttccccatagtctgcttctagggcatactcctgtagctactgtgatctgagttcatctttggacactttttctacttcggtaactttggcattaaagtgttgaaggtagttttgtaactttcttgttttctttatttcacattggtaatatttttgaaaggcataatgtaattacacgaggcctgatgttgtcgaaggaacttttttcaaatttcctttcaatatgtgattttccatacctcttgaaccactcatttgcagctcctttcaaagccatcgtgaagcattggtatgtagccttgctcaacaccttttcatcttcatcaactcaataaaagaactaagatgatactttggatcgattgtgctatcatagggtattattatgcctccttgaagatgggtggaagtggttctacttgaatctcccttgagaaaagggattcttcatcgaattcatcatcatctaggtctccaactgaggtagtatccatcttgtggcataggtcttgcatttccacttctaaatccttcatcattttcctcacctctctcggaggttagtgagtggaaccgtggtcctctttgtggttcatatgggattgtgtgaggtacttctcttgccccctctatgtgtgccttccaaccaaagttgaaggatggggcattatgtttgtctctctcttgtaatgaagccatcgatctcaggtgaatttttccctttaggttatggggtgtttcccctgagtgtgatcttatgagagagatagcttgggctatcccagttgacatgtaaggcacccatctagtgatatggatttcctaagatgatcttaattaaggagtatcattagtaaatatcatgaattccatcgtgaaaatgtatagttgattctcccttctcttgtcattttcctttgcacttgaagagtgaggaatagatttttccttcaagcataccattcaacaccttttgcatacacaccgttgttgtctttaccctttggttcttccaatggagattgtttatctccttttttatagcaacgagttcaggagctttgactttctaaatacatctgtgcatcctttctaaatctacacacagacatgtttggatcttgctcacggtgaggtggaatgagatactataagagtgacggtggtcatggcgatggtaccttatttgttaatggtttaataggtagtggtataatcctaatggagggaagtggtctagttggtggaacttggcggatgagtggtacacacttgcaaaagccctatcgcagggggtgatctcattggacgccttcagtggtggtgtcataagggaaaagacttcctcctctcctcgttgggcgtatttatcttgaagaccacgggtttttagtggtggtggatctttccttgaatcaactagctcaactccatacaattatacctatacttcactaagacacctcaaacatcgtgacatgtataaatggtgatgattttgtaggaaaaacatatttgaaccttacttttcccatagttggtgccaaactgttgataataagaactcaccaacagaattagagttagaaaatcatattgaatagtttgaaattaagaactatcaaaaaatattaagaaaactcaattaacaatggagaaaagctactattgcattgccttgtaaattcctcacaacaacatcattttttccactgactttccaatggaagaaggggctattggccttgatttacatgtggtctaaaagggaataaaatattactctaattgtacatctttggtaagaatgtaggtgggtaatggaggtagtggtggtcggatgtcaagctatactaacacctacaaattttgttctcaatactacttatagatccactacttgtacctagacttggcagatctgtggtggctcctccaacttgcccttattcatacaccattgtgccttatacattgtaccatgtgagtgtgtatgaagccaattggatggtttcggccttgggtatatggagtgaacacttaaaaaatatttcttagttattaggatttttgtataagtagtttttaccaagcaacgctattttattgcatcacttggtggtcttggtcaagtagaagtgagatctcttagatttatctatgagtgtatgtgacttgtatccctctttataaggggtgatgagataaggctcgggtctcttttactatttttcccatagtgaagtcatgtggtgcaaggtgagggccacctcgcatggccatggtgtgcaagaggcaataccacctcacatggccaagaggtgtgaggtgagaagggcctcacacgactttttggagcaaggtggtgacctcgcatggcctcgcacaatctcttggagagaggaggaagccccttagcttgggaattggatacgaggtgaaaccccctcccccacaagtgatcttggacacaaggtaggctcctctcgcttacggtatgattgtgaggtggagccccccttcaaggaggatcccccctcaaggtccatggaggccccacgctcaagatagaggcacactttgcattggatgactttgaaaataacctttaaaattctagtgtcagtaattccctatcgataaaaattatatccatagtaatcaacttttcattttccttagtattaaaagactcttatatcatacattatctaacaattttataaagtttttgtgttcaataacacttgaaaaaaccaacttaaggagccaacttatcgttagaagatgatgtctaaccaagacccaacaagacaaccaagaggtaataatcgcataaccacaattccatatttccacaccaactaatctataggtataaattagggctaaacatttgagtcgagtttggcccagacctgaactgtgaaacccaattattgaaaaaaaaacctatatagaacgggcgggtcgggttgaacccgttactaatgaatgagggggtacatgttagtatttttaaacactcacgtgtcgggttggacccaaaattactcattcttcctttatatattatgtatacatatcattaataataatataataaacatagataaaaaaaaattaaaaaaaacctaaatcgaatctcactcttgtcagatcagatctaatatatcgctcgcttttcctctctctatcagacacaaaaaaaactcagcctgacaagcccctttcgtttcaacttcgtctatactccaatcaggcaactcagcactccccacccttcattttgttcttctctctctttaaagtttgctctcgtgctcgctgcctcgcacaatcgctcgcaacctcgccgtccattgtcgactaa

SEQ ID NO: 185816 - DNA, 1868 bp, Cannabis indica
gaatctatcattgcaaaaaagataattaaattccttgacaaatacaataaagtaattagaaaacaaatggtaatctaatgatattttaatgaaaaagtagacttttcaaagttttgagctacttctcttcttatagtagcttattttttcttctatataaaaattaaattggcataacaaagacggatgctatatatagtctattcctatggtccacaattcaaatataacggtaactttactcaaaatctacctaccgtacctacctatatatatatttttcaagaatatttatttttagaatcataaaattaagtaacactatttttacactccaaagttcaaacggtcacattattatttgtaattttgtgccacttttatgctatgctgctgcccaccatgattcacttttaacatattacaatgccaatcatcaatattcaatataaacaaatgtaacaaaacaaatattccattcttttaaaaataaattcaattaatcaattaaataataaataaaattacaacaacatgaacataacataaaacattcgaaccaagtcttacattatttggtcggaaagtgatggtaatcgccggaaaaagttcatgggtagagagggcatatctccacgaaatctaggatgacgaaagtaataaaatccccatcccaacatgaacaccttaaacggcaccgcatagaacaccaaagatgccaccaagcaaaataccacaaatatccctgttgcccgaggatccctccaattgcacagagcttccaatctctccccttgggccgccacgtcacccaacaacgtttgggcccggcccgctaaggcccgtaacctatcgtacctgacccgaattatgtctggcgaccgactcgaaggaaacccgtcgaactcttcgtccagctcgtcctggcccaccgcctccacgtgggacaatctcgggtccatgttggctgggatcactcgacggtacctaaaacgaagggttaagatcaagaaggcgtacatgaatacggtggggagcaccagatgtgggcacagcactactgccacgagcaggacgtgcatgagaacagttgtgggcgtgtgaacccacgtgcgaatcccgtccagccagccggctaacgtagcggcgcgcgagaggcaccccaccacgcgaaaccaattggccttgcttcgcctcatgctccacacgtgcgtgtccgaatcgagcaagaactgaaccacttcttgccccaacggcggctccgagcgagccattcgcgccgtgacgattctcatagccgtgtggcggagaatgtcttgttgggccgggcccaagggcctgacgtagtgcattctgggcagcattgggctgctgtaagcttggatcaaattaaaccacgaggcgcatgagaatcgaacggctatttccacttcccccatttttttagcaccacctgggagcaacaccgtaagagaatatgaactcatgtacactcgattagtatcgagcgctgagagccgtacacgtatcttcccaatcctaagatctttaccctgtttccccgcttcgtcgcgcttgtaccttccattgtcaaaaacaccaatggtgagtacggtaaaagggtcgtaaacgtcccaagtgtactgctcgttccagcgtggattaaagcggtccaggatagtaacgggtgcggacccgacttcggtccgtacttttggccaccacgtaagcgtctgtagtgccacgtgtgccgtctttggtcttgacgggtaagagattagtggcacctcgtatcccaacttcctaataatccaatcggagctttggataatgttttgcagcggctctcacatcgctggtcacgtgcg

SEQ ID NO: 185817 - DNA, 4911 bp, Cannabis indica
tctcttattttctctcaacattaatcatttttttagccccttacaaattttgaaaaaaaaaaaaagaaaaaatctcaaaaggtcatataataacttgactttgctaatataattattaatttaattattttttccaaaaatgccaaattgtaaaatttggaatgatgggcttctattgtttaatattaggcccaaaactcaatatttttgaatgtgaaatacatatgaagaattataccatattattacaaataataaaaaaagtgtacaaaataatacattttaatatccaaacatcaccatctatttttttttaaaaaaaaaaaaaaaaaacaactagaatcaactaaaataaggttgagattttgatagactcttaaaatatcaaaactttaaattatgacactaaaacttattaatgttaacttgggttactactattacatcatattaacttaattgacaaacaaaaaataatacaaaatgacaataatggtaaagagtgaaaaaaaaaattaaagattacaaattaacaaaatggtaacataatgaaaatgcaagaaataacaaagaaaaaattgtggttgcagtacaaaattgtaacaacaatgataacatcaacaatagcaaaatgacataatattaggctaaaaaaacttaaaaagtaattaataaatgattaagtttaataaccaaatagtaaaaaccaagaaaaaaaatagtaactttaaattgttcttataaatataacaatttcaccttcaaatatagctatttaaaatatcaatcttgattcaaatccatctcaagatttttagtaatccatctaaaaatcaatatatcaataatacaaatagcaaaaaaaactagttaattgaattctgagaattatcatatcactaaaattactcatagcatttagaacatatacaataccgtgcaaataagccataatactcaaaatggatttttctctgccatggtctctagaatcaaagtcaatttacttgataatacaatgaagttggtggaaatgaaaggttaagatgtaccaaactaatgcacacaaactatattctgatacttttcatctaattactccaatctaatatggaatcatccatccatctatgatggagatatgtttatttatacacctaaatacattcctgaagtttcaaggataatagaagttacagaagtcaaaagctaagagcgcataccttgaatgcatcgctaacatgtcaaagctctctcattgctgcatatcttcttccatggcactatcggaatctggattgtctacttcactctcactgctcaaactaccatcactaccgaaaaaaggaaactctttcttcgcagaattctcatgaaattgatacttgagaaacttaacctgtattcctgtctcgtccactgttcctttgcgttttcttgtcccgtcaaatgcaactgtgtctataatgccgttaagagccatagatgatacattgtccacagaatcaaccatcacaagatcattgctatcgagttttttctcatctggtttagtttctggaagcacatactcaactcttgacttgcatataactcctttggcttgaagcttggaaatctcacaatcaaatactcttactccttgctcttcaacaagtagcatccactctgaggatgatatcaatttgtgattagttcagtgagaaacaatgtcataaaggttccaccagaccagggcataatttttttacaaaacaggacaactcatctctagttagctgctcttcaatttgtccagaatgcatgtatagttcaatatgccatatttcccagaagagaaaggtgttctagtattttctctgctccactttataagtaacaacaatgccatgttgagaatcacagccaaatgggtacaaaacttaactactaagttgacaagaatataaaagatacaagagaactcacttataagtgccaccggagttgaaatgtttggtctgaagtttcttccctcggtgccaatctgatttgtaagccacttgatcaaatgagaggcaaggcaagattcagtgaaggcatttaaataagaaatgactttgctctggtcatcattgttcctgtggacaacaagtagaactgtcaaatgaaaatactctaatgtaacccatttaatcacagcaaaaacaaccatttcttgttcgtacctaacaaacctcatagcgttgtcagcaacaagtaaccatgttatagcaagacttttcagtcgttcacttggtaactgtatccctatttgaggtttgagaaatgaatagtttaccattatcacagagtcatacagaatttcttgtaaaagacattggtctttaaacttctgcatgtagaaaaatactaaattcagccgaatatttgctaaaaatatcacatcgatgcatcaagctttcttggtgacctggcaattgtatttgtatagcaaagagacgtttctagcgtgtagtcttattatcagcttataacatgcatctacaggaccaaccaaaaagagtgacttccaggctctatcaacaattcaacaccataatatatgattgtaaatttgtagcaacaatggcatagctactactagtttagaatgctagttggaactgtcggacgagataaatgcatgtataagttatcttaacatgaacaaaccaaccagatcctaagctccaagattcgcctgccctctataacaggactcaacaagttcagattattacttttgttgtttagctatgcaacactgtatgacattaatttacatatgttactcgagactagctcaagttgagagtatgagtactggggtttaaatcccaactggtttgaagactcaccaacaggttagagacaggcaaaactggttccagcaacgtcctaaacagagtctctgataatacacatcagagaatcaaaagcaacacaatttgatcaagtaataagtgaaattcgtcaaattaacaaacatgaaaatgataaattagcaaaataaccacattgacagtgtaaatttatagtcgcaaaacgatcataatgatcttgttatggtagcatagtgtaattttaggctgcttgtgcaaacaaacatgattattttgctaataaatctttagctagttatgattttcgctctttaaattttgatatgtatcatgctttctgaactccgttaaaaatttcccttaaattattgagatttattagatttaaaattttttgtctaatttcattcaattttactaattcggtgattgtcatgtactaaatcatactccctaaattttaatatctaccgaattatgctcttcgaactttgatatgtagcaattcatatgcccctaaacttatatcaatgttaaactttctttacttaaattgaacaaaatccttaaatctaaggatgtcaatagtttagagtatttttaacggcctgatttttatttatttttttacgaaaacactccagtaagaactaaatatttcaatttccatcaaaaaaaagaactaaatattttaaaatttaaagaaagttagaagtcaaactcaccataaaagggaaaacatcgaaacccagtgactgtttgagccacccaactacggacctccttctccaattccactctcgaggtttgaagaacacgaaatttgaagcaaagatttagcaagaaagattcccacatgacaaccccagctaaatacccaattcccatcatcttcttcatcccatttcgagcttcatcactaacaatagggaaaaacactttcaacaattcatctccaccgccaccaaccccaactctatccacaacccaaacacgaaccacatccaaaaaacacgaactcaaaccatcaccgccatcatcatgatcatagcttccgctacaagaaatgctaatatagcttataagcccttctaacaagctctgaacctcatcttcttcctcatccacctcagctccaaaagctaaattacacaactcataagccaccggagcgagcagagcaattctcttcggtccactacacgaggccgagcaggaaacgaggagctggaacaagtccttgacgacggaaactgtgaatttggaggtgcgaaatgtgacggcagagtagaaccagatgatttcgagtggaggatcgggaatggtgtgaagtagtcgggagaaaatggaagagaaattggagaagtcggtgacggagttttggtaatcggcgatgaagcggtgtatggagtcttggaggatggagagataggggtcgtgtgggtttggagggttagggttagggtttgggagatggtagggctttgagagggtttggttcatagttgtaattaatagtttcagaagaaaaatttgaaaccctagtttaacggaagaagaagaagaaaaagaaggagggaactcaaagtcttttcctatttttgaattttgataatttaattaaattagttttctttttgttttttgaaaataaaatgaaaattacaataggatatttgcattataacccctatatgaaaaatttgtggcaaaatttcctaaaaaattcactttaatacaaattagtctttaacctcgagaaatagcggtaatactcctgaaagcacgtttcttgtaaatctgttagtctttattttaacggattcgtttacttatttaaaaatgtcacataaattataatttaatttaaataatatagaaaataaataaatagattatttaaaagtcatatttttttttattgctttcttttttcttcatcttattcgtccaaccaccccaatcctcacggaaacacccctagccaaccaccaaccctaatggcagcacccctagccacacccaaccctcacaacagcctcaccta

SEQ ID NO: 185818 - DNA, 3691 bp, Cannabis indica
ctaatgagtaagttgaaaaaatgtctcttttattaattaattaactaaatttatctctaatttttatttaattaaggcatatctctttttatttaagaaaatcacatggagaacatcttaaagtgacagaaataaaattggtacaatatttaaaaaaaaacttaaaaataaaagaaaaaaatataaaaagagtataaaaattaatttactcaatactaatggtcataatattcattagtattgtttttgtttttgatacacatgatgtaacttggcccatcattcataacagatgcaaccatgaaaaactgtaattgtaaaattaaaatactcatccttcctcaatacaaaaaacacagcatatcacttgtctacatttttcttttcttttaaacaccaaagctttttcaaataaaaagggatcatactcattagtcatatacatctcattcaagtagacccgattgcttcaatgccttttcaaagtcttcctcactattattcacctgcaattaatttaagtggcaaacacaaaattagactctaaacacatacgtatttattatttactttggtagaaaacatatcaatcataaaagctaaacttaccacagtcacttcactctgaaagtagagctcaatctttctcattgtggcttcatctctatcaccacagattaaattaaatacagcacctgaaacacaaaacacaaaccagtttggtattctctttggtaagaactcaacatgacattgactaagacaattaatatggcttgaaacttacccttcctcccaaaccgaccagcccttccaattcggtgtaggtaaacctcataatcaggttcttgggtatcatacttaatcggcaaatcatagttgatcaccaaattaacctacatgaggacatattatgttattatttccattttcgacactcatgggcacatatcaaaggaatatcttaaagaaagaagaaaacaataattaacctgttgttggtcgaaacctcgggcaagaaggtcagttgtaataagaacctgagttaaaccatctttaaactctttaataattttgtctctcacttctggtgtgttagcaccttggatggtcgtcacagcatacccatcatccacaagctgtttatgcagcatgcttgcgctgtttcgtgttcggacaaaaataatcctttgtccaatgttttcacccagatcaaatattctctctttaattattttaatcttggtcatctcatcaggacagtagaccttgtactgtttgacggacgccagagataagtcttctttctttacaaagagctggttgtaatctttaactatcttcgaaacaaaattcttgactgtttcattaaaagttgcagaaaacagaagcacctgaccaaatatacagtaacacacaaggtgagaaatattatgacaaaaaatgaggaacataagtgaacaaaggaaatttaacaaacctggcagtgaggactacttctgtcaatatccttctttattctcaaagaatcatctttaaagccatcctgcaagaaattttaaataagatagcaagcataagtgacataggaaacttaattctatatcaaacatcaacttaatttgaaaattatagtattacctctgcaagcatgtgatcagcctcgtcaaaaacaagaattttcacattgctaacccccaatttcttcgcagacatccatttcttaatggtaccaggcgtcccaattactatttgagccgacacaggtggtcgtttgttaatgggtatatagtttgtgctgtccatcggaatggcacactccgaacttattcctgagtacttccccattttaagaagaacctccaaattctgccacattcattcattccatcaaccaaagttacaagcagatcaaatttacttggtcataacaacagaggatgtatataaaccaaagttaaatcaaaagggcatcaagaaaaagttttattgaaaaaaataacttatttggataaccaatgatttcattgaaacagaaatcatttctacagtttcgcagacactgcatcctatcactgatctatacaatctttaaaaggcatgctaagagggtcataatgagtgaggaatctaagcctaaaactcatcgaaaccaaatgttctgtccagttggcctattcttgagggaaaatttgctgaattgctacaaacagtgctttcttccatatcaatgtcaataaaataaaaaaacttaaaaattcatataaattaaatcatgatacctgaatagccagctctctggtgggacagatgcaaatggcttgaggagccttgagctggggatcaacacggctcaacattccaagcacgaaacaagtggtcttaccagacccattatgtgcttgagcaatcaaatccttatgcggaggcgtcaagatcattggcaaactaatagcttggatcttactgggcttctgaaacctcatctccacatacaagcccttaatcaactccgctctaagttctaattcctcaaaggtcttagccgaagtgtaaggcgtttccccagatataacctgtaccccaaggagaaatttcttttattcactgactttgtctcaaaaatcaagcattaactttagtccaaaccaaaatcaagataacaaatgggaatgaatcaatcatacagctttgatattggaatcctcagcttcatctaagaagctgtttatcttcttttcctcatcaattttcaaattatcaatgtttacttctgatgatgaagcagacaaggtgtttttggactcttcgtcctccatatcggcccagcgtttagtttccttcactggggttttggtaaccgctggtggttgggcgatggtggtggtagtggtggcagtagtggtggtggcgggagtggcagcattagaatcagcgtcagacatggttcaatctgaaaacataacaatagtaaatcactgttaatagaatattgaaaattattctgaaaactctcaaggatattgcaatgcaaacaagtgatatctacttatttttcttcaagtagggctattcattggatcacatccaatgtttttaaacccatccaggtccaatccaattatacattggatgttggatttctccaatggatccaatccaatattgtaggctcaaccgaatcgatccaataaatcattggattgaatcggttccatccaatggatgaatccctgtattagatcggatccatccaatacttttgatccaatatttttttagaccgttttggatccatccaatccaatccaagagtaaagcctatttttcacctaaacggctaatatattagttcaaaatattacaacccaacataaatccaacctaattgtaacataaatccaacctaattgtaacataaatccaacctaaattgtaacataagtccaacataaatccatcctaaattataacataagtctaacatcaagttataataatacatgttacataaacaagagtatacaaattatgaatatcatacaatccttcatcaatccaaactccaaagtgacaatctcactcaattctgaacaaatactttttttaggttttgttaatactactctcactttattaattttaaagattacaaccaagaagaacgattttcagtttcttattaataatg

SEQ ID NO: 185819 - DNA, 1642 bp, Cannabis indica
atgcaattactctttctttctctgcctttctctagttcttagttgaagcttatcaatggctaaaaggtttaacaagttgtaataaaatcttcaacattaactccatgttcacatataattttcccctatttggtagtgtcaaccttacaagggaaagaaaagagaaacaaagagaatactttacttacaaataaatttcagttaaaaaaatagatttaatattgtgtattctttttcctttcaaaatcttaagcattttcggaaattccacattaaggcccaatggttccataattacttgcatttgaacatatttaataaagaagcataattttgaagaaaatataacttattacgaaagcttttcttaaaacaaaacaagcaattgacttgacactgtccttttaagtttcacatatgaaaatggatagtatagctagcttagctagttactttcatgccacaaaacatataaatacaattattaagtagtaattatataactactacctactaagttcaagtttagataaggaaataaacaaacaataacaataatatatgtatctatagatatggggaatatgaccattatgatattattatcatcatggcttcttaaagggcttaaaacaacttgaactagcatgattaaactcagacttattagtaacaacatgatcattgaaaattgctccatcaatctcatcatgatcatgatcatgatcatgatcgtccggtggtagataaacacttgaccccataattttgaagactgtagtagtcactggatcatcagattcttcatcaccaccattataagatttaaatgcacttgaacttgagtgttgaaatcccaatcccaatcccaaacctaaacttaagcttttcccatcttcttctcttgatgacatcatcatcaacaaatcattatttgctgatgatggtgatgatgagttttctcttaacatgttggccatgtttattcctgatgagaaatattctgcatgatcagtttggttcccgagaatattattaatggtatgatcatgaaatgtcaagtttctcttcttattccttctcttattatttccctccattaatgaagatgataaagtattagaagtagtactctcatcatcatcatcaactgaagatttcattccatccaatatagctttgacattgtagctttttatgttgaaatttgtgatggccttgtctcctttcaacttaatgctcgcaacatcaaaagctatggcagcttcttcttcactctctgcacttaattatttgattaattaagttaataagtattatatataattaagtttcattttataattataaaaatatatataatattaataatgacttaaccaaaagttcccaagaagactctctttgccaggtccctttctagcttgccatttcccactatttgcatgcctgttatgtaccaaatcaacttacttaaattttgtataaatatatgtatatatgtatgtgtatatatatcatgtatagagagagatatggaaatatgaataatacttttacaactacccacgaaaccctggagtttttcctcctttgagaagctgtactttgacctacaacgtatagtcaatgcatgcatgta

SEQ ID NO: 185820 - DNA, 3784 bp, Cannabis indica
tttttttcttctttcttttctcaacaataattggtaaataaccaaaaaagaaaaagactttcctataaagaaatctgaagatcaaagaacagtttgtatatgactctttataatggaggaacaacttcatccacacactaccataaaaactaaaacctgggacttttttttttcttcaaggattacaaaaaaagcaaatcttttttaaagaaagaaagaaagaaaattacagtaaaagaaggctagaaaaaaactgtactttaacaatgaatgaccaaagtatgtaaacaaaagctaatgaattatttctgaatctgaaacatgaccagattttctaactctgccttgtctcaaaggcctcattaacaacttcaactgagtatcttcattcatcttcaaactgcgactcgaacgagtcaacggtggttgttttttaggagtttgagattttactttccctgagaaaacataacatgtttaagtcaaataaagcaaaagtttttataatgatatgaagaaaaaaaatgagttggggtttgtttcactgacctgaacttcttcttgtactcttcataacttcaggagattgttttacagatgaagctctcttcaatggagcctctgagcaaattgaccttgtatcacttcctgctgtcattgaaataggatcttccaacacaggtggtagataatcaatagtgcaggctgaagctgagtctctaaagaatgagcctatgtcgtatgttgattcgggtattgtaatgtctttgcttggtgtgaaagtcttctccttttccaaaagtctataagtaaacatttgaaatgggatttgggatactgaggacatgttagaagaagaacaacccccttctaaagcagacatttttctcacaaaacttgcctctaattcacagcaatcaactgatggagattgtagctctggcaaagtttgatctgggttcatgataagatacttctttatgtaacgtagaatcctgcaaatcgatgagaagcttggacggtgagatggctcggtttgccagtcatttttggttagttaacaggtatttcggtgaagggtgtgggaaaagaggcctctctcctgctcttatgtttctactcatcttatctccttgtaaatgtccatcttcaaaaggtactttccctgtcaataactgaaaacaaatcatcccgaaactataaacatcagctttttcggtgtacttagcagcagcagcagcagcagcatccccacctgcctgttcttgcttagctaaaacttctggtgcttgccaaatgaaggtgtcaactggatcacgaggtggcgaggagtttcgagtacttggattgttggatacagatgataaaccgaaaccagatacctttgtttgaacataaccttcacttgaattattcctcaccttgagaaatacattaaaagggttcaaatcaccatgataaatcttctgtgaatgaagatattccattcctctagcaatctgaagcattaaatcaacaacagatgggagtgaaaacaaagctctccttcttgaacaagaattctcttttaagtaagatgataaatccttactcatcaattccataacaagaaaacactcctttttctcctcatcaaaaaatccacaaaggtattggagtatattagggtgagaaagtgataaaagattagttatttcaggtactaatggttgaatatcagcaaagaaatgccttgaagcaaaagtttcccccaaccactgaatttccttgaactgatttcccccacctaatcgcctccgaacttggtaatcttttccacccaataaaacagaacttgggaagagtttccctttaaaattctctgaaccattcagtttattgataagcaactcagaaagcttaatctcattctttgtcaacgaaatcgaaatcgaacttctcttctccttaagagcttcaatcaatctccacctatcttctttccaagcacaatccaatcttttacaaatctctttaggtaccaaatactgtttcccaaatctccattgaaaaagcttaggatcacaccattccttatcatacttctttacaagagcaatccttctcttcttcatctcatcatgatcaagaccagaaatttccccagcattttcaatggcttcaatcacaataggaaaatgaacaaacaggttatgaacatgaagttcaacacaatctttattctgatgaaagctcattgctttaccccaccaatcttttgaatccatacactgtctaatgtaaacctctccttccttaaaaaccctttgaagctccttcaatggctgctcaagagctttccatttggtattcttttcttcaagtttcagattctgtctgatctcttctccaatggttttaaaagctaaactgtaaatatcaagaagtaaacgacactgactttgattgatctgaatgtcatcctctaacaccattaaagctctcatacttcccaaaacctcacctacatgccggaattgctccattaattccggccaagatcaaaaaggtacaaaatttcgatttgggcaccttcaaaaaaatcaaattaaataaaaataattacaatacaaacaaaatgaccacattaaatgtgtcaaaccccaaaaatgaagaaatttccaaactttaagtatataacttcaaaattaaaaacaaaacaaaaaacaactatataaccaaaagaatgaaactttatacaaataaaatcaacagttattaataatgaacaatttttttttttcattttccatatttattcatagcaaattcattcaacccagaaaaagatcaaagtataaccaaatgggcacctgaacaaaacattttctaaagaaaacaaaacagaattaagagaagaactcaatattcatgatgatgagaaaaaccaacttacagattctttgagccttgaccaaaacacaaaatattttcccagaaagaagaagctggcgtatctatctgattttgacttttcttttaactaaatttgaaaaaaaaataaaaattgaaattgaaactgccaaggtgggtttttgtcagattattcaaagagaaaaaaaaaatcaaagcttttaggaaattgagcagtttcttatttttgggtattaattggttaagaatggaaatggtggtgtggccgttggaactagtctggcttttacgtacatttatatatttatatatattatgtacatacaattataattttatttattaattaattttatatatttggttattttattttcccgcgatttttgtgttcccgttagttaacggttagaccctcgttaactattattcttcttcttgtcaaaacgacaccgtttttctgtcgtttgaggtattagtaaaagttcgttagtgtaacggtggaacattctcatagtacaaaggaaagggataataatttggttagacaaaataagctattctttgactagtttaaaatagataattatgttcattaaaaagagacatatttttttttttagttttcacacccataaactattatttttttctaattttatgcagtggggttgtacataaaatttcttaaagaaaaaacaactattaacacattaatacaaaaggtgaagagttattatgaaattaaaaccacattaatacaaaagaaaaagaaaaaagaagaagacaacttttagcatgattattgcttattgaattatttaatgtttgtttttccaaaaaaaaaataaatatttaatgttttccaaac

SEQ ID NO: 185821 - DNA, 1650 bp, Cannabis indica
ttttttatactttatagcatatacgtcagcattctaaagagcattattcctgacttgccaaatattatataccaaaggatagccaattagccacatagacttcttttttcctctttggccttttataccttttcacccacttgaagcaatgcactaaatcatcttgttgaacattcagcccaattcaattgaaaatctccatctaaatttgcttattataattacgtacatttaaagagctagcaaatgatgatgagtctctaaatccaaatcataataaacaattcacttcatcaatgcaaccaaaacggtgcaaacactctctataaatttgtgttttggataactctacctacttaaatgaaggaaaaccatttcctttcacctccatctcccagccaaaagctaattggatcaaatatttgcaatgctaaaattcaagttataccccagaggatatatagtttgagataaaccaagacctgaagtatgactatatctcggcccaataagcaaggtaaatcaatgacccggaatagttgacatttaagataaaccaattatgttgatatatataagataagcatcacacttagtcaaagtaaatctcatctaggctccgtaaaaattaaaaccagatcaaataaaacaaagttaacccaaaaacagataatctcaatacaaaactaatcatgaaaatttaacaacttataggtacacgtgtccatcatatagcatacaatataaatgaagtaagaaattgacgtaaaagaaaaagagaaaaaagagaccagaataaagaatccattataaactttgagagaaagttctcataaacaaaagaaaatacttactgtgcaatctgatcaaaaatattaataactatttttggtcaaagcaattcctattccattatttttattacctaacctcaattttataactaattgtgtaattttttttttttttgaataaaagtaattgtgttaattagtgtgaagcatattggaatgtggtggcggagcagaattgccaaccagagaaaaaaactgtaaaatagatcaaatgttgatatataatacccacccacatgtaggaggtagaaatagaatagtgggagttaaaagcacatgtatcaacgaacaacaaaatatcctttattaataataaaatacacaacccactaactttctttaaatttccttttacaaaatagaaaaacaaaaaacaaagtagtggagcaaaatgataaagatttattattatttttaacaaaataatatgacacgtgttaactgaatgaaagtgggattgtggtggtggtgaagcagagcactggagagggtacaatggtccaaaaatattgtaataaaacatgcgctggctggctggatggatcaacacagccccaggcggcgctttagccgatcctcacttcctttccgtaattttaggatcggcttggcttcccacgttgcggctcatcatcaagccagctgttaaccacgtgtgtcggctgccttccaaccatataaaattattttaattatcctcaattaacctcacgtgggatattattgatattgttcaaaacattatatttacaactcaaataattaaaaatacacttcaataaattaaatatatttt

SEQ ID NO: 185822 - DNA, 1505 bp, Cannabis indica
ccgatgagaatcaaggttgacgatgaaaaagtgttttaagtattaccaccatttgttagtgggaactttggatttattgttgtatttgctcttcttttgcaggaattgtggctcgagatggatttgtaggattatatcgaggtttcttgccaaacgctttgaaaactctaccaaacagcaggtgtttcatctttcttgccttacaattcatgatttaacatcccacatgaaaacactctaatactatgttattttattattgcgggactagtacgaacttaactccgacttgctcttctttcctttttctaattgcagcattaggcttaccacatacgattttgtcaaacgtctaatagcaaggagtgaaaaagaattgcagaaaatcaccgaggaaaatcgccacaaacaaaatcaaagcgaaaaagatttgcagaaaattgtggatgaagatcgccacaaaaacaacacgaaagcaccggtggtggagtaacctaaattcgtcttgttttctttaccaattttagttactcaatttttctagtagagatcaatagatcatgtcctagtgaatagagcgtccattatttctggtttggtataaaattcttttgggggcctgtagggtcttgtctaggggctatcttatgtatgttagtctggttaggtttttcagttattagtggaattttttttctattattatccagttttgtttctgagaaaatttatttatagtaattaatctttctttcccttttttttttaatatcaactttgattaacgaagtgtttgaaatattgtttatggaaagtttgagattttaaatttagtttgtgaatgttatgtaatattataaagtgtatggcctaattactaatttagttaaagttcagtagtctagtaagtatattttaaaatcaatttgaaactctaaaatcaagttacaaagttagcatatagtactaaaaagtgctcaaaagtttaactttgtaatacataactaaaagttttaactttttcagtgatttttatccaaagtggtacattttttattttttcacttacaaaggattttttaaaatttttattggactatctatgattaatttttcttttttgtaaggcaaaaactaataccatgtaatttgtggcagtagggtaacagtgacacttatcaaattatgctttcctctcttacattatcttaaacaaaggtagattgtcattgaagaacaaacacttgcaaattaatatacaaattgaaatgagctatttagaaatcatttgagacacaaggaaaatccctatatatcctaaatagttgaggctttgttacataaagccacttgaggtagacaatgggctaaaatattagcagttctaagaagataacaaatatcaatcagatcagaatccttacataaatttttcatatgtttcactaatgacttatttttgatatgttctcctacattatcataataaagtaattttttttttt

SEQ ID NO: 185823 - DNA, 2479 bp, Cannabis indica
cactagcttgtactcaattttttattttaaataaagccttttatagattgaaaaaattagaaattattgtcataatatagccagattacgaaccttaaaattacataattaaaaaatcttaaatattataacatgataaagctcgaggagttaaatttattattctggagagtgattcgagggtggtgatcaacgctcttaatgggaaggagtcccattgggagattgataactacatctctttttgtaaaagcatctcccctttctttatcggttgtatgtttcaatatgttagtagacaatgtaattttatggcccataatgtggccaagtgggcgttttcctgtcagaggtttggcatcatgcctctttcctctatgcccgaaactatattttgtaatgaccgcgaggtctaacggttttattctaatgcatgcacgcttttcttcaaaaaaaaaaaaaacaactactgatatagcaattaagattctattttgaagaccgaccttctctaagagtgttgatgataacttttaagtcacttttcctaccacaaaattttaactcgtggttactataatttttaacattagcaaacatgcagcatcttcactaaagagaaattgaaaataaaaaaaatgttgataatcacccacacaatcgaatcaagataattatgagccacaattaacacatacaaaatctccttactatttcttggttttgaaattttttgaatgatgtgatattaaaaataaaatacaaatagtttattacatacatatgtaaaaatagattgatttatgtttaacttaatatagcaaattattcaataatttttttaaaaaagaataacaaattacttattataacaacaatgtagattattcttttttttattattataatctacatttattatttagcaaaacaagcaattacccataatatttccaaatgtgtgagagttaaaaacgataatttttttgttaaatgtacatttaataataagagtattgctattagatactactattgtttagtactttatgtaagtggtattttacgattgattagcgatattccttaaaaattattttattaaattatgcaaaactcaatatttaattacaacaataacaatataacaccaaaaaccgaaaaaaaaaaaaaaactaaatacaaataatgtaacttctggcaattccctaataataattatcaacttttaagtgattctcatcataaactatttactattttttttaatatatataaacaaataaaaaagggtaaattaagaagggtaaaaaggaaagacagacaaattgggcggttgggacccaatagtgggctgtcgccaaatggcaggtggggagagaagatgacttgtctatctgtaattttcatttttcattttttataaatatatataaaaaataaaataaataaaaacaaaaattaacttccggacttcaaatctttatccaatccaattttatttcaacactcctttttctattctcattttctgacctaatatttctcattttttctcaacattttttttcctttctttctcttttcacaaagaaaaaatcaccaccaccaccaccgccagacacagatattttcctttttgatcaaacactcgagaacccatttgccttgattgatcatcatgagagaaattataagcattcatataggtcaggctggaattcaggttggaaattcatgctgggagctttattgccttgagcatggcatccaccctgatggtatgatgccaaggtgagatttttttgtcttaattccatttgggttatgtgaaattttcattttttttatttgggtttgttagaatttggatttgatgggaccagtttgtgtgtacttgtgttactgctttatttcaatggatccattgtttgaaatttgtagagattggttttgagtgttttgtgtattaattgaattattgctttatgtacattgttattgtattatataggaaaaggttgtgattaaagttaaggctgtttaatctgattggatttatatgattagatgttttggttgatatggatctgtattaggattatgttaattgatttgatgaagcttgatcatagtgtttggtggtttctgcttattcatattgaattgtattctaatacccttttggattttataatgatcactatgtgtttggtttaatgtctctaatggaatgttatgcattttttttttcttatttgtgcagtgacaatacagttggtgttgcccatgatgcctttaatactttctttagtgagacaagctcaggcaagcatgtgcctagagctatctttgttgatttggaacccactgttattgatgaggttagaaccggggaataccgccagttattccatcctgagcaactcatttcgggcaaggaggatgctgctaacaatttcgcaaggggacactacac

SEQ ID NO: 185824 - DNA, 1209 bp, Cannabis indica
aaataaactgctcaaaccttaataagaaaggtaattgatttattattaccttgctagtacaagtgcagccgctatgagattcacgaggaccaccatcttcaagttcatttcgccatgcttcagtgtcgatcttgtaaaccaagtcgtctgcatcataaattacatccttgagatcatcaagccacttcctgactcttgggtctttgatgagcttctcctcagcatcaatgagcaacagatcagcagaggacagcaaagttttcaactccttcaacagcttcagaatggcctcttttcctttgaagaaatccttgacctcagtggttaactttttcaccaaaggattaagcaaagcggagagaagcgctcctccaaccaattcagcagccatcagatcttcaaaaactcaaaaataatatgaacacaaaataattcaaaagagagaaataatatgagtgagtgttgtaaacagagctgagctcagtgtgtagaacatgatatgagttttgttttatagataatagtgtaaaatattattcctaagcaaatgctaattagttaactgcaatctgttcattttattataaaatagaatttagtgggaacatgcttatatttattgcataaaaaaatgttgtagtctttcttttattataaaaaaacataataatataatgtccactagagactgctttccaactatatatgctactttaattatcactctaaattaatgtcttattgttcatcaatcctattattttagagcacagcactggtattaacaatagttattttaaaattgtgactactgaccttatctataactataattaacaccccatagaagcaactcatgatgagaatgaaagttgaagaaagcaaatgttatatatagtgcaaattaatggcatttcttaattaattatgcagctagctaaaacagattaaaagactaatccattatcttctataaataataaattatggaaaagtggtagataatatccattattaaacacacaccacactcaaacttttcttggtcttgataacattacaagagtgacaagtgaagttacagaaataacagaattagttacaagtgtttatttggtaactgacttcttgcattctcgaactccaattagtcagattttcaccaagaaacatacgaaaatgtaactagttgatcttttttgtcatccg

SEQ ID NO: 185825 - DNA, 1667 bp, Cannabis indica
ggacaatataaaaagggtataaagtgtaatttcctcttctttatttattgtgttttatcatgctttagtccatgttttgctcatgtttatatgtttttttttaattgcgagattgttaaatttgtgcatttttatgcatttttctatatttctagattttatagattttttttttcaaaaaaaaattgatagtgataaatggttactactactacaattaaatcaaataaggcatatttacatttataacacattaatgaaccaaattcttgagtcaagccctaccaatctcataatagaactcattcgattgccatcaactaaaaaaaaaaaaaaaactaaccttaaaaaatctaaagccaatgatgcttaatttttattggtgtagtcaaattgatatattttacacctacactaaaatcataacattttctcttatattataaaataaataatattagtatgaagaaataaatgcatgaatcttatttgtgtaccactatttgtcatggttgattagaaaacccactaccatgggaaagaagatgattatattttaaattgtacatatatttccataagttttttaatattattactaataatttattaatcaatattttccttttttttttttgaaaaaaataacaatgaaagatgccatggttgacttgagcatatataaggtttcaatttgagtgaatgggaggtaatatgtgttaccccaccacttatttatttaaaattaataagtctttattatgtactatcatatctctagccacaaactatattatactttccaataatgacccatccaaatattcattgccacaaaatatttaatttttttgaaaaaaaatgtatcaaagcaataaataacacatttggttgtcaccacatttgttaaattacccaaaataaataaataaataaaatcaaatgcaataactagtgtagtgttattctatttattaaatgaaaaataaagagaaatactttactataaatgagaatgacttataatatatacttgagactatatgtgtctccatatgaacaagatcttatgagtcaattcattgctttagaaaggaaaaaaaaaaacaattgtaagatcgaattgtgggtttagcattgaccaaaatatgcattaagaactattattaggggagttttacactctatttgactatttttatttttattaatgtataaatatatctttatactcactttttattctctctttttctcttttccttcttatattctatatacaataataaaatatagattaatattattttggaaaacgtattttgtaaaaattattaattgaactctttgttttataaaataaaaaattgaaccatgtattttttaaaatggtacaaaatgatacaatcaacttgaagacaataacacaaatatatgcaaaaaacaatatactcatttttattataacaactttaaatcgagttattattatcttttattttgacaaaaaatcagtttagggtactattttgtacaattttagaaaatacaagatttaatttattatttaacaaaatagaaagtctaatcagtagcttttacaaaacacagaatctaaaatattatttacccataaaataaactatgaaagtatatataatcttatt

SEQ ID NO: 185826 - DNA, 1811 bp, Cannabis indica
tttttgcttggctaaatggcaaatggaacaatgagtatttaggtgtgaagaaaaagaactgtcaatctttttattgatcatgttttaaatatacatggaagggtgaccaaggcaattttgccattggtctacattgttatgaacagaaaatatagggcgatttggcctttcaattacattcttgtaagctgtatgagaagattgacatgaagtagttgctgatgcacaactttggtgaagcaggtatagatttccttgctttctagttgtcccaatcggcaaactcagagatggatcctaaatgtaacaacaatttgtgtgaaaaaccacattatgagcattgttgttaagataatcattgacagaataaggttgaacctaaatgatgggatataaagcacattatggagagtaatgtggggtgagatgtgaactgtgccaatatttttaacagaaatagatgtaccatttggtaacaaaatagatttagggaaaggaatatttgaaaaagatgcaaaacaaagtttattgcaacacatatggtgtgtagcactgctgtcgacaatccaagagaaaaaagtggaagaagaattatcggccatattggatgcggcaggggcaggagaagggtcaaatcgaggagcttgattgttgagttgttgactgagcaaagagattagttattggcattgagaaacaagatcagtgttggagggagaagcctcgtttgaatcagtgagttgctcatgagaagtggccaaattaacaacaaatttgcctttgtctggttttgtttggtcaccatatccggggggaaacccatggatgaagtagcgtttttccacaagatgccctagtttaccacaattggaacaagaaagtcgtggtttatttgtgtgagattgagtagaatggtttgtttatggtcgagttacaacagctaaagaaagagatgatccaagggttcgttgtcgtccttcttgaacgatcatggaaaaaaccttggaaagagagggaatatgttgatagagtaagatccgagctcggacgaaaccataagactcatttaaactagtcaagaactgaagaacttggttctggttatagtaatccaaaaaaggattttcatagcaccacatgtgcaagtagtagcaggttgaaactctttgatttcatctaatagggatttctattgagtaaaataagaactcatagattgatcaccttgttggaggtgggtgagttgtgtttgtaattgaaaaattctaggaccattgccttggttgaatctctcggagagatcattccacatatcagatgcaaaatcaacaaacatgatagtttgggatatttcaggtgaaacagaatggaggagccaggacattaccatattgttgcatctagtccaagaattcagaaggggataaccagcagtaggacgagcaagggatccgtcaatgaatccagtcttgttttgagctgtaagagccatggtggtggcacgcttccaagattggtaattagatccagtcaagacagaggagacaagaacgagactaggatgatctccagcgttgaggaagaatgggatagaaacatcttcgtgagctggtgaatcagatttggtgcttgaaatcctccgtggagccatcagtggaagaaccgtgggagttggagagtcaactgttgtgattggatcttgactttcaagaggatcagtaggaatggatccatcattcgagagaagatctggttgtaggtcgcgccataggagtaaaggtgggttgaatgtcttctgataccatatgaga

SEQ ID NO: 185827 - DNA, 4891 bp, Cannabis indica
tggttttagttattaatttttttcattattatatgttttcaaaaattatattaggattttcacttctagtacggttaaacttgcatttatattttaggttaatctaattgcaatgaagaatcagagtgaagcattttagtgaacacattgtgtgggcggcgactattactttcatttactcttaactaaaaggtcatacaacggtgtcaaatcattgacaattttttgtagtagtgtttcctccttgttccacaagtaagtgcactaacaccctgtttaaacttttggtgtttcacgtctagggtagaaacttttgttcaggttaggttaggactgtttacgtgcgaaatagcaaggtagagtgcgtgagagaaactcttgcccatacactcgtgaactgtgagattaggtcaattggggaattagtttagtgattattttccttccacctgtcagctatttcaagagattttcttttctctttgtgtttgtattggtatcaatggacttgaaacagtatcttcaagcgtggttacccctactgaaggtgtactcagttcttctgctgagaggacctctgcgggggataatcaaaccatagcccccgcggtggcacctcgaaaaaaggggtcttagaaaccattccttagtatgagcccactattgaagaggactcccttgcggaagccaacagagagaagggggtcaaggcacccaaattgctcaggcccattacaactccatttgggaaaaggatcaaaaagccaactgttttcgatcttacgagatgttgcaggcttacgccaacgttgttagccttcgcaacgtccccagattaatgtagcagagactctttatcatgggagaatatgcgttcatcaatacagagagattcagtgcatggagctggtctcatatttccaatggcgcttatctccatctgagaacttattttgcaaatctaattacgagaattgggatttcccctttccagctgatcccctcgtcatataggcttttggctgggttgtatatattatgcaagatgaacaatttagaagttcattctttggagaaaatcctttacctctacagcgtaaaggctaattttatgaggacaaataaaaaaaatggggttctttagattggataagcgtctagattcttactaccctatcagccatacggaccgtactcacgacctccgcgagtactggttcttctcctctagatttcctaccaaaatggtgttgtctcttcgtctaagttttaaacttccaagtattcttattatttaactttaatctcgtttatttccaaatctattgtatttttgtaaacccattaatgtaagattctttactctcaagttataagatttcaaacatgaataaaatgccaaattcagtttgccaagcttgttgtttcggaaatattcacaagtttccttttcctaaagtttttgaaacaacttatatcgaacctttagaacttttagtttctaatttgtgggggatattctcttactacttcttacaatggctacaattactatgtacactttagtgatgcctactctagatttacatggctctacttacataaagacaaatctgatgttattaaaactttcgtagttttcaaaacagaagtagaactatgttaaggcaccaaaatcaaagtattccagtcagattggggagggaaatatagatcatttactgaatacctcagtgcttctggtataattcacaaaaaaccttgtcgaactacccatgaacaaaacggattagctgaaaggaaacataagcatattatggaaaatggtcttactcttcttgctcaagccaatatgccattaaaatatgaagatgaagcctttaggacagctgtttatcttcataataaacttcctacacctatttttccagacaaatcacctattgaagttttgtttgacattcaacctaattataccaacctcaaagtctttggctacacttgttttcccaatatcagaccctacaacaagcataagctacaattaagatcctcaccatgtactttcataggatatagtagtaatcacaagggctataaatgttttggctcttttggcaaactatacatgagatgtcatttttgatgaaataacatttcctcattctgtttcaaacacatctagttcaccctcttcatctcagtcagagtgtgtcacctcaagacaaattctcacagtcacttctccatatatagttgagtctttgtttccacatgatgctgcaatattcccagaccactaatctgttcctatttctactaaatgttgtgtgtttgaaagtgatgaagaacagttttcacaggtacagatctctaatgacttaacaagtgttctagctctactacatcagcacatgttaatccttcaatacctagcaatgatgtagcatctgttccaacatctacaccatttgttgttgcatctattcagcatttgcaccattagttgctgcatctcctccaccatctgcatctgcaccatcatttgtgagcaacacacatcatatgcagagaagaggcaagagtggcatcagaaaacctatggcttacctagctacacaacttcctacatctattaagcaagctctccaacaatttcaatggaataaggccatggaagatgaagtccttgctttaaaaagaaataacacctacactctagtcaaactaccacctgaaagaattgttattaggtgtaaatgggtatatagaatgaaaaagaatccagatgggagtgttcttaagttcaaagctaggttggtagccaaagggtttcatcaacaacctggtttcgattacaaataaacctttagcccggttgtcaaacatgttacaataagagttgcaatcactcttgctctaaggttggaacataaataagcaacttgatgtcaacaatacctttttaaatggagacctccaagaagaattgtacatggtgccaaccccctagaattgagcatcttgattcaccagatttagtttgtatattacacaaagctttatatggtcttaagaaaacttctcgtgcttggtttgagaagcttcattaatgtcttctatcactgggggttatgtctttaaaatctaatcacagtctattcatcagacatattcctctctcaatgacaattatttttgtgtatgtttatgatattattatcacagatagtgatcccaatcttatctctcaatacactgaatgcaagattttctcttaaggatcttaggcccctcaatttctttcatagtattgatgtcactactacacaaaatggtctagatctgtctcacgaaaagtatgttcaagatcttcttcacaaagctgaattggacaaagtcaaacccaaaaacacaccaatggtcagtggtttcaaactttcagcctatggaagtttccctgttgacaacccttaacaatataggtccatagttggagccttgcagtatttgctcatcaccaggcctgagatatcctttagtgtcaaataagtctatcaatttatggctaatcccttacgatctcattggcaagatgtcaagaaaattctcaagtatcttagtagcgccatggactatggcattcacctcagcaagctagaccactatgagctcactgaattctgtgagtctgattaggcaagagaccctgatgacatatgctcctctagtttttctatattttttggctctaacttatttgcttggcagtgcaaaaagaaatatacagtgtccagaaacagcatcagagctaaattttgaagtctagctcaagttgtgattagaacatacttggttgcattctctttttactcagttacacatccacctgcctcgacctctagttgtgtagtgtgttaatctccgcacaattattctcacaacaaatcttgtgctccatgctcgaactaaacacatcgagattgatctctattttgtccgagataaaattcttcaacaattaattcaagtaaagcatgttcatgccatcaattaaattgttgattgtctaaccaagcctatttccagccaattgttctcttcatttcgacaaaaacttacaattggtgatcctaccaattataagcttaaggggtcttgttaagacaattatttattagatttgtttagttagttagttagtttgtttagttagttatctatactgactctagttggtaggtgttagtttgttgttagctcctaatccctgtatataaacatgttgtaagcttttctaaataaataagagatttattcctctcttttaatcttttctctcctttgcatctctttttctcttctctattttgttttgttctcatggataagaggttgaacatctccaatagtcaagaataacggtacactttgctaggaatacaaattcagtctcgaacaacttacactttgctaggaacacaattagttcaacataacttacactttgccatgaacacaattagtcgaggataaagtcaaaacgaatgagaaaaaggttctttcataattcaatgtgagaggaattaccttagaagtctcaaatcatagtgcaattaacaatcaaaagaacgataattgagataaaaatctaaaaagaataataaagtagaaagacacaaagaattataaaggttcaccccaattgtgggttacttcctcttccagctgcctcagatccaatttgttcaaccacttagctagaaaaacgattttacagtctgcaatggagattcctgttacaactcaatatgtaatccatttcctttttctcttccaatttcaatagttggtttacacaggtattggctcacaaactctctctctctct

SEQ ID NO: 185828 - DNA, 3570 bp, Cannabis indica
atttttaacttttttctttcaatttatattcttaaaaaatatacctatcaaacaaaattaaattacattttaaaaattaagacaaaaaaattaaaaataaaaaattatatgaaattttcttaaaaaaaataaaaaaatatatacatgagttagaaaaaattataaaaataaaatcaaaataagtattgaaattaacataaaataatgtgaggaaaaaattttaaaaaaatattaagagtaatttttaaaaattatttaagtttatatttttttttaataatggggtgtatttataattttatggggtgcaaatataactccccttgtacaaattaaggaagggtataaattttgaaatggcttgtattattagggtcaaaaattgaaatttctctaaagaaaactgtcacaaacgtgacagtaactatcaaatcataaacttttaaattatttaatataataaaaaatgttcttcttttttttttttttcttttttgaaaaggaataaaaaatgttcttcaagtgacatatattatcaaaaatgccacacaaatttttttataaaatacacaatacctactataaaataaatacattatacatataaatattcccgtgctacaataaaaaacaaaaaaaaaatagtatacattgtaaaaatcataatattaaataaaataaaatgtgttttttacgaaaataagaattaaattttcaaaaataaacaaataaataaaaattctctccaaaaacaaaattaatggaaaggatgctttattgatattgacaaaagaaccgaaacgacatcgtttcgttttggcaccaataaaacgcattcttaaggctcaatgcaacggctagttttttcttatgtgaccgttttagagcaccctaaagctaagattcaaaatatgaaaaggtaactcctacactgtccatgaagctcatcactatagaggaagaaatcgaaaaagaactcattctgattcaaacacaaaatacccagaaaagttcaaggaagaaaagatctgggatttcagaaaaaattcaatctttttcagctaaaattaccaactcaaaatcagaatcaaagagatcaaaaatggtgtactcttacacacccacatattactcttctctccacgactccatcacctccttatgcaagaccattctccctttcaacttcaagaaaaagcggctgcaagcggccgagcagaagctgtcgaagttgcaatctgataatctaaaatggcagcaggactctttccaccaaatgctcaacttgatggggcttcataaagaagggattctggctgaaactgaggtttctgcttttcgaacccatttgctcgatacccttatagcttctccagctgaacaagagcaaacagtaattttaagagataaattgctgtttttgcaagtaagtctcatctgggtttgttttgggaagtggttgtagtaataagtgattttagaattctgttcaaatctgaatctttgcctgattttctttctttttttaggagctcttgtatgctaaatgtatatcttcagaggagtaccactcttcaaagaggccattattacaaagattggcagtgcaaggtgctgaaattgaggccaaagatgtaattgttggggccacaccaagagatcccaaagagcatagttctgaagaggaatggtcagttattgacttgaaagatgaaaactgtttgctaaacaaagagagttctaattcgaagagcaaatcaaagcaaagctcagcaaagaagcagatgaaaggagcagcctcagttttgggttttgtttcttcttacaaaccagggaaacacaaagaagagaagagcatattcgatttggaggaatcaaaactctctgcctctgccttctcaaatcatgaattgggaaaatttggagaaaagccactttgggatagccatttgcagagtaaagaaaatgaaacgagcacaattctcatgccaggaagcctcccgccagagccggttagggaaactgttagcacagaaaaggcaaagagaaaaccatttaagtctctgtttcagaaagagcagagagaggggcatggcagtggaagcagtggcggctgcagcggcggtgatcgtgggcgtcctaataacattgaaacacccacaaaatctgcgaaaaagcattggggttttgatggattcaagaaatggagtaagaatgattcagaggatgagacagctccactacctcttaatgaaagatctgactctgaggtttactcaaaccatctagtagccagtcccattggagaagggccagacaccaagctaattaaaaagaagctacataaggatggttcaccatcagatttcttcattgacaaggtaactaaatcaatcattctgaattcatgaaattgtatattagagattgagttgaaactgaacttgggtgatgtttgaatttgaaggttttaggggataagataaagaaagagctctccagaattcaaactgagctttcaactacaaatcctaatctccaattctcgtatgttttctcaatcaccttacctgtttgtgctatcttttctgtttttccttttcattgtttttcattctgatttggttcttgttcttttctttaggaatgatcaaattgaagcaatttctaccaagcttccagtagacaaggctgagctcaagaattttttccccaagtaaagcagattctatatattctttatgtttttgattcatttttcttatatgaattgtaaaaaatgtattgagtgatgtacaaaattaatcagttttcttttttgctatgttaaggtcatggtgtgacagatatggagatgttgttttggatgtggtgaagaaagagttcaaagatcatgttggagagatggagaacatgagaagtgcagcaagagagaaacacagcaacaactcgaaacgatggacgactttcgatgacgacgatgatgagaactgccaccccaatctctttgctactcatcagaaccataacccattttggtcaccaaggcatggtggttaaaattcagtgtgacttttgtgtattgtttttatatattttggattggaagagcatgatttgtaattgggttcttcaatatatataacagacactttttgtgtttgatttgtaattgagctgttatataatatgaatcagaatattgcccttttctccaaaacaatcaataattctttggaaaaagtttccattgttgggtgggtttaacagtcatataacagtaatgtattattattatagaaaaagacaaactaaaaggtaaacatttcctccaaaagcatcacttttaaatttttttataataaattattcagatttgagtggcctttttgttcaaaataaaagaaggaaaaaggtttaaaaggtagaagaataacgtgtggatccagcaaaatgccattatttctaaagtttaatacaaaaagtagagcaaaaccgcatcatggtgaaaagatgctaaataaaaaacattacatggcatcgatttcagacacagaaagaatatttcat

SEQ ID NO: 185829 - DNA, 2086 bp, Cannabis indica
attaaatagtttttttttttatatatagtaaaaaaaatgtatactttctacatcttgaaatgttcacattgaagagtaaatcacaatgacattttttaggctcatctaagtaacgacgtgaccagaaattattttaaaagtttgagtgaagagagagaaataagaaagagagaaatggtataaatgagagtattgaaacatacccaaacaaataaaaacgttaataattgaccaagtcatttttgacaattagattaaaaataaagtatcatgtataaaatgttttttttaatttacgccataaatacttaattttaactttcgagtgtagataaatatctaagtttaaattttgactgtaataatacataagtatttctaaaattttagtaggtatttgaccattaagcgtcaaatcatttgcagtgttctcttcaacagggacatctggtgcccttctggtcctcgatccgcaaagccttcctcgtggtcgttctattgggggttcaatttgatctacgggtgcattgttagtgttctcgtgtgccacaatagcctcacactctaatttgtcatccttcgataagatttggctaacctctgttgaagttggcgattttgtaattccaccaaaggaatatacttagtgggatcatatgccctcatgtctctccttcttggaatggtctttacaatattagctctattaaagttccattcaggaggacctcttcctatatttggattagcagattgagtcacctaagttccttgggactcttttccgaatgtctttagagatattatccataaagaaaagctttagtttttctttgggtagggaggtgtttttagagtttaattatcataagactctcaatgaaaacaccaacctattaactcaaaatttctttaacatacatgagacttgataattaatgaatctgtaataaaaatttaaggacaattaattattatagaaagataaagaatttttttacgtgattttatagttaaaatctacatactccacacgtcactcttatttctaaaattttatttacagaatacaatgtgacaaaatttttttaagtctggaaattagttgtcccctttcattatgtgagtactgctatttataggattaagctagtagttactttaatcttatctaaattgtagttataaaatgtggatattctccacgtttcatatatctacacataggtgggaacagtttatactttttaatttaaattgataaccgttattctatgatctagatcgtcattatatttttactgagttggctcaagatgacactttgcttccttggagaatatgttgatggacaaatgaatactgaacacggatttcttcgtgaattattgggattcaaaagatattattaggattctatcttcttggtgatcgctcacagtgaggtttagatgaataatttctctgtttgtaagtaagctttttcaagttgtatctcttgtacaaactaaatagaaaacagttacttttgcaataagtttggtctccttctctttgagagtaacacctttcttgcgatatgcgagatgtttgttacaacgtataacatttgtcttgttgataatttttgaaaagagctccatacaccttgttttgaggaaaatatttaatgcttctcatttgtacacatgttacgtatctaagctttagtatatgatagaacctttatagttatcaactcttgttttaacatgtatcctcttgtatggttataacttacatttgtatatgagctcatcaaacacaagtgtaacacttttacttcttcatttcttagttcattttctattattcgctcgctacatacttgtcatggtataaacaaagatgatgaagatgggtacttgtctactccccttctctttatttccatctacttcaaaaatagctctttacttttcctattcaccctcccatgtttattctttcttcctctattttttttttagcaagttttgatcttttcgttattacctacaaaaaataagaaaaagaaacagcaaaggtaggggtggcaattcgtgtt

SEQ ID NO: 185830 - DNA, 1132 bp, Cannabis indica
atagttaaatttgtttagtaactatttattaggaaattatatgaagggtgctgcctataattgtactgagataaatacctaaacttctgctcatcagataaatttaattttgcacaaacactactttgtgtaataactaagtactactaccatctcaattttttttgaacaatactaaatcgctgtatgtgattttgtcatctttttcaatgttccttgcagctgcctggacttatttccttgtcaaccaagttcctccccactgttatgaacataataaaaaaattagcagaagaagggcaagtgcctgcagcaaacaatcctcaaaggaaccctgccctggcatcgaaaaactaccagaatggagttaatgctagtagtgagatgtcatctaccggttcatccgaaattacagagaatgacaactctagctcctcaaaacaagactaagtgaaacgaagcatctaattatatagagcagtttccatttggttaaaagatgctagaaagtctctcaaatcgagggttgctagtgtttggtccacgtatactgtattattaagagtcagcactattgctgccatgcaagggtaacagttcttgaaggcattgattttttttgggtaagtgccgcatataggggaggggggcttatggtttgttgtgaggaagcccccattaaatagttttcactttttaccagataggtttttgtttcatgcttttgttttctttctcttctttttgggttggtttgttggaaaaagctacacacaaggatcttgtttaaatcctctgcgcgtttatgtttgtcataatggtgattgcattaaattttgtcacttgacagttgtaatgctgtggtttgcttgtatttcattgtaggaggaaaaggaaaaatgaaaattttcttatttatttctcttactcatacgtacaactagtttggtgaaaagtggtcattgaaaagtgattgctgatttcttttttaaggcgaaaaaaattacaagtgatggctttagtttcgaaagaatagttgattaaagcataagaagacgtaaagaaaagatagtgtttaatctacaatacttaaataaaagtagtttattagtgatcaaatgagacctgtgtc

SEQ ID NO: 185831 - DNA, 4805 bp, Cannabis indica
ttcttcttcttcttcttttttcgatggggtatgtatatttttgtttatttatttttgggcttttcgtaattttttattttcatttatgtatatagctattttcttctatgctagcatttctggaaattttgttgtttttggtttattaattctattattatttttcgagtttttgttcctgtttggttgcaggggaaaaaagtatggtgggaataggaattgaattgaagtttaatatttttattcgaaatagggaaagtgggattctttaaagtcgaacaattgtgttttttcttaatatgaaattgaaatattgcacaatttggaaggttttgtagttcaagcttatttccttttctttgattttttcatccaatgaaaagagggatcgaaatgggtcattaatataaaccatgcattatttgatttttaccatatattattcactttcctataacttgagtttcagatggctaattttttgggggtttatattgtgagggtggttaattggttggcttgaaacacttatagccatagctagacacgctttagttggttgtttaactttcactttctaaatgggtagcttttcctatggctaggataatgaattattaatgtgccataggttcaatgtcaatctttgacttcaagttcattagctgttaaaatgttactagatgttttgatgggaagacgtaagttgttttattatgcgttaatgcttcagaagctcttcaacttattttgagtttgagaaggctaattctgcggtttatggtgtgagggtgcttaatgggtcggcttgaaatggcatagaaagggaaatctagcagttttgatgtatgaaatctatttgtacattcaatcgcttgctttttttgaacaaattcttttaagctttctttattcaatattaaaaaaattaacatatataagggttgcgaaagaaaaaaaattgggaaaaggggaatatatgtaaaatattcttttggttgttgattatcccctgcccattcttttccttgaaagacaaaaataacaaactggttttttatccactaattttctttttctggataaactttttgctaccatgactaaaggtctggtataatagtctccttcacttttgtatttgatgtattctgtgctatttatctgaagtattcatgttgcagatgctgggaattttaagtagaaatggtaacgtttcatacttttcttgataaattactgatttaattccaacaatctggagggatgtctttgaggatggaacttgcctttgcagttttgatattatctttcttggcctcttttgtgtcgcctgattctcaaggtaagtgatgtggctatttgttaagataatgaataccattttagactctctggtgtgcaatgccaccagagattttgtaagttgctctctgtgtctatccggttcgctctaatatttttcagttattctgacttgaaacctcttattcattcagttaaacagaattgctgtttcactagtatgttactttcagataatgaattaaaaatctatgctcagttctgatattcacttagaacaacataatttttttcttcgataagactagaacaacataatagcatcatgcaaattgagggatttagatcaaccgtgttggacagtttgagttcaaagaatgagtatgttgtcgatactaccacttgggtagaactcacacctaagagaggagggtgcccaagtagtagttatataccacatatattccactttagaggagacatccacgacgatccactttggacttttaaatggttctacaaccatttgatacaactacttgggtaaagctcactctcaaaagctagcctagcagaggagggtgcccaagtagtgttatatcaccaactaatcccgttcttggtcaatgtgggatcctaacagttgttaaataggtactcttcgaacatgcaataattatgtaccatctatgatgagcataatatgtgaactagaaagccttttgtgtctttatatggacagatcaccctctgtatttattctctctaactttctgcctgagattcaagataaatgggggaggtggggaagaaaaaggaaaaaggaagtcagttgtttagcgggcctgttgaggtttttctttagatgaaacggcgttcaattttagtttccaatgcttattataaagtacctaggtttctacatagctacttgagtgatgtaagtattttggaaagtattggctttgggacgttaaaaaaacccaccttaggctagggatgtgttttcagtattgaaaaatttgtaaattacttttctttggtaaaattgttcatctatctttttcaggagacgcacttaatgcattgaaaatttcactgaatgcttcaaacaatcagctcaaggactggaatcccaaccaagttaatccatgcacctggtccaatgttaattgtgatcctagtaataatgttgtcaccgtgtaagatattctttgttacttccccttcttcacagccattatacacggtgatacattactacttgctgagttcatgaaaactaatttatttactagcaaagtagaatgattgaatgcctaaaaaggagtatgttaaatgcaataatatttcagaggttgagccttctaagcaagttcaggagacttgtatagtattgagtaaacgtatgtttttaattttattgtttatttgcagaacattaccaaacatgggatttacaggaactttgtcccctaaagtgggagccttgaagaaccttaaagtgctgtaagtaaaaatgacctaaatgaaatgatctttatctttgattttctatattactggatggttcatttcctaattatctatggtatttattttgcattgtgtggactttcttccatttttaccttgaacctatttgtttctaacctatgcaaatcgtttgaagcaacttaaagcattcattatttttcagtaatttgtgcttgtgataatttatattgttgagctttgagcatgcggaaaattgatttgttatttctaccctgttttttcgcaccaactacttcgatgtttgtttttcctgttaatttgtctgtgtgcatacacatgtataattaatcatcccatttataatatattcgtgcagttcattgcaaggaaatggcataacaggtgtaataccaaatgaatttggaaatcttgcaaatttggccaacttgaacttggaggataacaatttaagtggaggaataccttcgtccctcggtgatttgaaaaagcttcaattcttgtaagtggaacatcatgcatatagtaatggttttatgtctaaaaacttttgcatctttcatacctttgtccttgacaatgatttcttggtcatatgcgagcaggattttaagtggaaataacctatctggaacaatccctgaatcactttccagtcttcagagcttaattactctgtatgttagttatctttagtatgcacctatggtagaacattaataaattaatttgtattttagtgattctttttctttcttttgcgcgttgtctaacgtatgattcgagatttatgtatttgagttgtaagtatacttcacaccttctttgtgtttgatgatgtggtatgttcgttatttacagtcagctagattccaatagtttcagtggtcggattcctgagaaattattccagatcgttaagtacaagtaagaagttcattctaagttaatgatttttattccagacaatatcttcaattttattactgtaatctctctcccctcccccccccccccccccccccccttcttacttgttcaccagcctaatcttttttttacttgtgtgtgtgtgtgtttttaatgtagtttctccggaaaccacttgaattgtggtccaaattttcctcacccttgtgctacagatattgatgaatcaggtaaatgggtcatagtagccatgtagcaatttcagctgtccaatttaccctgagtttatttagctattgctaagatcttaccactattgacaggcccttcacataagctgagtactggaactatagttggaattgttggtggaataattttcattctcttcattggtggctcgctttattttgtatgcaaaaatagaagaaaaggctacaagcgtgaagtttttgtagacgttccaggtttgcatttcttttaattagttcatgcataaattgtcttgtctaaaatagggaacatgatttaaaccatctaccacaagccttctatcatcattctctgtttagttttttattttatttgcttatgtgaaatcatttccatgctttagtttacctggattattttttactggaggatgataatttgcttggcacctttgaaataattacttttattatccttttcaactttgggttcaggtgaagttgatcgaagaattgcctttggtcaattgaaaagatttgcatggagggaattgcaggttgccactgacaacttcagtgagaaaaatgtccttggtcagggaggttttgggaaggtctataaaggagtgctatctgataatacaaaagttgctgtgaagcggttgactgactatgaaagtcctggcggggatgcagcttttcagcgtgaagttgagatgattagtgttgcagttcacaggaatctattacgactaattggattctgcactacaccaacagagcgccttttggtgtatccttttatgcagaacttgagtgttgcttatcaattacgaggtattt

SEQ ID NO: 185832 - DNA, 1688 bp, Cannabis indica
cgttttgggttggtttgttggaaaaagctacacacaaggatcttgtttaaatcctctgcgcgtttatgtttgtcataatggtggttgcattaaattttgtcacttgacagttgtaatgctgtggtttgcttgtatttcattgtaggaggaaaaggaaaatgaaaattttcttatttatttctcttactcatacgtacaattatttggtgaaaagtggtcattgaaaagtgattgctgatttcttttttaaggcgaaaaaaaattacaagtgatggctttagtttcgaaagaatagttgattaaagcataagaagacgtaaagaaaagatagtgttttaatctacaatacttaaataaaaagtagttttatttagtgatcaaatgagacctgtgtcaaaaggataaatgtgattttttttttttttttgagaacaggataaatgtgaattgaagtaatatgaacggctcactcactctttgttaccttaaattaaactatatgtaacatagtacattcaagtattaagaatggatcatttataatgtgatggtatttatgactccacttctataatacgtgggacattagacctagtaagtgcgcacgtttctccgttctagattatttatgtaatttcattgctagtaaaaaaaaatcagctgagagtcttcactcttcaattcattcaaacgaaaataggaaatgaaaaacctttggtggtagagtcaaaaagtcaaaaactggcttgtgggtctgagtctcagcaactttttatttattatacatagctagtactagtattactggctgccctgttcttcattacaacttacaagtcacactcacacactattttgaccctcaataacattgcttattgatattgaggcataagagccacacaggattaaaagaaaaattgaagagaagaggcagtgagggtccaagcctcctggggtggggaccagaaccagaaccagaattaggcactacgcttcttcttcattatttaatttcaacccaattaggctcagttaattagggctcattcaatgccaatgatacgggcttctttaaccactctcaaattttgattttaaggaacatgggccctccttcccccttctaagcctgcctcaccatgccatcattacttgtcttgacgtaatcactttgtatattttttagaagagaattgttaaagggctatgttgtaattctatatcgggtttcacttagattataaaaaaccgctaatcaattatcgagctttatttcctagtagtgctagtcaatgtggtacacataatgctcttgtgagaaaggaaaaacttttggtagctatgacaatcaattcaatgaagtgtcaatggtgttgtttttaaatatttggtcaaacaaaaagtatcgctattggatttattctcatatgttcttatctaatatgtcaattctaaaatttctagccactctaacttgtttatcttaacctagaaatagtagtgcattatggaaaatgtgtgattcttactattcaccaatttgtgatttccctctctatgtttttatattattattataatgctgggaatagctagacatataatttatgctacctcagtttttagatggggtcttctccgtatacatatttctaccataaacatatcttatatatgaatcgaag

SEQ ID NO: 185833 - DNA, 4112 bp, Cannabis indica
atataaatatatatatttttttacggtttagtttttatgtttatttagttggacatatttaaaagtaaatttattttatactttttacaccattttatatcttggaattatagttaaatactagatataaccctaacagtcacttagaattctttttctttttctgtctgaggtttgaagggattttggaagttaagtattttgctgcctctattgtttctattttgtatatgacatttttgagggagttttattcttgtccaagtacatgaaccaaactttgaaagtatatttgacttcatttgtaacttattaaataagttccatagctttcactttcagttctattgtaatatattatgtattaaaaaaaaatcaaataacacattatcgcccatcttctagccgtaggtacttttttgagtttctgcaatttcgcatgttcattcgtttacagtaatggtatctggatggagctcttcatttaatgctactttggtttttgcagacctttggtcttcattggtgtccatttggcagcttagcaagacttccttccacatttgagtaagcatgattttatgtattaaagcttaaatctcattttatatcttcttcaacttttatgcaggaaatatgggttgtctttaatttctttttcttttctttcagtgaagaatttttgcatgtctctcgtaattttatgtgctctaacgattaacaaacatctgctagtgaactatgtaaattaaaatctgaaagaaatcataaataatttgggtcaatcaattgttgcaattagatcaagcaatgtaaggtttctagtaatagtagtaaaaggatgcacttatgattttttttttatctaatataggcaacttgaaaggttgccattctggcatattggattgcttcgactgagcttggtttttgcgttcatgttaatcttccttatcaagctttgataatgcattcttgctaaaactctcatgcttagatttgatgtgtgtttcataatgagccaagtcttatttatccttttgtagcacattaatggcaaatctgtaatatttatattatgataatgcttcatgctaaacctgtcatatgttaacagaaagcatcctcctgttagagggtgtttgacatcataactacttaactgttttatgaaaacaagtaggagcgtctgatattgttttcagaaagcaaattttcaaaaataaagttacaaaaaatagaaaattttgagaacaagaagaggggtgttttctgcttcaaaaactcattatagttttcaatatttttttctttcactttctctcatcgtaattttgcacatcactctctctctctcatcacattctctcatatcattttctctattactctttcatcacttttagtaacatcattttctttctcgttactttatattgagtcactttctctctcctcattttttttttatagtttctctttcacattacttgatctcattattatcacttttaagaagatggtctcttattaaataaatttaatcattttttaaatcatagtttgtttatttttattttatttttttgaaaacattaaccaaacgtctcatgtttcctgaaaaaagaaaaagaaaaactgttttttgctctcatatttgaaaatacaatttcaaaaacaaaaacaataccaaacatgtccttggtttctgcgatgtgcagtaaacgtataccattatactttgaactattgatgatttaaattcttcagaagttgaaattaagtgattccctttttggttctgtagttttgtaattaagcatactatttttcatgctttatttattattattttgtttttgcaagtctcttttcctttccacattttcttgggtccaagtatgtgatcttactagagtagttattcttcatactaaacttcatcttttttattgcagggatggtgagttctcatcaactgcatgtaagctgattcttctatgcatttatatttttcttgctgtcttcatctctttaaccggtgatgtttcttcacgactagcgaaggcaagcatttgactgaaaaacctaatgttgcaatgcagatcacaatctacttggacaacatgctatttttgctgagcatacagctgtatcctcggctactcatccttgcccatatattacctactttggaccagtacacccgtcatcctcaaattccagtggaagtatttcagatggttctagcttcaacaatcattggcatggcacatcagcacctagtgatttgccagcttcttatgcttttcctgccatggatcttcattatcacagttgggagcaccattcacctcaattttctacaaccggcagtcgtattagtggagctgatcagccatctattccgcctgttggccaaaggccagctaggcccaattctgatgtaccaagatcagtttttgtgcatccattgcttggtcacaggtacactagacaaattaaagtctaattattaactcttttatttggaccaagttatgtgaaattaatgctttctgaatagtaaagacatttatttttgtttgtgtgtgtgcgcacacgataaatgctaacttcagacatgctttttgtagttctagtgctagagctgggagctcagttacttcttcaatgattcctccttatctaggtagcaatgctcgtaaccgtgaaagagtccaagctctccaagcatattatcaacctcctagcaattcaccaacaatgagggcgcctcccatttcaagctctcgacgatccagcagtcatagaggtatggcccaagcaggcccggcggcatcatcatcagatcaaaccggtggttactactatttcccatcggggtcatcaggtcgtaacttccaagaaggtgaaaatccattgcccagtcgataccaccattcatgggaaagggaacccttgccttcatttacgtcaaaccaggttgagagagatccaggttggggtgcttttcaccacgcggctggtgggtcagattcaaatctaagaccaaatggcttccggcaaaggcatgggtctgagagaacctcttcacagaatcggtcatgagctctcctcattatccttactgggtgaagcaaactatcagtactatgaatgaaaccaaaacattatgtaatgcttttgaaaatggtagatatgcctggtgtctgtcatatcatgacaggcttcaaatacttttggagtggccccaaaaacaatatttttggctgccatcaggtggtgtgaaggactgtgttggcttcctctttagtttctttgccttgggaggatatagaataagacaatttgttggatgggcaaagaagaaaaagaaagtgccatattatcggtcatgtgacccaaaatgttaggtttgatgaagaaaaaagaacctaatgctccacaggacagtttaattgatgggtcatttatttatgtttgaaagcatattcgtcaatgcttttgtttccctggtgaacaattgttttcgagtatataagaaatgaggactttttccgatcaaacacactttcgttttctttattgttagagaatacatgagtgaatgaatgatatttagcaatcaatgttaggtatgtgcgatcccttgatgggtgttactcaaatggtaatcaataggtatcatccacaccttttaataaagaaaaatgggaattattatcttcataacataataaatggatgtttgggagagagccaatataagggttagtatattgtcgagacattaatggattctgagaagtgaaggtcatgagataaaagatatatattgccttggatagattttttttttttttcagaattgcatattatcttttttttttctaggaggaaaaaatgaaaattttcattaggtaaatcagagaaagaatattttctttttacaattttgttaaaagaataatttatagttttttgcttaactaagaataatataacgaaatattagccggtacaataatataatgtcatagactcataagtacataagcaaaaaagttaaataagaaaaaactttttgagactcttcttctgctctgctc

SEQ ID NO: 185834 - DNA, 952 bp, Cannabis indica
tttcaaaaaaaaaaaaaaaccagttgacttgacataacaaccgttagaaaataatttattattattattattttttttcaaacgtatgtacttgtttaaccggcaaatgaatgagtgaagtaaaacctcaaaataaacaaaaacgaagtaaaaccacaaaagcaagttttagggttttctctatcgacccctgaccctgtctctccccaaaatagaagggtgatagtgacacaatcttcatggaccgtcttcgtcctagacaccgaaaaagtttcactggctttacaaagacagaggtaattattagctcaaaaattgtttatacatatatattttcatataggggtgtgtgttcgtgtatacagcagatatatatcattgttatgtttagctgacgaatcattgttttttaaatttccccatgaaccatgaaataggtccttttactttttgaaggaaaagaagaagaagactattgttattttattactttcaattaatatatacacgtatgtgtgtgtgtgtgtgtgtgtgaaattcttatgttcttatttttgcagatgtgcattcctggctagataaatattctgtttagtgatgagctaatttttcctcgtctccattttgttttcaaagatatacttgtgtctgtgcagtgtattagtgtgtttgtgtatgtgtgccgtgtagtgtgtgtataaaatatatgtatatatgttgctaattgccgtttccaagctgacaatgtataatttttcctgattaaaagaagattacttttcaatagtttgattgtttgtttactcctgtgagttcagtaagcatgagtagaaagtttatatattgagaaatatcacctttcaatgacaaacagggttttaccgttttttttattttgtagcttgtgtctaactaaaatttattcactcatatatatatatatatatatata

SEQ ID NO: 185835 - DNA, 2144 bp, Cannabis indica
cttcatgtactcaagcagttcattcccatatatattgtataatacaagtaattaaatatattaaaatagaatcaccacaaaataaaaacaacagaatatatactggcatgtacttagtatgagacattatacactaattaaatgaatatattagattagattattatataatttgttgctaaatgcatggtatatatatatatatatatatatatagtacatatatgttttaatctgaataacttgtattgtgataaaaaattttttttgcataaaagtcttagatcatattgatattaaataatttgatttattttatacgtgacaaaatttgtgtaattattatttgcatgtacgtatcctatggcaggtcctctgaaaaggatttaaaggtatttttcattttctgtttccatcacatgcatataagatacttccttaaacaaaaaaacaaaaacaaaaaacaaagaaacacatatagataattattttcttatgtagttttacgaggacttttcacaaatttttaagaaaaattctaaattattatttagggtaccaaaattaaaattaaaacaatttgatgtacacccgcaaggccagccagaggttgaacggtcaggggccttggggccaaaatttaaaatttatatatatgtgaaaaaaaaaataaggagacaatggcataattgacaaatatgggattttgatatttgaataaaatttgtttcaaatttcaccctagaccttatatagttatagttatagttatatgtaaataatttgttacctgcatgcagagggccacagttgggaggcttcaagatcagaaacataaaagagactaagataatccttccactcaagagctttctcagccaaaggagtgaagctggtgccataccttacactattcgaaccagaattctctttcgaaaacttgttcttctcctcagctggcaactcaaagaaccgatgagtcgccttctcaactctctcgataacctcgatcggaatcccatggttcacaatttggaaaaaaccccacttctccgcagcatcacatatcgaattcccagttttcgggtcgtcccacttggacatatcgatgattgggattgattttccagccaatgtggaagaagtttggtcatgattgaaaaccctttcttggattggctgaatgtattgcttggggagactcctgaggccagcttctgaaagaccctttactccaaaacccttgtggatcacaaattcagtcacctttgaaggctcagttgtgcttgtaatatttgctagtgttggagccatttttgatttgaatggtataataaagctagctaattaaagagaagttatgtatgtaatttggggttttgataagtttatctaacatgcaaggtacgtatttatagactcgtgttattatattatgagtactcaacaactcatttggcaattggcatgcttttgtttatatatatttatttagtattttaatgagttgagatttcggacctacccacttaactatttattgcatggttaatgttataagctaaggctatttacaaaaaaaaaatattagaaaaaataaaaaaaattgatatatatggaatgtaaatttaattttactataatattttctttaaaaaaaaatttaaaatatgggataaatccaaacttatttggatgaaaaaactaatttcttgataaaaaaaaaaactcgtattttgattaaaaaatcagttttttgataaaaaaaaatctttggtgagtttggctctgaccaatagacactggattggtgaattgtcggtcgccgtttgtcagatgtggagctggtgaacaaaggtgataggtggagctgttgaggggagggggaggtagggtttgacagaggagaagaaatgaaattttttgttttctaaaattgatttatctaaagattaaatatgggttttgaaaattatattgacatagcaaataccataaaatagttcaaaaaaaataccataaaaaatagccaaacttaaagctaccatatttaagtaacaaaaaattaaaatttcatattgagtgtaaattctattataagttaactcaggaccggccctgaaatttcgtgggtcataagaaaa

SEQ ID NO: 185836 - DNA, 2451 bp, Cannabis indica
aaacttctcgctcagtacttagctaagatgactttagatgttaaagcttcctcttgttggaacataatattaattttatgacactattttaattatttttcttttaattcctaaaattatatgttagtttttttaaaactattttttttcaataaccaaagaaactaaaataacaaaggcaattaacttaaagacaaaaaaaaaaaacatgttcattaatgtatacatacacaacacatatataaaacaatcctctttcttgctatttctttattataaaacagtttttttttaacaaaaataaaactcacatgtatacgtacatactaccatactgtgtaacctttataatttgactttaattttattaaccaaaaaaactatcccatatcatgaggtacaaactaaggggatcagtagaattattctatataaatatatatatatatatataaaaacttagtttggttggtcgggttgattaggcgggttggtagtatttaaatccgttcaatctattgggtgagttatattttcgtctaggttttaagtttgtattttttatcgagttattttaatttagttgaattggatggtttacaaaaatttatatgcagcctaattattgatatataaatttaattatcatactcacatattttcaattcgggaaacggcaatggacacaatcgatatctaataacgatgctagttcagaaaacaataatattcttaattcagaaaattaatataaaaagagtaaatgaaatgtaattacctaagataccttatttgattcattttctagtctgtcacctgtttttatttcttcatcaaatacataataaaaataaacatataacaccttatttatatccttaataatttaaaaaaaaccatttttcatcattggtatattaaatatttaatttattgttttgtctgaattattttcacaaacaaaaaaaggtgcaagtgtgagtgtgcaagcgctcattgttacctgaagagtgacccacaaaagagatgagagcgtgtacttgtaaatctaaagaaaggcccacgtttttggttcttgtctgattctttttccaatcaaaacaatgccataattgcagccgtttaagtgagcaatgaattgggaatactataattgaataataaagcttagctaagaatatttaatgccacacacacaataatgggtttcaacatgataaactaaaaaagagaaatgaagagaccatatatagagtcctcttcaagctaggttatgggttcgaatccagaacctttaagctattaaactaatatatgattgtaaaatataattacgctatactaaaaaaaaagaatcctcttggactctgagtaataaactcccggcatgagactttgacacgcggttagatacgacacaactaaggccagcttagtgatagagattagagagagtacagctataaagtgacttgaattcaaatacacaagaaaactaaccacggattaagctggcagatgataggaatttgcaagaaatgacctaagagacgcccaaggaccacaatttttaagcacaacaaagctatttaacacgtgcttaaggcaccatacagtcatcattaagtctcatgctgcacattttaagacaatgtgctcgtatttgggggttataattgaggcctaaccatgcattaattaactcctacaatttttatttattttttggtaaaagtcccacaaacttaaatctatctgacattaaaaataatgacatagggtcagctaatttaatggaaataataataataaacaagattatcttaagtgttttcttgtgctattaattatgtgctcatagggtagcatattatttttatcacagatcataagtattaaaacacacttataatatatatatatatatatatatataacttattaatactcataatcatcaatcaagatttatattttatttagagaccaaaagtaagataaacacatacattttattgataatctatgtgagccatttgataccaaaaatctccaatatagattaacacaagcacaaaattagagttctcttagagagaagcaaaatgtggaactatccccttctatctttctaattactattataattaaaccccttttacacttaacacatatatatatatatatcacatcttcgtagccataatgggttatatactaattgaactaaagtacttcaattaatggtataatataatttaatgagccaattataattataagggtgctctcatgtgcctctaacataataaataattattaaccatttcattttggttgttgataaatattagacacattgttaataattatggttatggaattatatctatgattatataagtccacaataattatttcaatattttctcacttggacaatataatcaa

SEQ ID NO: 185837 - DNA, 1626 bp, Cannabis indica
tgatacttcccccaattcttagtttagcattatataattgttcttacaatggatggatatgtatacttgatgaatgtgctttcaaccagattttttgattaattgcctatagttagaaagcaactttgatagatagcagattctacggtaaaaaaggattttattaaaatataatctgtaatccaacttaattattttctcatgtatgtatattccaaactagtgtatagtagctgtagtggaaacacaaactaaaatcagtatctcgctgtttaaaaattttcgacttctattatcagctctcaagagattagttcatcattttcatatgatgtcactttttaagttaactaatgggacttaaagaaaggacatggatttgattccactcagcaccacctttttgacccttattggcatttactaatctaacaatttttcacactctggtgcatttcactcggtttgcctatttctgttccccaaattgttgtagatagaattagaacggaataaaaaagctaataataatgtcttttctatactttggatgttatatctgacatttgttgttcccgaaggagagttggtacatgtagatacagaaacttttgagaatcataagattccatctcaaaattaattgacaatcagtagagtagcccatgttcttatatatgttttcaattccctaccatttattccatgtggaacaatgttcgcaatagaaacgaatggttaattcagctcattctttagctatttctcagagtctaaaaactgaaatatcatgagaactacttccaacaattctaatattgcttccgtattaacatataatcatttaattgttttataaccatgcagaatatcacttaaaaaatgagcttattgaatgtgtgcaaataaaagtgacttgtgatcaaagagagtatcaattaattttgagttactgcagataacaagagaaggcgacccagttcagagaatgctgtttgtagtaagagggcatctccaaagcacccaagtcctccgagacggtctcaaaagtttctgcatgttgggccccggaaacttcagtggcgacgagctcctctcatggtgtctccgccgacctttcatcgaaagactcccaccatcctcctctacactcataactctcgaaaccaccgaggcctttggcctggaagccgaggacgtcaagtacgtcacccaacacttccgttacacattcgtgaacgagaaagtgaagcgcagcgcgaggtactactctccagggtggcggacatgggcggcggtggccattcagttggcttggagaaggtacaagcataggttgagtttgacttcgctgtcgtttattaggcctaggagacctctgtcgaggtgttcgtctttgggtgaagaccggcttaggatttatactgctttgttaacttcgccaaagccaaaccaagatgactttgatttttgagatactcaatcgtgtgttactatatatactctgtttttgttcataataaaaagttactatatatttttatttctcgagtttaacaacctttcttacaaaccacccttaaatagttgtttttggtttaacactgttgaaagaatatacgaatt

SEQ ID NO: 185838 - DNA, 4078 bp, Cannabis indica
agctcctttgagtctggataactcgagactttttctaagtccacatggggcttgccaatcgtatgcttgctaactcttggtcatgtctctccagcataataccagagacgagatttagttgttgttcctgggggctgttgcccacgagtccttccttctgtgggaggcaccaatggtgtgtcttcccttggaggcaggggcttgctatttggatccaccaggatgctcatatcagtttggccagctgtgatggccgggcttatggtgcctgttgtaggataggatttaccacatctacagtgttcatggggattccagttgtgggtggaacctaagcatttagatatgcagtctatgggtcttgagggagacccaaagatgcagatggtgcaactggggttcttctcgtattaacaatgacatttgatcagatacgatatccaggctcttgatgaaagtaccaaactattgacctcaaaaagtgatcaatcgatagcggggtcgtatggatctaatgtttgccacgtgttaaatgaatagaatgaaaaagtaatgaacacacagatttgttatagaggattgaccccctttgatagcgggtaatgacttactcccctattagctgtattaataccgagggtaaacactattcaaatcactatatgtgggatctgatatagcaccctgaagggtactaagtagaattcgagattggcaaatctcaagcgtagagatagcttgtatgggcgtgtgagagagggagtgaagaagaggagagttattagacttggacttagggcttggagactagtatcaggcttaaactgaacttagattcttaggttaaagttagagcctttatataggaagcctaaaatcctcaattatacttgaaaccctagatatttgtatattcaattaattaattataaaagaccaaaatacccttgaacatagacattattcaactattctattaggcttttagggcccaattcacaacccaaatgatgttgtccacgtgtagaattgcactgaaaaccctgcagagcttctcttggctggccaaacccctgtagggagcaagttggctggccatggtgcagtcgagaggctggccaaccctaggtctggccaagggtggctggccagcttctgtaaggaagctagtccatcacttgatgcccatttgagtgtcggggtctccgtttgttaaggtactgccttgaccttctcgttggtgaattgtactgccacgtggcactaattttgtccacgtaagcactaccatgtaaggaggaaaaaattagaataacataatgaaacaatggtgagatgtattttcaagttttttttataaaggctctcaatggaagcaccaaattgttaactcgaaatttcattaacaataaatgaagccttgtaaataaagaaataatactaataattaataaatatatgtagaacacaaaaagtttttatagttaaatctacatactccccaagtcattcttatttctaaatctttcttgggaaatactttgattacagaagaattaatatgaatattcacttaatcgcacggtgtttcttcttaaaaacttatccaactattttttcttaggttctgtccctatttataggggtttttcctatgatagatattctttttgatcttgtctaggtaactattcatgaaacatagacaatttccatgcttcatgtttacaacatgtggataaaataaaataactgatggtaaccgtcttttgatcttatctggaggtagtcttttgttatcgaggtaacacatttaaggtatgactcgaatctttcaacggttctcaaggataactagtagcattttttgagatgatagttaagatgttttattctcgctttagcctttctagggtaacccttagacttcgtcttttgaaataagttgtattatgcttatttctcttagtctttcaacatactcacgagtatgtgggtcaataagttgcaagctcttaaagaactcgttatctaccatttccagcgatacatttttgatctattacatctgagaagacttctatcgttatcatcttgccaagcgttgcttgtctcgctatcttattgtaaatgcatagtgcgaggttgatactgctcgtaatcaactatcccttccgagacaattcatttattaccgagttctccacaatatttgtttccaatctttcaagtgtcatgtccatatttatgactcgaaatatgagcataagagtagttatataaaatgtggaatcgaaccccacaatctgcaactgcccacactcttaggtaactactattctactgttataaatagtagtgaaatgaaaggaaaagagacgacgaatttgatatatgaatactctgccaaaatatgtactcattaaacactccgaaaacatactgacttgtgaactagaaaattttaattaccgaaccatgtaaaattttgtctcttttattttactttactgcataattgttaattcaatcctttcattaatttgtagcatcaatcatctaaagctttatatattgttattgaatttttgagttaacatgtaaatatttttatttagaatatactttcgaaatttaaaaattatataactaattataatttagaaatttttattatttataataagttaaaattgtctaaatttgtaataataaattagagattattattgaataaaatattaaaaatttcattgtaaattatatggtagaattcaatatatatataaagagggttcaatatgtaatgaatacttgttcaagtagtaatatgtgtaaatttacaaatttagaggtcaaaataaaatagggaaaatacttcaggggccgaacaaaaatatattacgcgggcttctggtaaataacggatgacccgacccattaataagaaacggtgttcttcttcctactcgagactcgagtctctgtaatgttatccacaacatacgtgtctttgttcaaaagctactctcagttactctctcaattctttttttcttcccatattttcactcttaattttccgagaaaatcagacacagaatttttgagctcagcacagaagagaaagtttgaatctacaaagtagtttttgttgcgttcgatttttaaataccgacaaaaggagggaaaaagacaaagaagaggccatacattcaaaatgcataatctcttgtaagtttgtgacattttccgtcaaaaatttggattatagactcagaaaatatccgaaaaatcgatttctctcaccttatgcaagccaaatagcggagatgaccctcgcgccttcagtatccattccgagtgcttcacctctccccgccgcagtcgccaagctaaacggtaagtcgcaccgccaggtatcgtttctcactaagtcgctctatttgtttgaacacaagaggttcttttctggtcaccggagttttttctcttccggtggccggaggttatttccggtaagggcgaaggcgaaagaagtcgttcttggcaatccgaccgtgacggtagagaagggaaagtacagctatgacgtcgaaaccctaatcaacaaactcagtagccttcctcctcgaggtagcatagcaaggtgtcttgacatgttcaagaacaagctttcgctaaacgactttgctttggtgttcaaggagtttgcagctcgcggcgactggcagagatcgcttaggctcttcaagtatatgcagcgacagatatggtgtaagccaaacgagcatatatacaccatcatgatcagtttgctaggtcgagaaggtttgctggataaggcagctgaggtgtttgaggaaatgccaggccagggcgtggtccgtagcgtcttctcctacacggctttgatcaatgcctatggccgaaatggacagtatgaaacctcgcttcaacttcttgagggaatgaaaaacgataaggtgtcgcctaatatattgacttataacacagtgattaatgcttgtgctaggggaggtttggattgggaaggattattaggtctatttgcaga

SEQ ID NO: 185839 - DNA, 5957 bp, Cannabis indica
aaatgaccaaaactaattatttaataactaaaatagattattaaataatattatcatttaatttaattattaattagacatataaagtccattaataaataaataaacctagaatctcttttctttacaatttcacccctgcttagtgaaaattcataaattagacatagtctaactttagaattataattgattaatcacaaatcaattattgagtcttacacggttaggtttcttttgtgcttgcacagttacagcagaggcctggaaacaagaacagagtaacataacttaactttcaaaaacatcaagaattaaccgaaaaccatccaataaagcatcatcaagaatttacctttggtaaaactggtaaagaagtactggtatttctgtcttctcgctgcactgaaacggcaagaccctccttcagaaccccagagtttccattgcacaatagagtgctaggactattatccattacagtgccatcagaggtgctttccacagtggctattgcaatttcagatgcttcagggtcgtcgtcgactactacattttcttcagatgcctgcacaatttgacaaatgataaaaaaaaaccaataattctagaaaaaaaaaacaaaacaaataatattttaactggtccattctcggaaatacatcaaaacattcaacaacaaggcattgttagctcatctgaattggaaatcgttactactgcttaccaaagcagcacgcccctctttcagttgttcagcaacagcttcaaattcaggagcctttagcttgttagacctaacgacgttaacaacagcaccaagcttctgctcaatgaatgagtgctttgacttgaccaactgtcgtagcttactggtagtttcaggcatcttcttagctatatagcaacaaaaaacaaagatgcaaacatgttttagaccactataaccgaaatataagaaactaatacagaaatatatagccagtactttcatcttctcatttaccaatttctataagagttttatttggcaatatatagccagtactttcatcttcagtacgcgccataagatctcgccacccacaaagtccctgcaaatcatgtttcgaggacataaaagaaaaattaaaaaacctcagcaaacaattttagaagacacaattcatcccattcatcagcgaaccattcttagcaagaagtcacatataacataccgaaacaactgctagctgctgagcatttaaaccagcctcttgcaacctgtattttaagccaataatagtttcattagactgatattatcatatacaaaaatagttgaaaagcaaaaaaacataaaatagaaactatacccatatatatatagatacgaattttcgttctggatctctttctcatagagctggatacataattcgtaactgcgcttgtaaacctgttgaccataataattttcagtgttgattaataatgccacaataggaaattatgtacagcttaacagcttgtattaaacaaataagaggggagattttaaattgcacaaatagcaagaagggcacaccaaatacataaatcatacctcttgtaaagaaatttcagagctttcagattcctttgacaatgagagcaatttcattctcattaagtcatatatatgcaatagatagtgcgtatcttctctagcatatctgtcattccataaaagcatattagacaaccatggaggttgaaaaacttgtacacagttttctataacaggaaacatgtttgatgcttatgtaaaataaacattaataataactacttaaagcatataaagaatttgcagttctacctaagcatctccttaggaagtggccgcaatctccaatctgcattttgatatctgcaaagagttgagagatcaaccttacagattttgaggacaagaaataacacaagaaaggatgatgcagcaaaagtggcaatataaatatatattaaacgaaaattgtaaagacattaatatcagtaagggaaaaaaactgactctttattagcagttactccacaaaagtggtgtagaagatattccagactatttctctccaatttcagtatcctcgaggcctgaggcaaaggaaaagagaaaaacaatttcagtaacagcaaagctcagaactgctaattaaaaggaaaatcgttataaccttgttctataattactgcttacgtatggtaataagctatcatcagaatattaactgaccaaatttgaggcattataagaataccaaaatgttaggctaagataccagtgacaataggaaactacttctccatgtatagaaaaattatacagattaatcaattgaaaaaacaactgaaattaactccaaaccagtaaatgttatgatataatacctggccagtgtcaaacatattgcagatgtaaatgccgaaatctctttgaagccaaaaaatatcacgatctgctccatgcatcacctaattcagcatacatataatcataaattctggtgttctttaatgagtagagaaaagtaggtgtcaggaaatcaacctttcttttgttgggtccttgaaagcttctctaagatatgggccaatacgcgttcggagcttcagagcatctattacaaaatcttcggttctcgttgatatttgtatcaaacaggtcaatccttggaatgaacgatattgattatgttccaaatcaacctagataggaaaaatcaaagttaaaaagtgccacatgagcataattctttttttcttttcatttgatgatggagagaggctttggtttgtcaaaagtagaaaattgatggtaaacatctaagatcacaacaagaaagctaatgccaacttcagcaaaatcattgttgttgtgatcaaagaaaatgtaagaaacaatatcgagtttcataatacaccatgtgcagaaatgcttacacattggcagaggtttctcaataaaaaatttaagtatgagtttcataatatacatttcaaatccatttctttcaaagaatccaattcaagaaactaatcatccacaaagtaaaagcaaaaacaaacaactttagaaatagcttaccgcaaattcatttacaccactcagcttaatagccaggttcttcaaatctattacttcatctacaaacgtgaatggtgtagtctcaactggacttggctttaccggttcaatatgcagaacatcactatctttatcaacaaaatccataaaagaaaacttcttctgcaataacccattaaagaaaaaaaaacactaccaatcataaacaaaaacaaagaatcaagcttaaatgaacttaaagaaaaccaaagattactcaccagaggatgaacatactttccatcctcactcttgtccaaccaaacatgctcaaacgcttggttattattattaacaaagatattaaactcctgttgaggtctcgtaatcgaaggtatatgaaacggaatcttcggcttcgaaccaacagtggttttcttatccttagtcgcaaccgtaatcgaagaattagaatcttgaaacccactcggcaactgatttgcccccttctttttcttcccacataccaactgaaacccatcattatcatcaacaaccgaagaactcgcattcataaccttcccagcagcctcctcactattcctattcctctgaaattcatcaatcgacatatcaaccctctcgaaaatctcgtcgttagcattatttaaccaatccatagcctcatccatatctacaggaaaaggcatatgtttgttccacatacgcgacgaagaagaaccaactgattcgagcaaagactgtgatttattatcgatttcttgaattggagctcggaaatcatcgaagttgttgtaaaaatagaagtctttgttcgacggaattcctcgcgatgagcctgaaagtttggatagagacgatgctaatggacctttggttagagtatatagggattgagccttgttgggtgagtattgatcgacgttcatggcgtcttcggccatggtgatcgaaaaagttttgattttttttttctgttaatttcagtaagggttttagggttagggtttaagagtgatcaatttgggattggcttttttcacacacttgacacgtgtgaacatttctttcgaaactgaaaacggtaaaagctgttaccacttaccacttttgtttcatgacttttattatttttgctaagtgggacacttacaatcttttattttgccataatagccctgtattttacaagaatttataagaatcacgtccattttatacgtaaaatgaaaattaatttcaaaattacttttataaattttaacattataataatatcttgtcacacacgatgtaaaaaaataaataaattctaaattaacatattgcgcacatagtcttctaacgagcacgtttaactttagaattctaaaataataaaataaaatacacattgttaatataacttattagaaaataaaagggcgtgtaaaatgatcgcgaatagaaaagatacgagaatggcagggagttctatcctaaggcgaaaggtgttagagcgacggatcataacaaagtggttgatctctttacgaattatggagactgggatattcagaatttaaattatctttttgataaagaatctgtttcatccatcctaaaaggggtagaccctctggccagggtacggataggcatggatttggacgaaagagagtaataggcggttctcgtgtaaatctgcttggctcatctaagctttagaaagggctcctcattatgatgtagctccatccctctagcacaaactgtggaatagtaacatattagaacgccataagatgatggtggtgcatactttctaaggccctccctgttcgcgctattctttttaagagattccatataaaggatgtgacctgcccattatgtgggggtggtgaggaaactttggagcatttatttctcacttgtaatcgggcgtttcatttgtggcggtcgtccccatgggggatcttttccatttttgattctggcattcatttgtgggattcggtcaaattcatctggggactaggaaaacaaggcattaatacaggtgaagtctttctttatgcttcgaatgttgtcaatacaatttggcggacgcgaaatgataaggtacacaatagaagtttgaccaatgttaatcagtgtattgactatatttattactcttatgcagattataatgcttctttttttccccactccttccctgtgtctggaagcgggttgcttccaccccctcttgagtgggtcaagctaaattgtgatgttaaaattagaatggaaagcatgtgcattgcagttgtggctagaaaccacattggagtggtttgtggggtacatacagctagattagagtactctgatgctctttgtggtgaagcggctgcatgttgtttggcgctggatgttgctaaagaggaaagctagaagtatattatagagagtgattctagggtggttatcaattcgctcaacgacctagattttcgttgggatattgagaactacgttaagttgtgtataagactctctcaactttttacttgttgtaattttcaatttgttagcagaacttgtaatttatatgacccataatgtgatcaagtgggctttcataaacaatcggtatggtcggttgtgtgtttcttctattccgaacaatatcctatgtaatgatcgtgaggtctaatttctatctatgcacgtttcattttcaaaagaaaaaaatataggtagtatctatcaatctatttaagtcatcttcaactgtgtatttcatacctacatagtcttaaaattaactgtgacaatcaatagttccttgatctgtaaatagaaatattgggtaagttgtgta

SEQ ID NO: 185840 - DNA, 3270 bp, Cannabis indica
taccatcattgatcacggccatgacacataatatatatttacctataatataattaattccattatttaaattaaagtcaacaaaccaaaaaccaataataataataaataatatattattgtcccgtacgtacacatgaatatatgatcatatttatatctattgtcttttattctcaaactaaaaaactttaaaattattaacatatatagtcaagagagagctagcaaatcaattatatatatctagagaaatattaaaaaagcaccactaccgatataggccagtctaaagtaaataagataaaataaatttagaatcttatatatatttaattattattaaaataatagtttagttgatgtaacttttaaaaattacttaagatctccattaatgttctaattttctatagttacacattaaatatttgtttttaaaaaaatatatagagattaagaattcatctcttgatatcttagctacactagacaatattattacgttttcttattatataatattttatctatatatactaatgcttttattttctcaattttgggacttgagcatttaggagcttgagtcgacgcacgcctatttcgtctattcttaagatcggccttgattaacagtcagtgtctaacaccctccaacttatcaaattatttttggtacaattaacactaaatattaaatctcatataatttactatattaacttttatagaatatcattaattaattataaggccacatcttagtaccatcattggtaccttatggcttatgctcatatatttttatacaaataatatgcatgctaattaactgcatgttttatacgtaattgtttagtcaattagacagccattatatatgaaattaataataatgatttaatattgactatagtctgtatattatgcaatggaatatatctgaacatcatgatattatcttagctcttaccctatatatatataggtgttatatttatatatataggtggacttataataataaaggaagaaatatgaacagaaagaaagtaaagcaaaaaaaagctgatgagaatataatgaaagtggcaaacacaaatttaaagtaaaagtcatgaccatgcatgcccaaccattaaaatatatttaataaaagttaaatataagtttctatatatataatacgtaggatgtaattatatgtacatgaaaagatatatatagtacacattcaaatatatgcaggtgtagcagagaagaggtatccaattcctcatcccaattctagcatgcggtcaccaatttatttgattaattataatcctttatattatatatatatatattgtcacacatatataataaatgatattgcatgtgtgtgaagatctagagctaataatatatgatctttttgtggagtatatagtagcaacatgatgacttaattagggttacttatatattggcttcctacaaccactaatacaaaaaatcacgcacgtttgttgtgactaattatgaattttttttatattgtgattaaaaaatttatgattaatttatttattgattaaatgtgtttttaatcacaaaaaatttgttgtgattaaaattaaattagtggcaatttatatttaaatactatatattttatcataagtagtttttattgtgattaaaattcacatttagtcacaaaaagttataagttatattgtagtaaactattcagcaaatataaaagttttattttcgccttcacttgataaaaaattaaaaatataatctaaattatttttgcaataatacattttagttatattgaacatcccgttagtgtttgagaaatttttaaataatttactaagattaaatcattatttagtttgcaatgcatgtaaattagactctttaaatctttattttcattaaattatttaattttttaaaaatcctatattatttgagtttaatttctccacgtgacataaaataaaataaaagtcccaaaaaaatatataagatttgacatatacagacgtacacatatttattctgatttagtacgtacttgaaagaacaagctacgtacgtacttattaattctccaacaaaaccattatcattattgatcaaccttagctaccttccattcattaagtatatatatattatacacctatatatggtcttttccaatacctatttaattatatataaagctaaaaagtgtttttcctgaattttaatatgtattaaattatgtatattgaatttttaaaaccattaaaaatccccttaaattattgagattattggatttgaaaatttttgtcgaattttagtaagaaaaatctaacatggatgaaaattcaagaggcgtaatttgatacatgtcaaattcgagggacatgattttgtagataaagtttggagagcatggtatgatctagtacataaataattgaagtagtaaaattgaatgaaatttgacaaaaaattttgaatctaacgatctcaattgtgcagggagaatttttaaaggctaaaaaaattctgaaggtatgatttggtatatgttaaagtttaaaaaataaaaattctaataattaagtctttatataaataagctgtaggtataggagagagatcatttttcatttagagctagagaaatctcttcatttatatgtaatattattttaaattttgtgttatgtaaaaattattgattaaatattctctatttattaataaatgagtatttttcaaaatagtacaaaatagtacccctgaactaattttttaacaaaataaaatttaataataactcgttatagatgtgttatgaacattttatttatttgtttatactaaaaattatctttaagttggttatttaaaaaaattatcaaaaattaggcttagattactattatgtactattttgaaacgttctatttttttatttaactaaataaaaaatcttcgataactcttataatatacatgtctacaatagtattaaccctatgtgtacacataatttactttagtctaatatatataaaataatatataaaggtgtaataaatactccttcattgttagtggggaacatataacttataacatgggggcatctcatttttttacaagagctatacatgtataactctattggggaataagctaagtcttctctttctctatctctcattatatatatatatatatatatatatatataataaatatatg

SEQ ID NO: 185841 - DNA, 1701 bp, Cannabis indica
ttgtcttgctcgtagctcttgtttgtatccagatcgtatttttagtgaggatgatgttcctcctgattttctttctattgtaatggttgaatcttcttattaataaagttaccattttccttcaaaaaaaaataaaactccaatttacattaaaaaaaaagtagatattaattaagctatccaaaccaataagtccccccatattttaaacaattatgttttaattaataaaactagagttatataaattagagttaattacccttgtgcgagtttggaaattcagctaccaatcctttataattctctctttgaatgaaggactttggttaaaaaaaaaaaaaagaacatttgacaaattatataaaaatacataattagaattaactaacttgaagagagagtatatatatatagtgaaagaaaagtaccaataaatctctataaataatattaaataaaattatcatattttttcctgattttttcctattatatttaattaaaaatcaaataaatgctaagaatcaataataaagaagacaaaaagtagctcaaaaaaaaatctgattgaagtttttcccaaaacaccaattttctttttcttttcttttcttttctttccctttccctttcctttctttttccaaattttcctgagaaagtgacagttcagtaatcagtagtagtaagttatagggtcacaacaagccagcctcaaagaggtttcttctccttaaagtctcatccacaagcttgaaagtcttcttaacgagcttttgatcgagcgcggtggttctgtagatcttgaaaactcggtctactctatcgggagctgtgctttgaaaatacaattcctcaaatttcttcttcacaaacctgaaatgaatggagagatttgaaatagttcaaattacttttccgaggaaaaatctcgacttacgatccccgcttaaacttttacaatactgcactagaaaactatagcaattgctaagcacatcccgagaataaactcgaaccttttatgggatcatgaataatcttcaaaggtgaaaattagtggtggcgattcgtgttgttgtgtcatatttgtgttcgtgttatgcaaaaagacatgtctaattagttaactgtaacccgagctatatatatttcgtgttcagaaatctcaaccctgacttaatttgctaagcactcaacataggtttactatctttaattcgaaaggacaacgaaagaggaaaattattactcgtatgcatgttcaatctcttgttttcccgttgataccggttgataatctttaaaccactcgcatgtattaagcggtacctgcagaacagagatgaagaacatttaatcgaaagctaattctcgagcagcgttataaatggacattgttcgctactactctacttacatttagcaccttcttctcgaatatatcgaacttgtttagaaacagcatgaaggatgtcttctgtattccaaaaccgaaaaaaaaaaaaaatcttaagcattcttgtcgatacaacaagcaaagacacaataaaacaaatgtagcaagaaagaaaacctacgaacacgttgcttcaagaccatcaagagttcttcgtctccatcattcggttcttgttttctatcttcaaatagtgtttgtatcatacctaagaaaacaaaaaggaaattaggcttaaa

SEQ ID NO: 185842 - DNA, 3909 bp, Cannabis indica
atttgtaggtcacaaggattctgtgtctagtttggcatatagttctgatgggcagttgcttgcatctggaagctttgacggggtcatccaaatatgggacacttccacaggagatctcaagtgtgtgcttgatggtcctggagatggaattgaggttagcttgtgaggcaatattgattgatgtgatactgttatagctattgaaactgagtttgagcaatgtgagtttcagtgggtcagatggcatcctagagggcatctcgtattagcaggttcccaggattccaccgtttggatgtggaatgctgacaaaggcacctatcttaacatgtttcaaggtcacagcagcactgtaacttgtggtgaatttactcctgatggtaatgctaacctcttctcttgttctttgataatgttttccttttcgtgctttacaaatttgctgtgcaagtctctcatttcctttgtctctatccttttgttattcatttttaaggtaaaacaatatgtactggatctgatgatgcatctttaataatatggaatcctaaaactggtgacaatattcatgctgtaagaggtatgtccttgattcttgctctgaaatttccagtttctttgttttttgtttttcatagttaaaagtaattgaatgttgaacttagtgaaatctgatagattgtcttagggttctacaaatttaagatgatgatatgtggacttcattggaatgcatcctgtaataatggatttgaaatatgtaactaaaacttccgacatttcgaggcaatgcaaaaagtctttttcatacatccttcactgcatgacaattcgaaataaaaaaaaatagaaaattatccatccatgcaagtttaccgtctaccctagatgcttgcacatctaatcataagcggtgttattggccgaacattgaatggttttagctggtcttttattcaacgcaactagtgttattatgataaatgcttatctttactgttgggtgtgttttcctcggcctttcataacgtgcttgttcaagtcttctcagtgtcccacctttttctcttattctagttcaaatacctccaccaatttagatgatttattatagattcaataaattcaaatgtttaataataggtggttttgaagaaaatggtactgaagtgggaattaaataattcatgaacaacattgttagcttgaacggttaaaatgaacttcgaaaagatcgacaagtatgaacaaccataccatgattttttttttcctttatgctggataaccactctaggtgtttgtgaattgccatagttatttgcaaattcttcaactatatcaagtttagaacttttttccgcctttcttgcctgtggtgcaatttcggtttgctgagttggtttcttgaacgctaattttcctgtaggatatccatatcacactgaaggaattacatctttggcaataagccctgattcatctcttgcccttactggttcaaagaatggctctgttcacattgtaaatatatctaccggaagggtaaatttatcttatcttttcaaaattatattaatatatctacttaaaagtgtgactgcatagaatgatcaaactgattttgatgggtgtttgtaaacctataaaactaatatgctaaccatttcaggttgttacttctctggtatctcatacagattcaatagaatgcctcgcgtttgcaccaaggtactgtgaaattatgaaccctataatatgtgattatcataacaaagattgtgcgtgcattttggtatcttcgttgtttaatattttgcaactgtgcgaaattgtgtacggcagttccccttgggctgcaacaggtagtatggataagaagcttattatctgggatttgcagcattcatcgccccgttgtacaggtgaacatgaggtaagttaagagtttcatttagtatcgatgaattagttgtgctgctttctagaacttcgatcactcacagaatgaatttcattttgggcaggatggggttacttgcttgacatggctcggtgaaactaggttcatagcaactggatgcgctgatggaaaagttcgaatatgggattgtctctcgggtgactgtgtaagaacctttagcgggcactcggatgtcatccaaggtctttctatttctgccaataaagattatcttgtttcagtatcgcttgatggaactgctcgagttttcgagattgctgagtatcaataagcaacttgtaagaaggaaatcatgtgcattagtgacatagattatttttcttctatttgatgtgagtttatttatccttgtctaactaatattttccaatatatggatatgttgcttgcacaaaatgtcaagtttcaaagttttggttaataacagttttgatagtcatagctgcaaaatttcatgtttttgcttataataactgttaactgtattgtaatttatggaaatattgttgagaggaactggtttttcatttgattttttcttctgaatgtgtatgagctcttaatcctttttttttttcaacttccaaacttaacaaacctcattttcaacttctggtgtgcttggattattcgtataggatatgtattatatattttttcattttaaatacttcatattgttttctaagtaatccattatatgtaaatttcactttattactattattgtaaattttccttaagggaattatacttattatatgaaggaaaatagcattattatataattaatggtattattcaagacttgttagatattgtaataattttaaaatatttcaaagaaaatcagtaaattaatttttattatattatatatttggaaacaatattggtaagcatcattaatttggtgacatataaattaataatgaaaaataaagggcttaaccaataaaatgataactaaaatgcttttattttttcatttattttttaaccatgaaattcttagcagtaaaaaaggaagaaaaaataatacttatatcctttaattacaattgatcatcatattgacaaagtgtgatcaattacaattaattattaataatgtaaaataatctaaactaaattaataagaaaatatcttttaatttatgcaactatcggtcttttagaaattatatcaatctaatgattgtttagcatctccatatcgacattaatttctctcttatgtttcgctattaactttcgcacaacgcttagtgcagttattaagccaccaaatttctgtagtctctgaaggtacttatcatcatcatcatcatcatcatcattctgtcgggatgatggaatcactctaatcacttcctctacataggaatccaacctagaaagcttctccgaaaacttttccatattcttcttctctagcaaaagactcttctcgtcaaattgatgagaattgtttagagaaagagcttttgaataatcataaccattattattagtgtttagtgacaaattcttaagacttttcatctctcgaataacaacatcttcacgctcaaaattacacaaaactttcatctctcgagtaacaacatcttcaccatcaaaatcgccatcatcttgtttcatgcattggctgaaccccattattctatcacttatttcttttttttttttttgataaaagtaaataatgaataatacattagtcttcatccatatatatataggggttgatgttttttttccttaattaaattcgaattatattcacacttttttattttattttattttttttaaaaaaaagttaaatcaacgacctaagaccttcaattatctttaaatagtgttttaatttactcatttcttaattaaagtaatatattgtctatactcattcttattta

SEQ ID NO: 185843 - DNA, 3442 bp, Cannabis indica
tttgcattattaggttcaaaggttggaaacaacacatacatccatatcaacccagcttgcttgctgaacaaatcgataagcaacaattcaatccatttgacaataataaggttctaggatacataatatattgatcaatattcttgggtaggtgaatcaatattttactcactagaaaatacacaccaatacaaattaaattattatttagaaagccttaaactacattcaacaacaatataaacatcttcaacaaatttttcttcacttttattctttcaggataaattattagcaaaaaaaggaactgaatttaaacgccaaaatcattaatcaagaaattactcctctaaactctgacttaacattcatttcctcttcttttttttccattctctctgttttttccaaacacttgtatttggtgattgttcaatcaagaccactccattttcaggcaaatttttatgaatatagattcaaaaacaacgagaaacaacatttacagagttcaaaatatcagattttaaacaaaaccaaaaaaaggtgagcatacatgaactgacctcggatcggagtggaggtggatcgggcgtcgtcggagtttggaggtgaagggactgatgagtccacctacgttgccgccgtcagcgtcgtcgtcgtcgtcgggagaggccggtagcgtgatgcgttgtcgggaagagagtagagggttgagactttagagagttataataataataataatgattaattgtttaggggttttattattatttgagtaatttttggtaattacttagttttaattaatttttttttttttttttttgacaattacttagtttaattttgagttggatgttaagtgttaaagtaaattgttatgttatgtcatataaaaaaaagtaaattgttatgtggagatacgctattggttcaagttattaaattttttttaaaaaaaaaaatagtttaaatataccaataaaaaatgatacatggataatgacttaatatttgatagtcaggtacttaccgaattctaaaaatataacttaaatattactaccgttaaaaattaaacttaaatatttattcgtaactgaaagttaaactttaatatttatgccgtaaattacccttattattataatcttctaattttaagttttatatttaagggcaatttttacaattctataataagtaatctttttttagaatagtttttcaaattttttttaataatattgttcattataattttaatattatcactgtaaattttttaaaaaaattggaatattttatagtatcaaaaatagagttcttataatttagtttatcgtacttgttcacaaaattacaaatttgttttaacattgtatactattttgaaacattttaaaaacattacaaaaatgatgttataactataacaaccatcgtgaaaaaaaaaaataataagtgcctttagatgcagaaattaagaaaagaattgttattagcatctcgggtgcacatgggttgggttggctgggttagaggtattttaatagacatgatgtagcttttatcactaacaaactcagtcaatttctgcatgctcctactgtcaaacactgggaagcttgtaaaaggttactctcaaaggtattttagcggaaggtttatggcttaaaccgaccactgatctaagtcttcaggggatgctgactgggcaaactgcatagatgaaagaagatcaacataagggtatctaatgtttttaggacagaacttggtatctcgatcagcaaagaaaaaacaagttgttgctcgatcaaatactgaaagtgaattcagggtacttgctaatgcagctgcagaaataagatggcttatctatctgttgtctgaattacaagtccctgtcacacacactcctgtgctttgggttgacaatcaaagtatcactgcacttgctgctaatcatgtgttctatgccaggtgcaagcatattgaaattgatcttcatttcgtttgagaccaaatcctagcacaactgctctcagttcgatttgttccttctttggaccaagctgctgatattctaaccaaacaactcactatagacagattcaattatccaaaaagcaaacttcacatggcttcttctccatttcatttgagggggatgtaaaccaataatatattggttatacaattagttagttgttaaattttttgttagatatcagttggttagttttctagtaggttagagttgtattgtatctatttgtacaaaactttgagctataaataaaggtctcgagctaatctattgggttaagcttttctttggcattttatcatgttcttatgctctgcatttctatcttcttcttcatcaaactttctaccatggttaagctcttatagggtagaaatgacatgatgaaagtatttttgttaaaaacaaagagattctcacttgcaactattcccctctccctcataaaaccctgatctaaggttgcattttcatgttaaaggcattgttgatgccccctcatgtgttgaatggtgtctcttgatcaaatctttcatggctatttcattatggaactacaatgaagtagtagtagagagtttagtagcataaagagatatcaattgtcttaaaagtatttagtgcctaggagaggtcttattctagctatcagtcatattaagtacaaaatgagtggtttttaacaaataacaaacaaatgcacttaatactaataggtctaaaatttgccgaaatgtgatttagtttcccattaagtggaaacgaatgaaaccttatgataatcggtgtaaagtagtattattgcttgattgtaatatactttaaaaaaaaatagatggtaaaatttaacaaacttgtatacaaattctatgtttataaattaatttttttaaatattactttgaattctgtattttataaaaattattgaatgactcatttgttttattaaatgataatatagaccttgtagaattactaatttggtcgaactattttttgtccaaacgctaaagttcgtattcctaacctctaaacataggcggaactagaagtgttgagggagggctaaagcccaccttaagatttgaaaatattttaatatagaattgttactttcatatatagatagtagttaaatagaaaaattggttaagatgttttaaagttacatgggagaccatgttttgaatttccttgctcctttttttctacgtgtatttatattttatttcttaaataaaacaaatgaagaataaagtttaaactaggatcaaacttatgaccactaaaataggaggatgctgttaaaccatcatttcacttaaatttagctagttatttattgttttagattatattaaatgtataactaagctcacc

SEQ ID NO: 185844 - DNA, 2180 bp, Cannabis indica
taaaagcaacttatgtcattgatcagatatccaagctatatccagtttgaaagtctttgatttgaaaacaagaaagcaatacttacttcttcccagcttttgtcaaagaaaataaaggctgcacatccaagctccgccaagattaagagaaccaccaacactgaatactatatcaacttaaggaaaccacttatcaactataaatggaaaaagtagtgggtcacacacagtaaatgatattggtacgagcatgacatagttattaatttctttttaacaagaaaaatgctagtcatttaaataatgtagcatgacattcatatttagatattagatataacgaacacttaattattaggatacacaactcaagcagcagccattccgagtaacagctgcaacacatccaaaacacgagatgacgaagagaattgccccaattccaataaataagtaaatgaacctgattatcatgacatgccaaatcatcaagaagctcaaatatggcattgaaaacagaaatatcaattcaacagtaaaactatgctaaagacacgaagatagataaatacaataaataaagattttcttcacagaaagaaaaataatcaaaaagtaaaacgatcaatgtgggaaaatggcactggtatttgcaaagaattacgttgctttcacaactaaagctaatttttttttcctttacgaggaggctaatttttctttaatagctatcttagagtttactgcaaaaaaacaagaacactaaccatattgcatgacttaacagaaaggaatattcacctaaaaatgaagccagcctgacagtgtatcgtcactgggttgctaatgagacactaaaatcatattcttacaaactctacaactctcagaagagaactttgtttttgtttgcttaatccactaatataaaaaggcgtctaccatcatcatgcattgcacaatcaagaggggacaaaaggataatcattccaacaccacaacacaattttcaaagatgggttttatcttggtgacttcgaatctttgatgacgaaaatgtcattaataataatgttaatctaaaaaaaatgtcactaataacaatccatgtcctatcaaagtaaaatacagtacacttgacttgggttgtgtttagaaagtagctctgaattggataggattcaataatttttatcatgtgattgtattatgaaatggagaggatattgaaaaaattaatccaaacaacctacttaattcacctagtatgggataacttaatctgattggaaaacctgagataattaatcttatctaatccacatctccatgtatgatgtacaacgttgtattaaacttgtttactcataatttatcagtgcctaatgatcaacttattcattcttcctagttttttcttgtatatttcttaattcaatcatacttagctaacatgaccttgctataaagcaatttacactacaaataaatattcacaacatataaaaatgataattttaaaaaagtacgaagtttttctagtacaaggagatcattcaagaaatacaacaagaaacctagcatgtggacatgaaaatgcttgtatcttaatagagaatgaatttgaagcaacaagaaaaaaactcattgcccctaagcatgatggtaaacattaaggaaacttgaattgaacattattggcaaaaatcaggaaaatctatttttcccatgaaacaaagtagctagcaagcaaaaatgttgagaaatttcaaacaaacttgtatttattaaggacaagggtcagcagccataccaagctttgggcaagttatcgaaaatgttagcagagagtgacacagccagcaatggtctgccaagttgtatcaaactatcatcacctccaacaggtgatagcacttgggactcatcagtagaccttttgtactcaactagcaagtagattccataacccaccatagccaaacccgaaacggtcatcaagaagttaaaaagcttcaacagacattccaagcatcctctgcaagccatcctttacaaaatctcctatccttccttccaatcaactcaaattgttctctcctatttcatcaatgtacattctttcaatcatcatccaccaaacaaaaaccccacatttacacaaagaatcaaaaaacaaa

SEQ ID NO: 185845 - DNA, 3986 bp, Cannabis indica
aaatggaagtgggttgtttaactttagggatgagagtgacaagggtggtataaagaggaactatatccccatctccattgagaaaactgagggtcgcattgataacatcatagggaccagtttgttctgtaaaaattagagttaaaaccatcgaggcccggggctttgtccaaagggagctgaaagaaagctttctcaatttcctcaatggaaaatgcttcattcaataaggatccatccagatcagacaaagagcgattaataccctccaaagccttctgcatatccgtccaggaagagttcgtggaagtgaagagcgagtgaaagtgagactcgatttcgctaatgatgtctgcctcatcagagacaatacccccattctgtaaatgaagcttttggattctgttaactttctttctatgggaggcatagcggtgaaagaatttggtgtttttgtccccctgagccagccattgggttctagctctctgtttccagtaggtttcttctttgtacaaaagagcgtccagccttgattgaagatctttgatttttgcaatcgtacggtcatcccaaaacgaggtagaacgggcaagctcaagttccttctcgaggttactgatgtgcttttcgaagttgaaatcctttttgtggttccaagagttgaggcttttagcacacgcaacctgggtggctatatgattagggatggctgcatggtgagaatcgaagctaatccaagactgctccaaggttcgggtccaattcgggtccttgagccaaacattttcaaattgaaaacgtttattttttccactcgaattagcacctgggaactggaaatgaccaattccaaatcccgatggtcagagccaaaaaaaccaatatgcgtgagaagggcatcagggaaattatcagtccaagtactgttaacaatcccgcaatctatatactcctgaatatttttaggataatccatgttgttattccaagtgagcaggggacctttcgggtcaagcggtgaaaggttaaaagagtgcaacaaatgtcggaaatcacaggaagggcccctctcaggattacccccttgcttatcatgggagaaaagaaaagcattaaaatcccctatgattagccatgggtctctcgggttacccctaccgatcctattcaaaattttccaagtgtgcggttcgagcaaatcaatcagcgatccataaaaataggtaagatggaagaaaacattagaaataggacacgcaacataacaatcaaaatgactaatagattgagaaagaagagttacagttacagcattagtccataataaaaggaggcccccacttctactaatcctagggacctccaaacccgagtcaaaatgaagtttgattctaagattatcaacaacatttttagccagtctagattccataataaacaaaatatcaggattacaaaaagacactaaacggtagagaattcagaatgcacgatcactcccattgccacgtgaattccagctcacaagcttcatggcggcaggcaggcctgctcagcggcacggcctgcacttctagaagagacttcggtgactagcgggttgtcagagcgggagcgcttgatttgtttacggagttccccattcaccatttcagtttgccttttgaacttgtcttttgagtcgggtttgtttcttttccttgaagcctttgatcccgagggagtagcaaaaccggttggtaagtgatgttcatggcttcaagccatttacttgtgtcaaggagagaaatgttttcgggcagaggcacatggcaatatttggaacgagtggaattggagttggtccagttttgagaggtgatggcatggctggggttggaggcttgtgaagcttgggcactagtattgctcattgtggcattgaggaaggcagtgtaggatggtgtgatggtatcaggtgggtgaggttttatgaggttggtttgagcatcggtatggatccattgcacaatatcttgggtgtaggatgaggggccagatttgaagagtcccacttgttgggtttggccggggggatacatttctcttgtgggccgaaggtgggaaaaggtggcatagtctccagggggcaacacaaacagcacttgcaggattattagtcatgaatgtagcgaccgaaggattggcaaagttaagttgttcagggcacaacaaagcattagtagtaactttaactttgccagatatggttttgatatcataccttagctttggaggaaagggggcctcatcgcatgctttcatgtaatccatgcacccttagttgtaactatgccccatacgaccgcaacagaaacatatttcggggagattctcatattttagctcgagccaaacaaccttgtttatacctgagaaatggacgggtattccacgcgggagcgggttagcaacatcaaacatgacccttaaacgaaagtagggtccctgtgtctcacgaaaagagggccggtaaacttccaaaaggtggccgagagaggaagagatgagcatggccaattcttccgagcgtttgaggaagggggtgttgaaaacttgcacccaaagtgggattttgagcaaactatccccatttaggacatccacagagtttggaatatccatgagaatagcttggttgagataagtccaaggttgctgcagcaagacccgacgcctatctccatcacaaccaaactcaacaagaaacagaccattagaacggtatgttataacaactggacaccgagaaatatgattccagtttttggtcatcgtgtccatgaaattcttacggttaaaggatttaaccgtgtggactttggtcaccaaataaataggagcagaggggttttcagagtcagtggtatttgatgggttgggttcatggagggtttgaatggtgcattcagtttctgtgaggttgagagcaacatatagggaatcggttaaatcatccatgaaaaccaagtgaaaattacaacagaccgtgtgtgtgcagagatgaactaagtgaaagaagaaacagagagaagtattgcctataaatgggaatattgaaaatgccaggaaaagggatagttttttccttttcagaaaaaaagaactaaaaatagttaagtctatggatcttgggcaaagagcgatactgctcttaaataggaaaaccccaaaatgactgagacagaacaagtccgtagcaatcaaatccatagcatttatgagggaaccgaaatgctgcacaataacttgaagaataatactaggcaaaacacatcttatacagagagcaattaatgaaggattcaaaaccatagtgacaaaagggatactatcccgactgcatgttgatttgaacgagttcctattactcaaaaatctttggaaaagagtttggtcaggtggtaatttaatgggatacccaaatttgtacctaaacaacttgattaaagccctatttctcataatagatttgacagtgaactgagaaaattgaaaaaggaattcaatacctgtaagagcttcattaatatctgtacggatcggagctctggggaggtggccggtgttaatggtgatacgacttgggtggttggatcgtttcagcgtgattcggctagagcggcttggattagtggagctgccttgggtctcgttagaaaagagtcggagccaccatgaccgtgggatctggggcttagcaatggtttcaccgtgtggaaacaatctggacgaaggtgagaacacgaaaatgagggtgaagaagccttattcatctgttgcatgtttgagagagaagagaagtcctcgaagagtctagaaaagctcacacaatgaacaagatctaactactcgtaatctatcatgttgtatcgtttctcctcactactttaaaaataagaaactaatatttctaatagcacatactaagtcaaataaactat

SEQ ID NO: 185846 - DNA, 4694 bp, Cannabis indica
tgcttcaactgtggccatttggctcactcctacgctaagtgcagccgacccacggaatatgcgtatcccccaatcggaaaagccgtccctctctacggggcgtggattaaagtgggagtccccattaaaaattgcttcgacccgagaatcccccgcctaaagctacctgaaccctccgcctcctctgcctccggcgcctccgtgggggttcccatggcaaaaggtgacaagggcaaaactgtcattgcctctactgataacgacaggtctaaagcttctgaccatagtactcctggccttttgaacgttagagttgggcagcctattcctggtattgctcaaaatcatctttacaaagcaagcagaactcctcagtttgtttccaccaatttaggaaatgccagtttgcctctcccacgacctgcccaaaagaaactttgccacccaatgaatcatatagataaccgtgtaagagataatggggttattgttagtcttatggcagatattgggccaacaagagaccaacttgttgaaaggccccatgaagaaatttgcaagtcaagagtgccccatcaacatccagagccagcctatgtcacatggcccacggataaaactttagatgaagttgttagtgaattggtgaaaccgggccatgagagtgaaagcccagcccacacgatggtaacccatgatactactttgttctccaatttgggccaaccgttctctggatccaaaaagagaaaagcaaccttgtccatcatcccagttatttccccagatactgatatagttaatttgggaaataaattagcaccatcttctgtaactctcctaccatctcttgacgttaccactttctcacctgggagtagtagctcaaagaatgactccaactcaagaagaaaaagcaagagaagaatgcgtggagatcaaaagaagaccgaagtcaccacttctacgatggtggcaaactctgatctcaatagccttgttgctgtccataacttggtcgacgtggccattgtagaagctcaaaattttcaagcgggcgagaggcggcccttatcatgccccccggcctcgccatgaaaatattatcgtggaattgccggggtattcgtagaaccccggcgactcaagctctccaagcttgggttagaatacacaagccggtttgcgtattcttaatggaaactaaagcaaataccgaagagagcaaagctattgagaagagtattggcttccccaactcaatgtcaatccctgctgaggggacggcgggagggttcactttgttatggaaccatgacatcaatctcaaggttagtaactcttttaatggtactttcacggttgatatcaatgataccttaaacaatttaaagtggactttatatgctgtctatgggaggccttatgaggccgagaaacaaactttttgggataacttgctggataaagtcaatcactgtaagcagccatggatgttagtcggtgatctcaaccttatcgcccacccttgggagaagagagggggcagggttgtccggcctcatgacacaaatattctgcaaaacttcttgttgaaatcaggcagtgtcgatcttggtttcacaggttgtcaattcacttggcagaataatagattcgatggggatctcactagggaaagattggatagagctttggcctcgagtgaatggatcacttcctacccgaatgccacggtttacaactctcccatctcggtctcagatcatggctttatcttggtgaatttaaatgaaggctcaaacacgggggtacaaacctttccgattcttgaagcttgggccagggacccttcttgcttggcaactatcgaaaaggcttgggaaatactgataccatgggaaaaagctctctgtgaagattagtgacacccgtagagctcttcaaagctggagaaaagagatttttggtgattgcgagaaaaagattaaggaagtcgaatctcgtcttgcctggatccaggatcagcctatttcttcgaccctttccgctgaagaagcttcactccagagggatgttagagaattgtggattcgcaaagaaagtacttggcgccaaaaatcgagagaaacttggctcaaacttggagatcgtaattccaagttttttcacgcctccactattataagaaggcgcagaaacaaaatcatggctttaaaagacacaaatggcaattgggttcggcatgaaaggaggatcggccacatgtttaatgagttcttcagtactctctttgattcctccaatccggaaattggggaggacttcgagcccctcttcaaccctttgatttctagggaggacaacgatatgctcaaggaagttccctccctcgacgagataacctctacgattgcctccatgcatcctctgaaagccccgggtcctgatggaatgccaggatatttttataggaaattctggaacgtggttgggcatggggtgtcctctatggtccaatctttcttctcggatggtcacttggatagacaactcaattatacttatatctgcttgatccctaaagaggaaaatgcttgcatggtggataagttcaggccaattagtctttgcaactttgcctacaagatcatttcaaagataatcgccaccaggctcagaggtgttattgacaagctggtatctccacttcaatccgccttcatcccggggagatggattgcggaatcatctattctaacccaagagctggttcacacaattcaaaaaaagaaaggcaaaggaggcttaatggctatcaaattagatatgcacaaagctttcgacagaattgaatggaactttcttgaaaaagttcttcagtgcaatggtttcgacaatcaagtttctggattaatcatgacttgtgtctctacagtttcttattcagttctggtgaatggggtccctcaaaagaagctccatccaaaaagaggcctccggcaaggagatcccctctcccctttcctcttccttctatgccacgaggttttgtccaaacttcttcttaggcatcaatgttcgggaaagattcatggcgttaaaatctctagaacttccccagctataagccatctgatgttcgctgacgatactatcctctttgcccgtgcaaatatgaagaatgtggaggcaattctagaatgcatcaacaactatgaaagttggtctggtcagaaatgtagcctcaacaagtctagtgtcctcttttcgaagaacactttgccaacaatcaaagaggacattctgcgtgtattaaaagtaaaggagtgctcgggcaatgaaaagcatctcggcaatccttttgtgttcaaaaaaaggaaaagagaggaattcctgtttctaaaagaaaaggtcctgcaaagaattgaaggttggaaatctaagctgctctcttatgcggggcgtactactttggtcaaagctgttgcttcaagcatccccatttattccatgtctacttgtaggcttcccctggcgacttgctgagagttagatagcataatccgtaaattctggtggacaggggggaaagacaaggaccgattcatggctctggctagttgggataaactatgccgcccgatggccaatggcgggttgggttttaggaggatggaagatatcaatagtgccctcttaactaaattggcctggcaatttgcgtccgaccatgaagccccatggattaagtgtttcaaggctaaatactgtcgaagaaattccttctggaatgctgagtcgaaaagcaatgactcttgcgcctggaagggtattctccactctagaagcatccttcgtctcggttgtcttactctccctgggagaggggacttgatcgacatttgggatcaaccatggatcccgtggctgaattatgacgaattcaagttgcttatgtccaatgttcgacaccgttacccgcttcttaagacagttgcagatctttctaaccaagatggagactggaattgcactttggttttgcaaatcttcggcactgaattgggcaggaaaatttgtaacatcagcagactaccctctaattattccgattctattgtttggaaacatgctagggatggcaggttctcggtcaaggaagctttcacagttttaaccccgactccaactcatgatcacaagccaagtttctggaaaaaaatctggtaaaaggacattccctaccgcctctcaatcatgatatggagagcttcaatagggtgccttcccacgctggacaaactcccttttgtgaataatctcctttgccccttgtgtgatctggttccagaggcgatctcccatgttttttgggattgtcctctagctcgtgcactttggttcggaggacccttccctttgtagaatatccttcagccccgactcctccatggttgacagagtcgaagcagctactctttgcatcccggcggaactcaccacgcatttcttaatctttctgggatgcctcctggagagtgtatggaaagcgagaaatgatttaatcttcaaaggtaaggggatcagaattgatgtattagaaagacactgctatctagatatgaagaagccatcattgccagtagcctagattcggatcacacctccccactgcgtactccgcctctcgg

SEQ ID NO: 185847 - DNA, 3031 bp, Cannabis indica
ttattttaataaaaattgaattactttagacattaattaaataaattaaaaaaatccctttatctatctcaccgtttatgtgaaggcaggagcaaaggaaatatatatagatatagttaacggacgtattgaccgggtcaatcggcgcgtggggacaagctccgccgttaaaaccacgttagattcttagacaaaatgactattataaccttaattaaaaaacctctgttacataagttgagggctataattggaaaatcaaaaaggaagggacaatctcatagaaagaatataccaaatcaatggcttattctaattcttttccaaaagccattgatttttacagaccattaataaatcccatacacttaaaatctcatgcaaatttaccaatttgcccctaccatgcttattgaaactggaccgttggatcaaactcaaacattttcttattcatccaacgggagtggaattagtaatttttttcccaatgttttggattttagggttatttatttttggaattaaaaaaataaagaaaaaggaaattagaggtttaggattatttgtttatttattaatattaaaaaaaaagaaagaaataattctctctgtattgtcatatagttaagagagaggagagagagagaaatctgatgaaagagcgaaaaaccaccaaacggctataaatggcgttacagagtttctgcgcagagagagagagagcgagatagagggagaacgagacactgagacctaaaacccagaaagggtttgtgtgtaatccccttaagatcgctgtttattcggtttttgccttactggagttttagggctctggttggttttttgagcggttgatctggttcctatgatctcaacattaacccagtttcaaagaagaaagagagttcgaaacgaaggtttattaattgggcattacaataaataaatacacatatattagaattagtgagattggtgttcatcatgtctgatggttattatagttcgaagaagacggacgatatttgcgaggatgtttgtggccaggtactttcattgttgatatagatatcatttttggggtcatgggaagttttttcatttcagttatggttttgggattttattcaattgagttttaatggagtttacgatacttttttttaaattattattctctttttattttaattgaaaaaaaaaacgcatcaatacttaaagtttttgatgctcaaagtttttagctttgtaagttttgatatatacggttttgtatatttttactcaacttttcccagattcaaattcttatcattttaagaaacaaattaaggttttctttatatccttacttaaattttgtttgaagggacaatgtgttataaaggtggtattaaaatctgggaatttggttattactaagttaaggtatggatctttgttttccaatcctaagtattttttcttagttttcttctgctgtggttaaaaaaaaacatatccagaaaagtggattctgctctttagaatattatggtttttatttgaccattatggtattcacacctcttagttctcgttgtcctaatttgttttgtaccatgaaaatgattattgagtgtctcatttccacgagtcatatggttttgaaactcccttgtgtagttcttgttgttttcaattaaattgctgttgttctctccctcccccaaatcaaagcaacgttttagtttttaatattagtaagttgtatattgagataaccagatatttaatttaagttatggtgttttctgtgcagcagggacctcgagcggcactaaatatgtccagactccggtgcatttttaatggatttgatttgaagacatctattttcatacttgtgcttatcccaacatgtgtttttggtatatatttacatgggcagaaaatatcttattttctaagaccactatgggaatctcctcctaggcctttccatgaaatcccacactactaccatgaaaacatgtcaatggagtctctttgcagacttcatggatggggaattcgggaatctccaaggcgagtctatgatgcggttttattcagtaatgaagtggacatccttacaatcagatggaatgaattgtatccatatgtgacacagtttgtgcttcttgagtcaaactcaactttcactggtttgccaaagcctttaattttctctggaaacagggacaaatttaagtttattgagcctcggcttacttatggtatgttggggggaaggtttcatagaggcgaaaacccttttgtggaggaggcatatcagagagtagcattggatcagcttctcagaatagcaggcatagaagaggatgatttacttataatgtctgatgttgatgagattcctagtgctcacacaatcaacctattgaggtggtgtgatgatataccgcctgttcttcatctgcagctgaaaaactacttgtattcgttcgagtttttcttggataacaagagctggcgagcttcagttcacaggtataaaagcaaaaccaaatatgcacactaccgacagacagatattctcttgtctgatgcaggttggcattgtagtttctgcttccgtcgtattagtgaattcatatttaagatgaaagcttacagccattacgatagagtgagattctctcattacttagaccccaaaaggattcaagaagtgatatgcaaaggtgctgatttgtttgacatgttacctgaggaatatacatttaaagatattattggcaagttagggcctattcctagatcctattctggggttcatcttccagctttcttgttgaacaatgctgatagttacagataccttttgcctggtaactgcagaagagagagtggctgagttgagttgcatttgtagattggctgaagctgttaaatggaaaatgtagattgacaatgaagaggactatatttgaagggttcacaatgatgatgatgatgatgatgatgatgatgtataaccgta

SEQ ID NO: 185848 - DNA, 1291 bp, Cannabis indica
tacatcaaagcacttcttcaaatgccctgttgcaactgcttgtctccaggatacaaaacactggttacaatggcatgcaacacctaccaccttgatcaccctcaccagatggattggaagatcaaaactttagtaagttcaggaagaaggtgttttgcagctgctctctctttgcttggtgtatacactatgggaagctcgaaatgtcagtttgtgggaaaatataaaagcagaaccaaaagtgttaatcaagggtttaaagcagactgttacacaaagaattagcttatgttggcctaaaaaagtcagtacagaggatacaagctggtttcaaagcttgtaaccaagcattcgaattgtatgtatgagatttaagtaagcagtgtacataaatgtatagatagtattagtttataggccagtaggggtgttatttgtttgtaaaaattaagatttgagcaatacaaactttcctgattacatacaaaaataaaaactgttatgaagttggggttttgggtggcaatattttggtacattaaagtttattttaaaaattaatatattgtcattaagttaacaaactactatatttagtaaatagtttgatttagtaattatatgtgtattttttttaaccaagtaaaataaaaaacctacaagttaagtaaaattgttaattgaatgttgtaagatattgctgataataaaatacaaaaaatggctcaatacgtaaattttccattaatatttcactattacatacaactcttaactacattttgatttttattgagttatattttatgttagtttcgtgtgtaggagtctatgtataataagttaattgcgtgcattcattagtttgtatttaacgataaattttcttatttaatttaaaacatttgtatatattactatttatttgtagttttactatttatattaaattttaattttaaaacctacaaactcagttttttcgcttttcctcttttataagaaaaatcccaaaccttaaaagacatctatgcactctctctatcaatatatgaacaactacttaaaaaagaaatctcaaggtattttctaatggttgttttacgaagtggcggtgaaagaatggggtaggttttgtttatttttgtaatatttgttgggtgataataaaattttgatatcttcaagaaaaaaaaaatattgattttttacttgttttaattgtctgtatttatttatttttctgaatgtaattattaaataatatgttataaactaatggttttattta

SEQ ID NO: 185849 - DNA, 2978 bp, Cannabis indica
tataaattatttagaattttttgcaaactaactaaatgcatgctataactatagtatacgttgtcatataaaaaaattaaattataatttcttcacttgccgaaaatagaaaacgtccaccctagttaggaaatttttatgattatatgcaacaaacaagctattattattatacaaattttatatttaaagtagatgtattatttgttttgttgtaaagaaattaaattatccatcttgtattgtgatgaataaaaacttcatagataatttttatttttaagattttgtgctttattaaattcttgaaactcaactaataagaaatcatagtagattgtaataaaaatgaatgaagtgtgtgtaagtgaataatttaagttgcaaactaagtagacaaaatccatgtaaacactcgagtggtgtttgttgcttagtgattacataaaggcatttcctttagttgcattgtaagaattctaactgagcaaaaatgttagtgttttttcctttttagctggaaattgcaaagtgacactaatttgggaaatatgagctctttcacttcacttcatccaacccaatttccatctctacaaacaccacaactcttgcaggctgcagctgctgatgaaactgttactgaatccaaatatattatcatccaaatccaattggatatttcgtcttcgattaaaaccaactaattgatttttggcttcggtcgtcttggccttaacaagatatataggactcctaagacaactagaaaagcaggaattgtcgtcgtatcaaacactacttcaacttttctttcttttgtgcagtgaatagggtggagaagagctttagtttgatttactagaccgtagaatctgcatgcaaataaccgaacgaaccataataatagtaattagatttaagtttgtttctgtataaatttctcaggcccagttttgattactaaccctttggatgcgtcttcaagggtatgtaaaagtcttatggcatccacataatgcaattctcccgaaacagttgaaatctgaagaagaagaaaaaaaaaacaaccacaatatcaaattgaaagttaaaacagttagaagcgtgaaagaaagaattagtttactcactcttctccataggctaacaacataattgtacttgttaactagctcgcgctcttgagacaagaagagcttgaaggatttttcggctggctcagttaagtcttccaacaatatgtaaaatcacagaaagagaaaagaaaatacagataattcacaatatatgcagaagtgtatgtgtgaattaaaaaggtaaagaagtggaagacttgtcaacttcaccaattatatgagcaattacttcattttatgtatgtgttcagctgcttggaattgaatgcataaaaaaaatgaaaaaataattgaatggtcacagtatggggaaggatacttgtacgttccatgataagaagatggatggctgaattgaccatctctatagactcttcgagagttgttatgatgtaactacgagcaattgtatcggattgaaattgcgaaatgtgccagccttgagaagtgatggagtaaggattgcatcccaccgaccacatccaatcctgtcatcattaaaccagatgatattccatatgatacaaagataaagtatacacatgcaagaaaagaaaacacagtggtagagaaagacccgacccccgaattggaattttgtttgtatagctcaaaaggtgccattgtttggaaaataaccaaaagttaattctcatatcaaaattttgtctttttctatcaattagaaatctgaacacaggaagctcgtaaatcgagaccaataataggagaattcggattctaggttacttacctccattgcagtttcgtgggcttgactgtaaacaagatgtagaggtataagaccagccaaatgttcagaagcagcagccagtgcagcttttattggcctcctatatatggtgacagtaaaaaaaaatcaatttcatgattcgacatgcttttcccaagtgcttaaaaagtgttacagaaagatataacatcccaaagcaacatcaaacacgttacttttaaacaccaatttcaaagagtcagtgaaaaagaaaattaaatgtgtttgcaacatgattccacccataaccaatagaacattcctgataaaaaaggtcaattaatatatatatatatatatatatatataattagcttttggaaaacaagggccaccgaatgaaatgaaaataattgaagattgcttaccttagatccatcaaaagtgaacgcccattacactgcagatggctttcccaggttgaggtctctgactgggcaacaataatcatgtctgaaagtgccttagcctggtaatgtttgtcaacaaacaatggctcaccgtggatgaaccaaaagattggaacctcgagtgtggacctgctatgagcatgcatacctgcacagtccagaaagtgtgcgagtgttactatgcaaaacgaaaaaaaccttaacttcaaacatctaagttcatctataacaataataataataaatactagaaatagcaaccagccaaccattgcattactaatctcatatccccatgtgtgcttagatctaaagattcgaagttattacataacagtttattggtaattgctaggcatcaatacaataagttctcttgatgttggcctgccaaaggaaataaagttcacacacaagaatagataggatgcaaaaagaaaagaaagtgaagaacctttgagagagccatgatcgttcaacctctgtagttgatactgaagaatggaggaatcaagatatgtgtgaatattttttctatatgttccattaacaagcaatagtgggacagcagctgctcgccgtgccacagaaaatgccattgccaaagcaggatcctctgaaagtggtaacctaaca

SEQ ID NO: 185850 - DNA, 1711 bp, Cannabis indica
cctgtgagatgtctcttgacaaaggtggtttttcctgtaaaaaatcaagaaacgcgatgatcaaatgtaatcgagaaaatcccaacaacaaccagatcgaaaagacaaaacacgaactgaatcttgttaccagttccaccatcgccgacgataacgagcttgaaactggggtagtcaacagtctgctggttgggcaaagcctaagaaaggatttcaaaaacataaagaatgagttggatggatctcatgtaatctgtaaataaaaacaataagaaaccctaaaacgaaattaagaagaaaaaggaaaactttaccatggaaattggaaagcttagagagctatgtgaggcagcgtgagagggtgaggaagtgaaattggggttttagaaaggagagaagagaatagagttaaggaatagagaagggaaaaggggtttatatattatattcatttgcgttagttttacgcgacatacgctttcattttctctccattcattttttattttctctattaaatcattatttttatattgattttttttttaattccaggaaataaatcatttatatttttgattccctggtttattaaaggggatttatttcctggttttgtctattgaagttcaatttaaaagttataacatattattgcttttacatttttaaactatgttttgaattaggtgatccaaatgaatcttgattgtaattactaaagtttatgacaaagaaagatgcgtggttgaaaacttaacaactttgccatgttccacctgcaacggctagcagccacagaagaagagcggtctcttttccatcattttatagccctactcactaaattgttcttttaactttttattttatattgaccagtgatgtattcagatcaactgtaatcacaaataagttgttgcagacaagtagagttgctcatcgaagtcttgttggagtgtaagctaagttattcaaatgattaccaatccaattcactaggattttgacaaagaagaattcatttttcagtaagacaaaatgaggaaaaggatgcagttcaaaaagtaactattttcgcattaaaatctgatgaggaaagccattaatcatccgaatgagcaaagttttacacaattaacccaatacgaaaacagcacaactgaactcctccagtgagattgccatatgagatattacttaaaataaaagagcatcctactatagataaaatccagccaaatatgagtgaatttcctaaccaacacaatcatcagaaaacccaagggttcaaccaaaaaaaaaaaaaaagaaaaaaagaaacgaaagcttgaatgcaagcttctccagcaagtactagctcttcctttttactcgaatgtatcatcgtcgtcatcagggagaggctgattagcagcttgggcaagctcggcttcatgactgcaacaaacaacaaaggctcattaaagacgagaatatgaaagaggtgagatttatcgaagcagcacaaatactgtgcaagtgtgtgggactgggatgatacttgaacttgggaaagaggacttacatttgttgagctgccaggtcaatgtgtacttcaggaggaggcaagggcaggagactcaacaaagtgaatatcagtgttcctgtgaagaaagccatcacatcacaaacattaattcagcaagtaaataattagactaacttatac

SEQ ID NO: 185851 - DNA, 3916 bp, Cannabis indica
tcttatcgtgttgactttggaaagtagcttgggaagattgtattacatcccttttaagggagggtctagtggaactggaaacactacaaggttgagaaatgctattgttatttgtcactggagtgtttgaagtactctgtcctggaaaacaagaaagtcatcgaactgtattacaaagccagtctcttattactagttttcattaatttcagcagaatgatttgagtaaaacagaagtgaactttgaaacgtgtaaagcaagttatagaatatcactgaaaaaaagaaaccaaatgcaatataaaaggtaaaccatctctaaattacttgacatttttctggcattttgagtgtttagtaaaaatacttggtttttagaagtcaatagtgagcataagacacctagctgaacatgacatacccaaaagaattacagaaagctttataaaagaacttaattttagtgaaaaaaataaattattgggactaaaatgcttgagtaccaaagtaaaactggtgtaaaactaaaagcttatatatataaatagatgctgatttgttacctatcaaaacccctgttctctgaggcccaacagtctccataaaattctgtgactggcccattgctggttgaaagctagtttccctgccctgtctggagtcaagcatcccaacatgactgtttctattcattgatgatatagttgagtgaccttgatgatcataatttacgttaggacctcccaatcttgcattctcataattttgaggtgtctctaaaacatattgtgtgttggaacgaaaccccgaaccaacaccaggatcaatactttgggcattgccagaaatcccaagttgggtgcttctaggtattgaagtaatagctgagtgaccttgatagtgagtacctcccaatcttaaatcctctgttgtaggtccaggatcactttgagggttggaatgaaacctcgaaaaactcctttggccactgttagaaaacccgagttgagtgcttgtaggaattgaaccttgataaccactactgtggtcaatatctcccattcttgcatcctcccttgtagatccaagatcaccttgaggtatctcggaaacatatcgtgggttgaaatgacacctccttgaatcaacaccagaaacaattctttggtcattgctagataacccaagttgagtgcttctaggtattgaaggtatagctgagtgcccttgataaccactattggtgtcaatacctcccattcttgaattctcccttctatgtccaggatcaaactcatgcacccgattattttgaggtgtttctgtaatataatgtgggttggaggagctaacaccagacacaaccgcccattggttattgccacgtatatcacgtagaatacttctagctagccaggtctcacatgtttctagctgattgacaggataagtggcatgcagctgatcattttgaggtgtttctgcagtaaaacgcgggttggaaagaaaccttgcattgacaccaggcacaaccctttggccattgccaagaaaagtaggaccatagacaccactttgagcatcagatacactatcagccatgctgggactaggatttaaattactttcggctaagctattggaagtgtttgattgaggagccggcactggaatactttcaactccagaaatattacatctagacatagcatctgcagtactcccaattccaagggtcaggaaagatccatcaagtttttcagtcttaggggcagattcagaaaaattatcaatgggataagaatggggtctgtaattagaatgtgattgagccgttgcttgcatgattacaagagagatgttattagctccactagtactatagttcatagaagtactcctactagcagactcaattgtagcagttgtaagaggcttgtgttcatgctccgaatcttcattctccattgatcttcaatctactctgagaaatgaaatgagtcaaaaagaatattaacaaatccatttctactagatgtaacctatagaaaaatgaataatcagtagctacttatgatctttgtagatataatatagctaattatactagcaatttatatctaagaccacacaatcccaagaaagaagttcccactattttctaccatacccaagaaaaagaaactaatcaagagtgaaacccattacaaacaccacaccacaaaatccatcaactctatacatttacctaaactcaaatcagaaaacccacaaaataggattaatgaaaaaacccaaaaaaactacaaaatcatccatacccaaaagcaaagcttccccttcaagacaggaactcaaagccaaaacgatgaaacaaacactccaagctcaaccatatgcttagaaacccatatcaagaacccaaaaacctaaacaaaaaaaccaaaaagtttaaaactttgaacgaaaatcatgattttttttttttaaaatagtaatttctaaaaaaaaacaaggtgaaaacccatgatcaaaacaccaaattgcaagagaatttctttctgaaaatccaatccgtaatcacaacaagaacattttctaacacatgaaaatgaggccaaaatcataaaagaaaaatgaaactgaaaatagtcttacccgttacaaagtgctgagcccagagagagagagagaaagagatattggggggttttggcgcttgtaagctctgtcaatagattttaaagggtttggtgtggggtccacatgacatggacaaatctgacacgtgtcagctccttggtttgcttgggtaagcgatctttatgatgacgtgtcatcgtaatactggcattgacttgttaaagggcaagacgttttgtactgaatgaccaatgatcacgcccacgtcaccaaatgagaatggtgttactgtaatgacgataatgcccttccagatattttcatagaaattcccgcctttactgtaataaaagaaaaaaataaaatttactaataatatcaaaaatcaattacacaaaaaaatacagcaaactatctgagatcctaaaagttccttgcccatttacctaaaatagaaaaaacattaaagtgatctaggttcggttcgagtaagtgatatagtcatgaactcatgttcatgtttattacgtaatttgattcactcattaattaatgtgtcatttttttttattttgggaaagaaaatttgaacttgagacccactaaatctggaaccattaaactatgctcatgttatttgtttgagggtatttggtagcttaaatggttgataacatgatcatttacattaatcaaattcaagctttccaagttcaggttaacccccatatatatatttttttgtagcaatatttctttaagtttcatttgctttgcaaatttaatgtgtcactaaatttttttattggtccaaaataattttaataaattaaattttataaaaataaattatacataattaaaaaagtttcactagtattatgctagattatcagtgataaaaaagagtactcacagttttattgttattatttttgttgtttatacatttaaattttcaattgattttctaactttcatagtatatctttgtaaattttaatttaatttattcttcaaacttctacatgtttttctttcttctgaaaaagttccatgcgttttcttaaccgaagaatattaataaatatgaaataaaaatgggaatttaaaagataaaaattgagtaaattttgtcttattcaaatttataaaaataggatttaaatactttaaaagataaatatacttggaaagggaatttatatcattataaaattacacgattttaaattttgttcgtaaaaataatcacatcatatatatatatata

SEQ ID NO: 185852 - DNA, 3048 bp, Cannabis indica
ttatgaatgccgaaacagataggagtacaactgtacatttattttatgagagtgcatatatgctattcaaataataattttaggatatttctacaatgcatcccattacaagaggtgcactgatgcaccctttatttgtttcgacattcagaataattttttagtacaattttttttatatatatatttgtgtatgttatagttaattaagatatttcataaaattttaagaaatctaaaataatttacaatataaaaagcagtgttcaatcagtctatttcatacacgtataaatagcataatcacgcgtttaacagactgtttaaaccttattttcggtgtgttaaatttgtctaatatattcttaaaattttgttggatgtattaaataactgtaacatatacgactatgagaaaaaattagaataaaaattcttccagatacgaaaaataaataaaaatatatcagtgtaccctttttatatgatacattctaaaatttttcataattttattatataagtgagttaattttgacttaaatagtagtacttataagctatcactagctatccaccgtcctattaaaatatgataagtctttgttgataattgaaccctccacaccaccctctcaaataattcacttaacttatcattttttattttatttttattttagcttccaaagtcaaaggaattattttatttatttatataatttaattatttgtttacaattgaagcactaattgagccatatataatccggcatgggacatctttgtttgtttttttttttttttttttttttccatttaaataaataaattaattgtcataatttatcaactcaaatcaagggatcccactagttgaaaaaatctcaataatgttgttacttagtatctaagtcttcatcaatcttaacttttttaattgttttttttcttcttattatttgaaagagaattagtcttgatgatcactatactcttaattaactaaaagatgctaattggtttattcttcattgatcctatattaatttcttccctcatatttggaatcaaatgtcaacctaattgcattttggtatctataacattacattagtctttttcactattgagtgttctatgtaaagtgtatgaagacactatttataataacatgaattattccaactatagttaccaactaattttaaaattaaacttatacttttcaaactattatctaaattctttttttttaaaaaaagaaaaaactattatctaaatttatagtcaacacttactaagttatataatttagaaaaatatatataattcattgaatcatgataattactattttaaaatttattttgctaatattactcatttcactatctattttattaaatgacaatttaatcttgaattaattaattttttatcaaaataaaatttaataataacataaactggaggtgttaaatgactggttatattttttacatatgtttatattagaaattggcttcaagttggttatattaaaaaaatgacgaaaatggagctcaatactattttatactattttagaaaatacaatgctcaatttgtcatttaacaaaactgaatgtatgatcggtaactttattaaacacgtggtctaaaataatattgacccatctttttataaaagcatttctattagacattaatggtacctagcaccactacgaggtggcaccttgcgaatggctatcgacattgcctaataattatttaattagattatttgggacccgaaacttaattctactaatagcgatatgacatcatggatggtgttaggtattgctggttaattttaatttgcatttatcttttaaaatataagaggataaaatttgtttttaatttgtgtgtgtgcgcattgttgtaaaatcatgtttgtcatttagtccgacccatatttatctgtattttttaaaatacgggtcgtgtcgtgccgcgtcacaaaaaaatatggatcatgtcgtgccaataattttgaaaggtaggcccggcacggtccataggccagtattttcgtgtcatgctcagattcgtgtcgtgctttataagtgtcagcccatattttttaaacatgccagcctatttttatatccgggttcaaattcgtgctttactttttcaattttttataattactaaactatatatattttataactttacttatatttatataacatatcaataatattttacaaataaatcatatacaaaaattattaatattagaatttaaatatttacttatagatactcaaattttcatatcacactaaataaataaactaaaatataattttagtttggcatgttttaataattttcactataaatttttaattatcagtattatatttaagttttattattattttaacttatttttaattgataaatatatatttattattaataataataaaatttagggtttaataatatgttgtgtcatattttcttagcttgtcgtgtgtcgtgtcttttaggtttagtctattcgtgcttatatgtcgtgtattttatatttctcgtgttgtgtcgtaccttttgtgcttctcgtgttgtatcgtacttaaatacatattttctgtgtcctgtcgtatcaatttatagcattgtgtccaagcccctttttttttgtcacttaatcgtgctcgtgccttatagtttcgtgctgtgtacaaaaaaattcaatccctatttataacactatgcacatataaaagagtaagataagtactacactaccacaaagtatcataatattgttattggtattattaaattatcgaattctatatgttgacatgttatttcatggtagtattatacaatctagtaatacttaaataacaatacttttgtaaaaaaagtataatatttagacacataaattacacacaaattcttattatatgtacagtcaaataataaacatatgtacacaaagaagcatttttgttgtatattacttgtact

SEQ ID NO: 185853 - DNA, 3173 bp, Cannabis indica
aataaataaataaaaaaagtaaaataaaatttgtgagatcgatcaacaccaaaataaagtgcctccattgaagttgcccttccattgtctcatttcatatattaacataaatctaactatgagtttgtatactaattggtctagaaattacatatgacaatatgaacatcaacttacttctcatctcttgtcgatggtttatcaataatttaaaatactgaatcggttttctcttaattgaatctaatctttctcctctactactttcctacgagtactaactatttttttattgtaagcttgaataaactacatatttttttaccgacaatatacttaatttttatatgtttaacttttaaatgtatacttaagattaattatattataattttgtacaaaagaatgtgtacaattttgtgtccctatgacaacattcaaaataaaataaatctcatttgctcatcatgtaatcacataagccatccatccatgtctatttttttttataaattatgaaattttattaataccaattagctaaaattataacatacaatttatttgggacatctccctcgtgggagacaagatcgggattagaattagaaaaatgaatcaaataatcaacagctcaattctcaaatcgtttgacaaaaatcccttttaattgcagataacttattattcccaaccactaagagcaatttgatggcgagtcctcaaagaacaaagaagaactaacaatgaaacaaaatcatatcacacggaaaatactaaaacactcaaaactatgtcacagagacaagaccaaaaaactcaaaactatgttacaaagacaagactaattgcaatggcaaaaatcgaattgcaatagcaaaacacaatcccaaccaaaccagatcaatgttcagagaaggccaacgaatctaacaagagaaaaaagacaacctcctatagctataaatttaggaacgaaaatcttaattttttaaattagttcacaactctataatgtgattagataagtttaaaattatctatcaattttgttttaaaacatccatgtctattagatgttttatgaaaagtctacaatgagaaaacgacataacacccaaaaaagcaaaacgacgtcaaatgaaaataggtcaccaatataaacgacatgcaatacaaaaaggaagaaaattttgaacttatgttaaaacggccacaataataccatatatactaaacagacacactaatacatttgaaaaaacattggctatgaaaggacagaaataaacgacaataatccaaaaatacgacaatgtttcagagaagatatgcaacttgcttttatgtcgcctataaatttcctttttaacttacatatattattctccttcatctgatccttaattacaaagtctccatagcttcttcttcatctagcttgctaagataaggtcaccatttgaggcaaaagttagaagaaacgtttcgaattggaaaagaatggcattaaagaaaactacagtttactatgccaagattactcttaattaacctaaaccaaaagagtattataatacagaattaagatatgagacatgtacaattacgttatacagatcataccaactctaaatgaacacttccctacattcattttgtttactatgttggttggttcctatacattgttgggattccttccaaaaacttatgaagaaagcaaagttgtcatccaaactccaagcgatacaattccaagggtggctacagcttggcctaattccaagaaaaagttttgttcttgaagcggcaaatttcgccaatctgtttgcctacaagatattacaagaacaagtttatggctaaacacaaggccatcatgagtttggaaaaaatatgcaaattgtgcttgtacaaatagacacgtaccccaaatcagcaatgacgatgctgacattatcttgtgtgcgacgatcctatagccatatatgttcagaaacttagataatcagattgaagttgaacatagttaaaaagtgaagaaaaagttgtaatcttgttatcataccagagctgcttcggcaagcttttcactagcaagctgtaatcagaacaagtagaaggttaagttcggtccttttggtcaattaataactaaaaacccatgttgattttacgctcagaatctcagtttgcatatgtgaaattcttatacttgtatattggctagttttgatatcggaaattgaaggggtcaatacctgaacatctccatgttgtctaagttggttcctgacaaaatcaactgcttctgagctgaaaaacatagaaaaatattttatgaggagactgaattaagagaaaaataagtaaaacattagagattcaaaacgaggtcaagtagacctgtttatgtaatcccacaagccatcagatgctaacagtacaaactctgcatctttgcccagagccacttgaaaaacatctggagatgctgtaaccaagtctccattgaattttacactgacaatagaaggtgttaagagcaatacaaatttcaaatgggtaggattgaatagtgttttgatttactaatctatatcttttgcgacataccgagaaacaaatttttcagtccatctcccttcttgaacacctttcttcagcatcctattcaattgtgtaaatgaataagatcataagttgcgatgggaatatgttatgcactagaaatagtaagcagagattagtagaactaactcgtttttctttgttttaaatctctggtctccaaaagcacgggatacagcaatatctccacaaattcttccattgacaatctttagacatcaaacataatttacagttagctttttctgtggtacataagcaccaaagacagatcacagtgatctcaacaggtttcttcaagaactacaagaaaaaagagaggctttgttgcaatgttcaatcaatgtttaaatagagaaaaggaataataaataataagactgacaatacaataaataattcaagcatcaaatgtcattttgaatatgatcaaactcatctccaaaaatccttgcttaaatgaaattatacacaacaatatctcttaccaacagtttttaactttggtttctataagagtgtcccacaattcgatgtat

SEQ ID NO: 185854 - DNA, 6161 bp, Cannabis indica
ttattgcattattgtttgatgtagaatgctatttttagattctacataagattaaattatttcttttattatcaagaacttgtatactcaaaatataatgaactttaatattatatcatttgtgtcaacttagtgaatcaaaggtacaaaatagctaaataagcatgtggatgattcttgaagcttttttctcttttactatcgattacacctttatttgctttcttttaatatttattatcaaaatacaaaaaatcatcaaactcattggttactattgtcactctttattaaccttttgtatttaattttctagtaatgcttttgtccacaatcaccttcctgtagaatcgaccgccctatctatactacaactacctctagtagaagtcatattttgggtgttaaataaattttggtaccattgttgggaggtcattttttaaaagctagtgaaatctacaatcaagaggttagtaaattcctttttgttatattttattttcttgtgaatattgtcttatgtgtgaagaaaaaaattcccaagaattcaaagtatactaggttgcggttttatcctatctttcttatttgtgttacaatacatacttttattaggatattaagaaacgacaggtcgttggaatggcttatgtcccaaaatttcttctctttctcagtgctccacactctgcctatggttttgagaaagtaagaaggagacgagagaaaagtaagtaaagcagagatagaataatggtctatggtgggcaatcatgaagaacagcagcaaccacagctacagagaagaagatcagcctaagaaagagagtcctatctcaaccatggactccagattcaaccaaaccctccgaaatgttcaagggtaagattcccaactgggtgtatttcttcagtcatttctgacaatagattctcagatttgagtacccttttgatcaaacattctcatttatggaatattattacagttccacgatcatagctataaatttcttagagaaccaagtctcttcaatctgttgcatgttagaaggtcgtttcggaaattgggtctttaatccgcaatgcatagcttttgatctgtgtaaatttgggatttggttgagaaatttgatgtgggatttattttcttggttgatttgattgaaaagttaatcataaagctgtgtcatcggaacgatcttttcctttagtttgaagtcagtggtgctctttaatatttttagatgcaggtgaaatgggaaaacttaaaagaaatcaataatttcttaactaatcaattattgattctggatgcataccatctttatatcctatagttgaatccttgaagggaagcttatattcttcatttttatagataaaatgcactttaaattgtggtttttactgcattttttatcaacttatagatccacaacatcgttacttttacatcactggactgcctttgttccattatttctccaatgaaagcttgataggatagttggtatgcttatcacttatggataaaacttttattcaaatgagcttgattggatagttcgcttgattactgcattttgattttaatatgtgcttttttactgtatatgttacagtggtaatctgatatgtcttgtgtatttgcatattgtgccaactaggttgctcaaaggtcgtacaatccctggtaaaatattgttaactagacggtcagatcccatagatgatttaagctcacaagaaaactcgccgagttatcagaggagcttctcatccaatgatgctgggacaagtgaccgtatggagaaggcagtaagggtgttatgtaaatatgtgtttatgtattcatatgttgcttgctcatctatctcacaagttcttatataacaaagttgtgaatagtttcatgatttcaactttatttataggaagaaaaccagaccccaagcaagccaaatagtaatgcaaatgcaagcaagttaaaatcatcaacctcacagcctgagattgctgtcaaagaaattcaaaaatccaccatgggtgctagagcaactgattcagcaaggctcacaaagttctcaaaggtgctgtccgggacaacaattatactaggtatgatttctctatgtctaataaataataaatgtccttattttttctttcattattttatttttattctattcaattaaaagtagtatggctgtataaagttaaggtttgtgcagaggtgcctatgttaaggtatgtgatttctctgacactaagtcattggaggaaatactacagcaaaaagttctagcattttttaatataaatatttggaatttcacttttctatcttccttacttcttcctctcaataacttttgatgttagtgtgtgaaatttagctaggatttttactacctgaatgattggttgtaactgtaatatttcattttgtagagaagttgcgtgaattagcttggagtggtgtaccgccctacatgcgtccaaatgtgtggagacttcttttggtaagcttgaatgcgaaattcttatgtttcaagctaaataattgtccatttaacaaatgcttcattttgaaaatacttttttttatcatcatgctgaaacattgacagaaattagtaggttcttggaataattttcacaaggttattttatgtatgatattgagatgaaactaagttagatgaaaacaatttttgacatatggcatgaggctagtttaattgcttttaggatatgactgagctttgctgactcactgtctggattagaagatgacttgatcaactctgaaaataaagtttaccagaaacgaagaatgataccatatgcctgggtatcatggataaacattacccagaatgataccatgtgggcttgtattgttaactatttcattttccgtttttttctccatactgtgatttagtcgtctttaccctcacgaattatttataaaagttcagtctgcagatgctcataccatttcacatcggtgagggcttacgtttgttggccttttaataacctgagttgcctttttgaaatttaagaatgaactgacaacagggatatgcaccacctaattcagatagaagggatggagttctgagaaggaagcgccttgagtatctggactgtgtttcgcagtattatgacatcccagatactgagcgttcagatgatgaaatcaacatgcttcgccaggtatctttaatgctacttaattgtctatgttgacgcgattaatgtctgtctccagttcttgacagcctattttactgtccttagattgctgttgattgtccaagaactgtaccggatgtctctttttttcaacaagagaaaattcaaaaatccttggagcgtgtcctttatacatggtagctactgataattaataaacagttctgaaattcaactgaagttgcatttaaattgggtattctcattttgtcttaataacttttcagggctatccggcatcctgcaagtggatatgttcagggaataaatgatcttgttacaccatttctagttgttttcttatcagaatacttggaagggagtgtagaaagttggttaatctctgatctatctccagataaactatctgatatagaggctgattgttattggtgcctgtcaaagttacttgatggtatgcaagaccattacacatttgctcaaccgggaatccagaggcttgtgtttaagctgaaggaattggttcggcggatagatggtatctcccttcctctgctccaatatctttttgttttttatatattttttcttcttaaagtaatttacatgagcagatggtcaggcttgacacaagaattgaacaaagttatactatcatcctcttcctcaatgctctgacattatagtttttaactattatatttactgatttctgctgtttggacaaggacttatgttttcctgttaactgcactagaacctgtttctaaacatgtggaggaacaagggctggaatttctacaatttgctttccgctggttcaactgtcttttaatacgcgaggttagctgttacagacacttgtattgaacattatacttcattagctaaagctttattatcagtccaattttaaattattttattttttcacatttgattactgaaaaacttctcaattcttttcatatgttgctaaaggaaatttgggcctttcgtttgttttgaaaaaattaacaagtacaaagtgatagaacctataatcctaagatgtcttaggaatggccttatgagttcattaattcactaaagctaattagtttggtttattacagatcccattccatcttgttactcgcctgtgggacacctatcttgcagaaggagacgctctaccagatttccttgtgtatatatttgccagttttcttttaacggtgagattatatatatattcattttacacagatttatctcatttagatgttttattttcaacttcgatatcggaatgaaggctactgtattctttggatttcctttcatcattcgtatatggactcactgtcactattaccttgtttgttatattcagtggtcagatgagcttcagaaacttgatttccaagagttagtgatgtttcttcaacatcttccaactcaaaactggactcaccaagaacttgagatggtactttcaagagcttacatgtggcacagtatgttcaatagctctccaagccatttagcaagctaatggagaaattgtgacacccaccagtgtgtgatctggtctgttctgcttgggttctaacttcccttttacttgttatattttaatctcaaattgttggtgatgatgatattgtatatgtcctctcattgtggatcgtgtacttgtaatgttgtacttccaactgcttctttgtagactttcctttgattttgatgagtggagtaagaaaagaacatctacttcaattcaattgtataacaatttttgccataaatttcattctcattgtttgaattcagaatctaaatcttacatattaatttgatatttattatatctaaacaaattaaaatctttcaccaattccaatccaaacctctgttgtcaaactagaccgaccattctctttggctgtagaggaaaccaaagttagaaaatataaaaagtaaccccaaaagaatcattggacaaaacaattgatcatgaattataacatggttccttacccgtttgcgttctaattcttcaagaaatttgtcagagcagtccataaactcaacacaatcattctttacacctcttacaagctcttcttctcccactttctcaaggttcctaatcaatattgtgaaggttaatttatctggagtacaacctgatgctttcatcaaaccataggcctccattgccttgtcaatcataccaagttgtaagtaagctccaatcatctcagtaaatacccttgtgttaggttccaacccttcttcctttagttccaagaagagttcttcagccatttcaatcagtttgttctttcccaataatcgaatcatgtcacagtatagtgacacatctggtttataccatacttcctttcttacaaatttgaatacctattacacctgatttcacttcagatgaatacagatttggaaatataaaattataatgaaatcaaataaagtaaaatatataataccttgagggctaagtccaattcattttgtctctgtaactcggccaaagtgtctaacaagtctatcttcaagaggcgaccaagtctggcaccgaaaacctcctttagctttggtggtgttgattttgctaacttgagtgactgtactgcctggatggcttcagtggagagtacccttgacctccacaagggctttcttggtccatcgcgaagcccacacgagactcttggggaacggcaacaacgggtcactgtggaagacagagcatagggatttgggaggttatgccggagactcacccttggaaaatgagatttgagggaacccattaaaacagaatccatggagatctcagacgaaccgaacctcaagcgagagaaagaaaggggaactcgaatggaacgacgctttcttgaactttctaaattttattt

SEQ ID NO: 185855 - DNA, 1609 bp, Cannabis indica
ctctgagtttcagagttccttcaatgaccatctttttgaccatctgaagccacaacaaactaaaaaacaccattgatccaatagttgaggagtaatccccaccatgatccataccattgggattgaaggagttattctttgccacacagcacttaatacatatattccaatccaaggtataccttacccaatcatatttttgcagagtaataagggaaagtaaattatttttacatgtataattgagtaatttctaataaacagattttttttttatatatatataaatgattttttttacaaaataatgatcttgtgatagggtgtttatttccttgaatacggagtcgagtgtgtatgaaatatggtcatctaggtaccttatttatacttgtactactattttgtaggagccgtggcaagagtgacatgtagtccaaattactcatcatacgacaaagatgatgttccttcatccatgttgagttacgaaagtgacgtaaatggtttcttccttgtcaagttattagtttcacagctcaaaacagggttgaatgtcaaagaagattgcaaagtatttctcgagtattctccacttcagacctgtaatcttccaaccgatgttaacgatggaattactggtgcaaatctttctttcttcactgctttcaaggacaaggttttctacactttgggagcaggacctctcatctataccactacccctaaaactgacaatacacgtgatcaatattcagcacccactcctggatattaaaaataggcaaaagcactattcttttttcttttataatttccaattcttgctaatttttatttattacatatatatcaataaatttcatatatttcttgattcaccaaaagtaatttgttcctttttcatagttgaaaaggttgtgtgaaattgtttattgattcaaagttttaataaattggttctctcattataatattttttataatatatatgttgatgctcaaaattagttcaataataaatttataattacttcgaattctttacattaaaattgtttcaaaattctgttattgcacaatttctccttcattatttttcgttctgtcttcgtgtggtggtctaagattcgagtagattgtgctgttggagatacaattcggcagagttttgtgtgggctattatagtcatgaatctttcctctctttgaatattgtggtctctatttatagtcagcaattggtgtcgaacgatttttattctctcatcggattggtcctcgtgggtccgttctcctattcccccacacattttttttttcattctagctatcaagctccgtccttaaagctttttcgaacttagctcaactcttttgctttttccttcttcttaattaaaacaatgtgtttctactttctttgccattattctttattaattttcatgcttccaataggatgaaattacctttatacccaaagagtacttttatcccttacaattgcccataagttctacaatttctaagctcttgaccgttaagtctaagtttatatgttgtggaatcagttacctaacattattccatacatatcttttcaagc

SEQ ID NO: 185856 - DNA, 2579 bp, Cannabis indica
aaagctatttaaataaaactttaaagaccatgataatctataagcaagtgcataccttcgaggagttaagttgtggtgtatctgaattgaaacccagaacaaaacttaattcctggctttcacctcttggtggattccatgaaatagatgcagacatacatgaagctttgctcaaaatagaaactgaatcactgacattctgaaattcggcctgaccaaaatgaacaattccaaacatgttaatatttttcttttcatctccgatagagtacagtaatgactaaatgttagaaaatcataaaaattcaaaagaaaagtcggtacatagcttgcagagattttcagtaatagtatgattttccagcttatataaaattaatgtaattgaagtagagtaagagaagtaagattaaaactgaagtgtactgacctgaagttgccaattcttcagttccaagggatctaagagctcatagactttgatatggccatctgaataagcagcaacctataaatgattgtttcagagaataaagaagaacacttgaatagtaataaatttgttaactgtattactataccataaattattatgggaaaggtatatggtcctcgttaaaatcattcttacaatttgtaattcacacatgacaaataagatgattgcataaagtagtttgtaacattcttttttctttctcattttaaaacacccatttgaaggaaatattcagcagtacatcagtagctaattcgttatacttactcatcaataattgtgccgaagtatgtagaaaacgttgaaaataaaagtattaacaaaaagagcaaattcttccacctcaccatctttaagcctgattgagaaactccaaattggatatccagcacctgagatgaattgcttttaaaggttttgcaaatcttccactgaagaggttgtgcatctaaaatacaaaaacagaaaaacattaatactaatggcaaaattaaggatttttttccctaagtatatggtatataaaatccaaatctatgaaattcttcttgaaatccaagtaaatacaattttcacaaaacccaaaacggggtcttaaagtgggtaagcaattggtgctgaagatactcagtaccatattaaaagtctaaatgtaaacctaattttgtaaatgttgggtacaaaaccctaaactaattgttactgtgatctagagactagacaaataagagaatattagttaaaggaagtgaacagaatttttgagctttttgagttacttgaaaaggttgtttcttagaatgaaaaggttgttagtaaagttagtgacagcaaatccgagaggcaagaaacaaagcatgacaacaaaagattcagaagattgttcaagaatatacaagtgaagctagctgaaacctgaaactgaagtgaagtacacatgcttaagatcaaatattataaatttggtggaagaacaacattggacattggctagcgctgtccatctagcaatgaaggtagaaactcaatgtactaatcaaaatgaagttgaaacttgaaaaccccaaagcaagaaagaaccattagtcaagaacagcaacaaaaacctctaacagtcaagatcaacagaggttgatgggaaataatgtcatcaaggactgcaacattatgtctcaaaatattgcatctcaatttgttaagagacataaataatttctttaagagcaggaaaagggacttaaatcctctaacttcttgtgccaaagaaaccctaatagtatcagatagagctaatgagcagctataatttaatgaaaataaagtcacttgtaagatcgagaagctcgaattctagtagttcatcaatctatgttagctcctagagtattggaaagtgattggagaagaaacaacatctttagaatcaagtacagtacatcagtcatgggaaactttgcaacattatcttaatggaggcagctaagagaacttgttttccaaataaatggtgacacaaccaaattcctacattttagcttggtttatgaaacatgaagaagaagaagaagaagaaaggtgagaaataaataccttctacaacctcctcccagagtgacactgttccatccacacaaacacatgccactgcatcaccatattccggaggaacccaaacaactttgacaactccattttcatgcacctaacaaagatgataagatcaaacatataaacaaactcagagaacactataaaaacacaattcaacaatcatactcaaaaccaacttgcatattcatccactttcttgtatatctaatacaaaaccattacaccaccaatgacacagttttattcaagtgaattccaaccaaaattcacatctcgaccaacatctccaaaagctatcattacatttacaaattcatcaatttgatcaaaaagcacattactttgaaagaaatgaagggaatagaatgcagtatattgaggaaatagaaatataggaacgaaccctagatttagatgagcgggtaaaggaggaggaagcagggtccggagagtcgaagatagaaaggaa

SEQ ID NO: 185857 - DNA, 4313 bp, Cannabis indica
attaagcagacagcaagaaaaaacaaagtaaacacaactgacaaatgagaataacctagtagtgattattaattaaaggcatatatgacaaaaaacatgggaaatcaggatgtttgaagcaataaggggaaatcacctgttgccaattaaatttaaaattgaaaggatttaggcaaacagaataagaaatgaaatgtatgttcctttatcaacctgatctgatgcctctttcttggatcccccaaatgcgacaagaaaatctttgtccttgtgctgcacgaaaactaaactgaaaccctgagaaaaaaaaacagcagggaacatgttaacaagtccatttgccaaaagaaaatgccattaaatacttgcttaatctcttaaatcttaggaaaaaataaaataaaatgtggtacaagcaaaacggccaactctacatatcagaacatttttgctcaacaaaatttaacagcaggtaccttattggtggtgatggaagatgagaatgaagtacttgctactgaccattcaacttttgtaatgtcaaagacaagagtctcgcctcgtcctgtaaaaattcatgtatcagttaacaaacactaatgaaaaacacagcaaattctacaataaatttataacaagttaacaaatttcacaacaggaaacttttataaaatatctgaatctgaaaatagatttctttcaatagcacaaatgatgcaagtaaaaaatagacacccaaccaggacttgcgagtagaaccaaataatttattgtgtggactgtggaagaaaatagtaaagtgcaagatatgtcagattacatgttaataataataataataaagcagagacctatacgaatcaagaagcttgaagattttcctttttttttaaaaaaaaaaaaaagaaaagaaagaaaaaggttccacaagaaataacatatcaaaacagaatgttttccattttatggcatggcatcaattattatctgtcaacccaacacatgtaaacatacagtgagaaaacacaattttagccaaatcaaatgttacaagaatcacaagattgggtcaatagagcaaatcttgttgagaacaatttaataacatagcatgaaacatttatcatctcaggttatggagcatacgtttttttctgcttccacccccaacaatataccattttgttccacatagaactccacagcaaccggctctaggtgatggatggtatccccgcaccttaattctagaccatatcatctgcgggaaatagctatctattagatgtcaaagtataatacattactcatgggtgtctatgaaaagataaaatagttgatcacctaaaagtaataaaaggaaattacatactgtttcaaaattaagtgaatacaaatcattcaaggtcctcgactttgatgcccctccaaaaatataaagcattttgtcatcataaagagctgctgtgtggttggatctaggaggaggtccaggtcctctgcaggtaaattatgaaaggtatatgatcaagagatagcttacaacaaaaggacattggataccaatccaaatcatcccatgactaaacaaattggacgccaccaaacaaagtttccaaagagaacattatcaagaaattcagagcaccagagtccactcacttgaaatgaagaggaagccacgtcaatgacttgagatcaaacctatgcagatcatttagttttttcctcttggcatcttcaccaccaaataggaacagaatagagttcgcccttactacagtatgaccactgcgagcaacctgcagttaataaaatccgtgaaagggacttattatatagtataatgactgttcaaacttgatacagattttaaaagtgtctgacatgcccaacattatccacaaaacaagctcctcataagcatataatttatagtatctatacaccatacgatacatttgtttgtgtactgttaacccagatgtagttgcactatcatcaatgcaataaccttaccggtatgtctccttttgcttccataagagaccagcactctgtttctgtgtcaaacacccacactgcagaaaccaaagaaaagacagccatattttagatcacgtttaacaaaatattggtgattaattgaacaaatgagacacaagggatatttaaccttttactttctcactccatggttcagtttttccgccaacaagaagtactttttttccccatgaaatctagaagcatagaatgtttttcagccacaacaatgagagattcgattactaataactaagatgtaatttctagctcacatagttagtgataagaaataggaaaaataaaagatagatgtgatgtgcatcaactacttaacatcattggcatcctcgaacaatcaatatcataatgcctgccacttaattttctacttctgtaagaagcctttattaggttaaatcttatactggtgtgcttctttaaatataattattctttcagtttcttatgatacttcatatattgacggatcaatttatggcttcttgattcacggcttcttccatgcttagacattgaactttcatctgcgtgaactgtttaactctcttctgaaagtgaacttttagatcaacaccagtgatcataatatttatatcatgcctaaccatatcaaccaaaagtcctaagctcattattgcacagctggtaacatcaatcattttaacaagcaagcaaatatgaattctaaaattattcccaaaaagaaaattaaatgatttcaatcacacaagaaatctattaaaagtatttgtgttattaccagacaatggcccttgcatgaggggatctttaatggcagattgctggatgacaaataaagttttgaagaagctttggtccaggtaaacctatcaaaattaagcacctgacaatggagttgaacactataaccgtttaaatgacaattctattgaacatgagtatagctcttataatgctagataggattactttgccctgaatctaagacctaaagaacataattcaacaaagaaacttatctacctgcacatcatctagcaatccatttccagattcaccacccactactatcatcttgttcccaatcacagctgctgcatgctattgaaaatagaagtaaaactttagtttctcttttaataaactcaaatggaaaatcttaagaaaaaaaaactaccaacaatatccttacattaaagcggggagtgggtttatccccagaaactgacaacaccatccaactctcagagttcgccattgtagagctaccagtgtccgaagcagcagacaaatactgatcatcacgttcctcagagtgaccactaactttggcagcactttcactctgcaaaaactcaaatgaactttagctcaagaaacaaccaccattgaaaatacaaaacccacaagcagaatcaattaagctgagaaaacttacattattagagctgtcatttcgttttgattgaggccttattggacttctagttccatgagtagagtcagattgttgaaccttcaatctgagagcccaaccaacccatttgactgagattattagttctaagaaaaaaaagtcaagttctttaattttatttttccaaatctagagttctgcactacttgaaaaaaaaaatactcaccgtccaaacttcatccgtcgtcgagaaaaaccgagcatctttttcttcttctgaaagaaaagcattctatatcacacaaacaaccatgaacagaaaaagcttcagaagaaaaccctgtagattttgggaaaaggaagctgcattatcatcaaaaagccctaaaagaaagctctggaagacatgaacaggaccgcatacggttgacgttaaaaaaactgattagcagtaatgtcagaagcaaaatcacctttttagttttgtttggttcctgagaaagtcaagtgaccaaacgagaaagagaccagtcgagagagttgtgactcggtgagctaactcgctctctctctctctcttctgagaaaaaactgagctggaacgaggtagcgcgagagagacagggagatagaggaaggtgcgtacgttagtataacgttgtcgttttgtccgtatttaggtatacgatagttgctcttcttgatattcctttcagatttgggggattttttccttttttttcttcttttatagcttaattattgtttggtctaattagtaatttttccttccgtaactttgtacatgtactaaatcgtgcctccttaacttttttggccgttt

SEQ ID NO: 185858 - DNA, 6325 bp, Cannabis indica
aaatcttcatcatcttctctcccgagtctcctccactctctcccactctttctaatcgctacttttctctgcaaaacccggtgccatctccggccaaccgcttcgtcttccaacgatccgaacccagccccaactgcccaacgatcccggccccatttccgacgacaacaaccccgacccttccttggggatcagctccaagatcctcaacctcgagaccctcaattctcatttccctctctctctctgtcagtcactgccagccgcggcaactccggagttccaagggtcttcaatcgcgatttaagactatttcgaactcatacgtatgtagaacaaaatccgtgagttctattttttctaaccattacttgttttactaatatttatatgctattattagggtttgaattaatttttcagttgcattagtttaatagacttgagagaaatagttcgtatgaagaaagaagttgatttaagttctcagaatttatcgaataatagttttacttttttccatttctcagattatttatatatatgtatatatcaaatattgtgtttacaattttgaatgtattttagggttatatggtagtgcttttttttgaaatgaagtaactattcgaattttaatggggctgatacaaattactgagtatcaattgatagaaattaacttgggttttcttgtttgttttttaagatatccattgttatcattacaacttagttcatttcaggtgatttttgcatgcttaagtatcctattatattaggacattatgaggtatcaaaaacttgatttatagtgttgtatgcttgtatagtgctgtgtattttgttctaaaatatagctgttgtttttgttcatagtagtgaaaatggttgctgttgactagaataaatattatattaggcttttccattagttgttttttttaatgctaattattagtttgaacaagttttgatatcttttgggttttatgttttgcagatttttctttctattgtactttgctagggttgtggctctcaatgcttgtaggggtgtagtttgttgtcttgtcaaagttttcaatgaaaccaaagtgtactttaaagctcttaagagatgcttctatttttatttctgtttgattataattttaatataactggtcctttctaagcttatgaagtaatgtttctacaattttaatatatttgtgtttttcttattaatttttatattaaaaaaaacattattattggcaatcctaaaaaagtagggagaaaatctattatattcatttttttctttaatttattcattctcaatgctcaatctcagaaaccctagcaatggagaaagagaagacaacgaacaagcgcacccgggaggagcgtgaccatcggaagcatcgcacccgtgatgctgatgaaaaaaggtcttctagagaccttgatcatgaccatcaccaccgccaccaccgctcggaccgcgaccacaaatcccgtcgagagtcgagacacgaagaccgcgagggttcgcgagaaagagaagggagtcgagataggccctacgatcgcgaatcgaagcgtgagaggtcgtatgagccgaggagtgatgaaaaggctaatcatcatcgggaatcaaagcgcgagatgtctgaagagagggaggcgtctgtggagaggagacataagaggaaagagaggggtacaagtgaggataatagggatggtgatggtgagaaaagggctaaggtttacgatgatgggaggaaggagaagaggcggttagaggatagggctgaagaagatgagcaagaagataatgggggtcgccggagatttgaggatcgacagttgaaggaagtgaaagaagaagttgctcatgtgcatttggataattctcaaactcctactgggaatggtaaagagaatgggaatggttcactgggcaatgtgagtattctcttgcttttcattttccttctcgtttgcatttattcgttatccttgatttttttgtatatcattttgattgtttgcatgttgggatgtgtttttacataatattttgataggttgctgcgcccgaaccactggttatgtcatcagggagtttacctgaaacctctttcacccctagtcatccccttcctaccaaggtatcttcgatttctacaacacatgaaaataagggagttagtattaccagatctcatgaggttcctggaaaatctagtacagatgggacatcttcaactgctggaaaaagtacaagtctgtctcttgatgctttagcaaaagctaagaaagctttacagatgcagaaggaattatcagagaagatgaagagaattccccttgtaagttctcagtgaatcaaaatcaatgttccatttctcaaagtcccatcatttattgattgtgtgtgttcctttccaatgtgtagttgaacaagggtgttggtgcaagttcagaaaatagccgaaactttggtccaaaggaggggttgaagcctggatctgtatcatcatcaacctctgctacagctataatcgattcaacattgaattcctcaaaccatgcttctgggaaccctgcaagtggcttggctacttctgctggtcttactgccattcccaactatgaggctgtaaaacgtgcacaagagcttgctgccaggatgggatttcgccaggacccagagtttgctcctttaataaacttgtttccaggacaagctacaacagatgtagctgctgccccccagaagcctactaaagctcctgttcttcgccttgatgctctcggcagggaaatagatgagcatggaaatgttgtgaatctgactaaaccaagcaatctcagcaccttaaaggtttgaaatcgacattttggaggaattgttaattgaaattctaggtcatattgttggctagcatataaatacaatctctcaattgcaggttaacattaacaaacagaagaaagacgcatttcagatacttaaacctgaactagatgtggatccagaatcaaatcctcattttgattcaagtatgggtttgaatatagctaaaatcatgcggcctaagaggatgaatttcctctttgtagaggaaggaaagtggtctaaagatgctgagcatataaaattgaaggtactactctctgttacattgagacctcacattctgatgtctgtgctctctaatagttatttattcaatattcttacagagtaaatttggagatgcacaagccaaagagcacagagcaaagcaggcacagttagcaaaggcaaaagcagctcctgatataaatccaaacttgatagaagtatctgagagagttatgacaaaagaaaaaccaaaggaacctattcctgaagttgagtggtggtaagttaatagggttctcatgcatttgtgtggtatgctttatggtacatttagggcattattatcccctttttttttgcttttggcttaaaaatgagttatttcttggtgattcgtgtcatatataaattgtagatgcttctgtgttgcctatacaagatttggcccttgtttttccattacctttcttagagattttagcgatttggcaaccaaattaaatcaatttcggttgagtgctctcatttctaattataactgctatgtgtatgtcagggatgtgcctcttttgcactctggtctttatggagatgttgctgatggtaatatttcggatggtatattaaggctggagaaaatcaccatctatgttgagcatcctcgtcctattgagcccccggctgagccagctcctcccccacctcaaccgctcaagttaacaaagaaagaacaaaagaaactccgtacacaacggcgattgggtagggagagagaaaggcaggagatgattagacaaggcctgatagaacctccaaaaccgaaagttaaaatgagtaatttgatgaaggttcttggttctgaagcaacacaagatccaactaggcttgagaaggaaattcgtagtgcagctgctgatcgtgaacaagctcacatagaccggaatactgcacggaagctcactcccgctgagcgccgtgagaagaaagagcggaagctttttgaagatccaaacacagtggagaccctagtttcagtttacaagataaatgacttgacgcatcctcagactcgatttaaggttgacatttttgcacgacagaaccgattgactggatgcgctgttatcgctgatggtatcacagtagttgttgtcgaaggtggaagtaaatccattaagaggtacgggaagcttatgcttaggcgaataaactgggaaaacgctgtgaaagacgaggaagaggacgaagatgaagaagatgataaacctccaaacaaatgcgtgttagtttggcaaggcagcgttgctaagcctacattcactaaatttttaattcatgattgcatgacggaagctgctgcccggaagatttatgctgatgcaggagttgttcattactgggatctcgctattaattttacggatgatcaaaactaattcgagaggctgcttcgatcaattttccttacatttctctctgcgttgtgtttgttattgtaactgtttctttcttttcttaatgagatgctcaagggtcttttctttcagaagaaacacttgtgtattcatcttggtacctgaatttagagtagacaaactatttttgtttgatgagcatttactgtttacatcatatatttctctttctatgcatatacatatgtgtgtgtttatacatagcatccttcaaatcaccataccaccatcttcactgttttttgcaggcgattctttggcggttgcatcttcgatggagtgcaccacagtccggttatggccgagttttacagcagagccattgtaagttatcgttgacatttaagtctttgattgtgcttattttttctttttgattttaaaacacacttcattcaacgaaacttgagtccacatataatagagttagtagaaacaaagggttctacatcccttactaaaagaaaaccggtagaactggtggaggccgcccaagcggcaggcttagggcttgggctgcctcattaaatctcctacgaatccaaaccacataaacattcaaaatagaatctatccttggttgtgcttagttaatgtcatatgtttaattgtttggttaggttttagccatttggttggctttttatgccttttattggctagtttgtgcaattttattggcttataatttaactttcggagctcggtaatttacaagtatttcgagagattagtcacttctggaaagatccaccaggaggataaacggttttatctcttctcctcgcaagtgaactcaactcggagaagacatggaaggacaagcggtgttgcttgaggttaaattattgtgcatgcatttaatgcagcatgagaaagaacatcgtacacattactttagaaagacgtgttcgaaggtttaaactcataattttttaatttcacaatgcctcatacattatttgacggctacattatcatctatcaaatcattagcgaaaaacaagtctagtctcaccaaacgcctattacaaaccgatgcacctcatagagaataggcaatcatgtcttttgttcaaatttggaaaattgtgcaagacatgactcatacaaacatgacaatagtaatctttttactaccattatgagcttataaatactctaataatgtatggaagaagggatttttgagagattccttaatagaaaacactaattaataacaatgactcatggactaaggttcattaatgtcataatcacgtaaaaattctcttctgcaactttcaataattaatagttgccgaaaatctcaatcaataatatatattaattatgttattaatcttttaataatacaattttttttatcatgtgttataatggcccaccgaaaaattttattcttcaaaatgaaaagctaaaaagaatatatgtaagcaaatatttttaatataattaaaatagataataaaattaacacaaaataataagattttttactaaaaaaataatatttattagttttcaagataagaatagataaattaattctatgtaaataattttttttatgaaatttcatattttattaaatatttgttacgttttttttttttttattttgtaagcattctattagtagttagaagtcacatctattaattttaaagttctattatctaatttttatagaaacaagaaaattctccactcctaactttcttcc

SEQ ID NO: 185859 - DNA, 3096 bp, Cannabis indica
gattttataagaaaataaagtatactattattttacaagttaattattatttatttatttttcatttcttaattaatcacaatcatttattaaaaatttaatgactaaaaataaatgtaattcatggtagttatatatttgatgtaatcattaataaaattttctatatatatgaatgttatattgatatttttttagtaagaaacttttgttttatgtgatgtaatatatatatttatagtcaagtattataattttatttatgaacgtattataaagaaaatatatttatataaagttcggttcttgaaattttttttttattttgtttatttttagtcaatgttttttttttttttttgagaaagataaaactttattcaaaaacaagtaagattcacataaaggcaagaggccacaacaacaaaccagcggcaactgctacagccagcagccctacaacaaaagttaccatctattaattacaaagtttattttgttattgtttaaaattaattttattacctaaatggagttgtggatattaatgtgtataaagtttattttgttattgtttaaaattaattttattatctagatggagttgtggatattaatgtagaaatatacaatatgaggttttaggaataatgatatgtttgatattgaagtcattaaaaaaaaattaaagttatctttagtgataaatttttagttataatataaattttttatgactcaatttgattattagtcacaataaaatattacttgtgactaagatataatatttagatacaaattatcattaatttagttttaatcagaacaagtattgtgactaaaaatacgtttaatcataacaaattgtaatttttgtgactaatacttttaatcatggattttttagactttagtcacaacgtaagaatgataatttataattaatcacaatctttttacttttagttataagttttatattattgctaaaagtaaaataaaaaaattatagtgaatgaaagagaaaaaggagaatgataaggataaggagaatgagaaaaataagaaatctatgggaaagtcagatattgaattttaattttctaatcagaatattattagattgatctcacaatatttgcttattatgtagaggttttactctctctctatataatatacatgaaattaaaatttatgtatgtgatgagaatagttacattaattgcatatatatatacgttcgtgtgcggcacggcaacggatgattcagacaagaaatcaaatgtgctgatatgaatccaaatgagttaatgtcaacctattcaacgtcatttttttggggggctgtttgtaattggattaggcgtacgtacgtagctatatggatttttgttttgaaagtaaccaatggaaccaccaccatatactttctctgcatataacaatttctctccccatcccctaattaaacatatatttatacacgcttagcgttatgggagactacatatttactttactgcccatagatatatctttacctaatcacatgaatgagatcataaacaatggttactaattagttacttgtactatctaataacatgtatatgtgaacaaaaattactaattatattattgtactctatatgacctttaatctaattcgatcgttcacacaacggcgccaactaggttttactttctgttcttaggtaattttaatgaatacgaacctttgaacgaagactaagaagtcaagaaaatagtctttccaagtgtacgtatatactatgaaatatatatatatatatataattatatatatttatgggtcgaacgacgtttgtaagctaccgtgaacaacatatatactctctaggctcatgttatccacatcatattaattactcctttgctacgtggcaatccgtttcataaaccgaattccacatcataacggcccttaattattgttcggcggttttggcttgcataaaagacatgtattttcaactttgtaatataaactaattattcagagcattgctattaggcattagtggtggctagcaccttctcgacatgtcgtgttacgattggctagcgatattccctaaaagctattatattaaattatataggacccaatacttagttaggccaatagcgatattgacacataagagagtgctaagcacatttctcaattatttatgtatatacacgtacgcatatgtaggacccatttttattgatcatagttgaagctccattatctgaaggtgtggtgggaccaatattgcaactgcatgagacatgttttttggcaatagatcatcatggatgacttaattaactaagtacgtacgtaattgtattgtacccataagtttttgagtaattattataggcgttttccaagttgataagctgcagaatatgaattggagctagctatagatatctgttttgtcaacacttttgtggttttctctttcgtacgtcaaccttgtaaggcataaaccatgcatttcttgtgagtattggcaggtttgagtaattaatgcccatccatattaattggtattacttttatttgttgatattaattatcgataaatatgaacacaaacgcacacacacttgaaagacaaagtatatgaatatttatatatgaagtagttcttcttctctctctcacacacacatatataataacttatctatatatatttattgatcagagaaaagtataaacaaaatataatgggaaatatttggttcggtaagaacaagggatttcaccctataaacgacgacagacaaagaaaaacgacaacaaataatactagtgtgacaattaaggtgcgtatgagggcaacagagtttagggagctggtggctcaggtggatatggatttaaccaaaactaataacgctaattcagagcttggctggttgatccttcaacactgtcttcaaggtaagaatcgttctccaatggacgtcgatcgttgtcgtttatcccaaacgacaatagattatcgtcgtctaagcaccatttgtgaagaagaagaagaaaaaaaa

SEQ ID NO: 185860 - DNA, 4525 bp, Cannabis indica
aatggtgtctaatatgctcttcagtatcataccgaataccaaatagcgtaattaagtatcgtatttcatataacttaaagaaataactttaaaaatatctctaatcgatcctacaacaccacctataaaattggtgccaaataccaatcctataacagtaagctttaatggaagtccaaatgtccaatgggaatttctggctgccacgtgtttcgtttggaagtgcgtaaggaatgtagcagtggtacccatagtttccaactccaaccaaccctatataaaagccaaactacaaacaaagctcaatcaccgactagaagaaacagagtaatcaataaaagtttatttagttataataacaaaggataatatattatcatgtgtatagcagtgtttgtatggcaagctcatcctctctaccctcttatcattttccaaaacagagatgagtatcacaacaggtaaattcgtaatcaatcatgaaaagggtgtgtgattttgttcttcttctttcttttatgataattgttttgttgaaaaaaataaaaagggaaacgaagccgttgggttggtgggaagattgtgaaaatggagggattttaggaggaagagatgaggttgctggagggacatggatggcttgttctaaacaaggaagagtggctttacttaccaatgttttagagcttcattcactccctgaggctaggactcgtggagaccttcctctgctgttcttacaggtctgtgtgtgtttgaaaactgaacaccctttttcttcttccttttcaattagagcatcgctattgcataccagtgactaacaccttttataagtggcaattcacgattgatatacttaattacaatgtcttttagcaattctctttcaattagatgatacattttgggttgtgtttaatgatggcagagcaataaaagtcccaaggaatttgcagaggaactggtaaaagaggctcaccagtataatgggttcaacttgattctggctgatatatcatcatcttcttctaattccatggtgtacatatcgaaccgccccaagggagagccaattctggtgcaggaggttccccctggcattcatgtcatttccaatgctaagcttaactctccttggcacaaggttttttttgttgtttctaaatttaatgcatatacagtagaatggggttcattagctaatctttcttcagtaacaacaatgctttatacattcaatttataggctcagcggttggaattgaggttcaaggaagagcttactaaataccatgaaagtgagataccagtgaaagagatggttgagaaactaatgagagacaaagttaaagctgataaaagtgagttgcctggtatatgtgctcttgactgggagttcaaatctaagctctatatttgttgaagttgacaccccactggtgagcattgactcattcattcattacaagtttaaaaaagttgtatttatatatgcattaaagttggtgtccatgacctgggatttttgtctttatctgcagggtcgttatggaactaggagcactgctgctttaactgcaaaaacaaatggtgaagttaccttttacgagacttatctggacaaagacatgtggaaggaacaaactgtcagttaccagattcagaagcttcaagaaaatggaaccaatccagattcagaagctctgcctcatatataatttttctctgtggactgtgtgaatatgtatatctataattctactaccgtatgactcaagtcatgcgtatttatgttttaaaagaaagccttgtaaggcacatttatctatattaatatgaagaagaagaaaaaaatacagcccagagtttcagattcagaatgaacaagtgtttaaagtacaataaactagagaatatgattctatcttcttgtgtttaaagtacaatcaactagaaaatatgattctatcttcttgataatcaatcaaaacatccgagcggtctgaaaaactataaatgtctgtaacactaaattattgtttttattctagtcgcaacaatggtatgttaaattaacatcacttttcaagcctagacttaacttatacctcaacactcaacagtcttgaggactatacatcatctgaagcagaaagtccttgcgttcatcaactgggcatccaaagaaggctctcacccttgcagcatttgcaattaggaaggtgtaggccctaaaccgtaactgtaaatcaacaccgatgcttactagttctttgaaaacttcttcctctgaataaacacgagctcgactcctctctgcaatggcatttccctccctgattgccgccgcaacatctttaattgcttccctaacactagcaaactctctctcaaagtccaaattccttgaggcctttctcttcttgcctttcaatgatgttgcagacagagaaggtgcttgagaatcgatttgcgaattggcttctgctgaaattggcagcacataatttccaccatttccaccatttaagtcctctaaagtaaatgctacctcattttgagaggccccaagatcaccgttcaaatcgctaccaatgttcaaattaactagatggtttccgtcctctttggccattgcaaagctgtcacccgcttcatttgcaaatagcatcagtaatttatcatagttgccaactggtgttgacatccattttctcgcatcaggtcttgcctattaaaaaatgagtgcaacaggttttatacattactagctatatgcactaataaactttagtccaacaatctggaataccgaaagataatttaccttgatcaggtctttccacacttcaggctctgcagtccagagctttgtctccggactccatgtaaaatcattaataccactaaaaagattatgacactctttaaaatgatgcttaagagttttcatacgatttttcaagtgatctttctgaaatggctctccaagtttatcacgcatttctttcaaaatgttattataagctgcagtggtgaaaaccttatcaaccctgttccccatggtttgctgatgcacaagagcctcaacaaaaacatcatcccaacgttcggtccatttcacattaaatctcttatcctcaccattcttctttactctgtgtcccatttatacacctgcaaatgcacataatggttgtaaaaaaatcaaattatcaactcagtaatttaataacaaaaaggtccaagagaagtaccttttacttttttccgagaagcccaagagaagtgccttgatatcaaagaaactctgatcttgaaatcttgaatagctaattacagtagcaaaagtatgctcctctttgctccaaatcttctaattctcggcatttattcactaaatgtaagtgcctgtaaggaagagttcatactattaaggataaattaacagacaagcaccaaattctgctaacctttaattgaataatgtttgattaaacacaccacaggtagtgacgaagaacaagaaaggttctaagactatagagcatcagcgaatagaccatttcccccatgaacttacttcaagttcagagatcaactgtaagtcatcgcttgcactggttttgcacccaggaaataaaatttgcagagaaatgtacatctaaacaaagtggtgaaagtatgtaattgaaaacaaaaagaaactaacagtattgtagaaaagaaaagaaagaataataaattaaaaaaaaaaaaagtaacgatgaaaatgtaatcagtagcagttgttacaagctcaaaattttcccaataaattgaaaacaacatacagtaaatcgattcattttgaataatagaagtattaagcactacataaagaaaaaaaatgtcctgaaatttcactgattcaatgtgataagcttccccttacatatgtgtgcgcgcgaagacccaaagggagggtcaggtcagcaagtgactcagcaagtcagagggaaaattagttatgagagaaatacttgtgtgtgagtggggtgcagtgttgttagctgtgctttggggtgcagtgttgttagctgtgcttcgggtaatttggtccatgtgaaactctgaccttatcggcaacggtttgtggcacgacgtcgcaatatgaagttgggcctagcttttttggacctttccccgtcttagctcgaatagtagcaattgcttatcatttacaactaccacaggactccaaaatacatctggtgtttcatgtttcgctacttcacgttgctttgggccctcatcaacaagccacctttacgccacttgggctaactacaaagtttgagtggacttttgagccgaaaagtgtgcttgatgttcgtccgggaccccgccggtgcaacctcaagctctcatacagtggacaaaatacctgcgtttgaggctacttcggaggatttttaggctactaaagagcagtttccacactttcaccttgaggacaaggtgcattttgggtcgagggtat

SEQ ID NO: 185861 - DNA, 5000 bp, Cannabis indica
aataaataaaattgaatattattatttgaaagaagtaaggaacattttgagggagacattgtgtgctgtggttggttctacctgataattactgcaggcgtgttttaacttggactcaactcagtgtatgactaagcaaagcaagtctttataatccctaaaccccaaaaacccataattcatttccctccattttcatcagaagaaggatgttctcgcctggaacaaagaggtctaatgctagttctcgaagggaccctaatctagggcacgcaggctctccggttactcctcttaccgagaatcgccgttcgacttccgataatgccgttccaaatcgccctagtactggcactccggccccatgggctccccggctctctgttctggccaggtatcaccgccatttctattctatatgcgaatgtgtgtgtgaaaacgaagttagtttaattggctgatagtgtgttttggagcttcattgttggttgatcgactgctttatttagtgtattatgtattgacatagtaatcatagttatatacaagttcatggaagtacttcctttctgaattccaacagtgccataaatgagtgtggatcttttatatactaagtagaaaactctggctattgcattgaatcgaaatggtagctcaaatcattcatgtaatatcttattgaatcattcgattatcttttctagaatttcggctgcgaataataacgagaaaggagatgttgcagaccagattaaacctgtttatgtaggagaatttccccaggtggttcgtgatgagcagaccatgttgctgcagaggcatggtcggggttagtttctcatacttttataacttttttggttgagagcttgagaacatgaattttattttattttaccgtggaaaactaaatttattgttcaggtgatgcatttatatgtggtggagtggagaagggaacatctattgcatggattatatgtggaagcaagctctttgtttggagttaccatctcctgctgtgtcaaaaaaaagcgttgttcttgaaatcccttcaaatattttagagagtggagacattgacagaagtgatggtaactgttggtttgtttgtgctgtcagttgggataggacatctagtagaacaaagaaacttgtagagcataacgactttgctgctattatactgtgtaatcagaaaactcgcactgttatatactggcctgacataaattctgaagggaaaactgctccagtcaccagtaatgcatctcctaatgaattcgaggtgacatcttcacctatcaatgtgaaaaacataacgaacaagaaaaatagtagttttactggtttgtgttctttcaactctttgattactgctgcagttcccaatttgccacatgtctgtattgcacttgcttctagttcaaatggtgaagtatggaaatttctttgtagcccatcgggtattaaacgccacaaagtagactgggatacttctttgagttcaacctctcgaaataatgatggtgttcaaattttaggaagcaggggatatccaaggtcactggtctggcgtttttcacatccttcaatgcaagaatccagcaggcagttttttcttttgactgattatgaaatacagtgtttcagcattgaactttgtcctgatgtaaatgtgtcgaaggtctggtcgcatgaaattattggcacggatggtgatttgggtattaaaaaggatctagctggacagaagcgtatatggccccttgatatgcagatagacaatcatggtaaggtcattaccattcttgttgctacattttgtaaagaccgagttagcagttcaagctacacacaatattctcttctaaccatgcaatataagtctggggtgagtacagaggtggctcacgaaagggttctagagaaaaaagctccaatacaagtgattattcctaaagcaagagttgaagatgaagattttctgttctccatgagacttcgagtaggaggcaagccttcaggctcaacgattatactttctaatgatggaacagcaacagtgtctcactattatggaaattctacccggctttatcaatttgacctaccttatgatgctggtaaagtattggatgcttcagttcttcctaatactgatgatggtgaagaaggggcatgggttgtactaactgagaaagcaggaatatgggcaatacctgagaaggctgttataattggtggagtcgaaccccctgaaagaagcttatctcgtaaaggtagctcaaatgaaggatcagcacaagaggagaggaaaaatatcacatttggaggtaatgtagctcctagaagggctagttctgaagcattgggtgctggagatagacagagggcagtcgtgggtgtgatggcacaccgaaatgcccaagatgaagagtcagaaactttgttgagtcaacttttccatgattttcaagtatctggacaggttgaaggctcgcttgaaaagctacaaaaaaactagagcatttgaaagaggagaagaaacaaatgtttttgccagaacaagcaaatcaattgttgatactttagctaagcactggacaacaaccagaggagctgagattttggccatggctattgtttcttcccaactctttgataagcagcagaagcatcaaaaatttctccagtttcttgctctgtctaaatgccacgaggagctgtgttctagacagagtaagagccatatatctattaattgtcatactggttaatacattgaattaaatctattgcacgtggcttgtatattttaaaagtccactttcaaatttaatgaaacacaacttttgcatgcatgctcatcaaatcctgagcagtccttatttcacatgttttactttttgcactgttcctggagcttaaaatcatttcaagattttaggtaataatgacctttataaagaaaaacctattggtaggtgcttcatcataattgactctcaggctgtgtgatgatgccaaagttttgtactgttattaatacatcactggatgacctacgcaccatttgatgttgcttatgttgacacctgagtttaaacagattgcatttgtgttttgagaatttgcatcaacctcttctgctagaggctagaaagactagagcaacttcttattttctgtgttatgcgttggcattttctttttagaaatttatcacaatacatggagtgtatcaaattatcaattcttagatgggtatgtttcctattatgttgtgttatggaagtaatggcacatattgagatattttctttattgagaagtctactgagggggaaaattgggggtagaaatgagacttttcaagtctaattataactttgttgtcaggacattccttgcaaaccatcttggaacatggtgaaaagcttgctggaatgattcaactgagggagttgcagaatgttattagccagagccgttctacagctgttggttcatcccactccactcaagaaattcaaacatcaggtgctctttgggatcttattcaattcgttggggaaagagcccggcgaagtattgttctcctaatggacagagataatgctgaagtattctatagtaaggtttcagatcttgaagaagtattttattgcttggacagacaactagaatatgtaataagtgcagaacagccatttggaattcagattcagagggcttgtgagttgtccaacgcgtgtgttactatagtccgggctgccatgcactacaaaaatgagcaccatttatggtatccaccaccagagggattaacaccatggtattgtaaacacgtggtacgtaatgggatgtggggcattgcttcctttatgctccagctgctgaaggaggcatctagacttgatgtatctgcaaaatcagatttatatactcatctagaagcactggctgaagttctacttgaggcatatgctggtgctgtcaatactaaagttgagcttggagaggatcacaaaggtctggtagaagagtattggaatagaagggatatgctgctcgattcactctatcaacaggtcaaagaatttgtggaagccaagcaccaggttaactctcttgtctttactcaaaaatcagtatatcgattctgttttcatggtagtggttacctaaacattcttgaattacttttcttttcagaatttaagtgatggaggtgaggaagaaatactgaggaagtttttctcacagatattatcaattgcaaaacgtcatgaatgctacaatactttgtggaaagtttgctgtgatctcaatgattctgacttgattagaaatctaatggtaagtatatggttatttattgttttctagtatctaatggcaataaagtggattaaaaaaaaaaagaaaaaagaaaaggaccaagtccagtatgcttctgaagcattggcagttaatgagtcctcagaaattctgctacttttatctctaatttatctaccaaatggtcactataaactataaagaacaaaaatgtatttctctctgtgcaaaaggcgaatttgtgctgctacattatccaactttacgaaatgcaaggggatttcattatagtaaacatttctttattttaatcatcaaaataaatcaaatctttttaactgtctataggtagttttgttctgttatggtgtctgtgagtatgtatttagatatttgttttgctagatagaaaaaaaattacatttatttcattgttcttactcttcttacacttgagacagttgtccaactttccaaaatgtaaggggattttgtcatagtaaaatttctttctttttgtccattaaaataacatcaatcatttttttttttaaaaaaaaggttaataattgtctattgctggctttattctgttatggtgtctgagtgtatatatctatttctacatacacacacacacacatatgtaaaat

SEQ ID NO: 185862 - DNA, 2581 bp, Cannabis indica
attgttactctctcatttcattactctttagctagctatagtagctactataaaatcttccccttctttcataactttggaaaaaggtaccaacttttttagatctcgtttctaaagataagtatatttttaaccggcctcatatatatattataatattatatattaatacagatcaatgatccgtgtctttaatctattgtagatttggtagtgcataaatccctcttgttcccaccaacccaaaccttcaaataaatacatatatacaagtacattttctttttgtatccaatatattaacaattaaccggactgttctgtgattattacatgctagcttgtgattcctacaatcacttattaggcttaattatataaatgtatatattaatttatttacggcatggcatgcatttcggtgtcagaattttcatttatgtggggctaaaagatggcccaaacggtcatacgtgttgagtacatagccaatgggtgaagtagattttttttacacgtgtggggcctagactaatggtcccggcattgagggtcgagcaacgaatagtgtagcagttttatttgttttggaatactattaataaattagatatacaataaataatatacatgtatacatatatgtgtccttttttgatgggttctgggttttgttgttctaatttattggattattagattatagagatagtgccccaaactcttcggtcacatggatccccatgtgacccagatgccctagttatggggaacaattgaatagagccccttatgtggaaatgggtcattggtcggtaactgtcagaaacccgggtcttacttgtatgaaagagattgatgaggaatatgtgaaataattggtatgtgttgtttatgggttctcattattggtgctcaacaattccatgcattatgtgtatcaaaaatctcaccattcattacaacacctatatatatacatatttaagttatatcacgatatacgctagggctaactaattaatgttatatatataaatagctaaaagaaactagggctgccaaacactctcttacgtgtcaatatcgctattgatttaatttagtatcgaatcctatatagtttaatataataatttttagagagtatcggtggtaggcactactgatgcccaatagcaatgctcataaatatatgagaaatgctaaaaggcaccagtggtgcctaacaccctcctatgaatcaatatcgttattggtccaactaagtatcgagacccatataatttaatataataacttttagagggtatcgctagccaatcgcaacgcgacatgtcaagtgctagacaccactagtgcctaatagcaatactctaaatatatatatatatatagactttcttagagtgcatggatttttatatcccatttattattattgatagtttaatattgaaacgtggttattggaacttgtatgtataaattttcttatgatcattgttaaattcgacactctaagaccttctaaacgtatttttttgcggttgagtttttttttttcctcaaatccaaataactgctctaattatggctaagtatttctgaaatgttaatgaacaagacatattgtgtctagcacattctaaacgtatttctttgggattagtttgcgatattctttgaaagatattatataaattatataaaattcattaattaattacaccaataacaataaaatactaaaaaaagtgttaggtatcaataatatcttttaacatttctctttttatatcttcacagatgttataatttataaatgtattttttttggaaagcttatatgtattggtcagacttgcttgggaaggtcaaaaaatatatatagttctataataaaataaagggatatattattaatacataataatattttgtgacttattggaatctccttaatttctagcaatatggtcgaatccttgtttacatggtaactagttagctagttgtatatctgtgtgcgttaagaaactaaataaaaataaaggcatagacatatcatagaaagaaaactatagcctgagtcagatttgcatcagttaagtttgctttttgacaatatagataattatttatataattaaataaaataattataattatgaatgggattttttgttgatgaattttgggcgtgggaaacaaggctaaaaaggaatacccaagaattaaagttcaataaagaagagaaaagaaaaaataattaaaataaaaaattattgaacatcccattaaaataattaagtaggatacaaactatgtatgttttccaactaaacaagcatgtgcaagagtgcttgaaagaaaagaagaaaataaagaatggaatccctttaaaacacttgtataattacaaagttgtaaagctgtttcaagtgaaaaagtagatattggccctgggttgttctgaggtgtccattgcacaatgtttgaaaattattaatacacagtacacctttaaagtttccctccttttgtccaacactcttttaaagtaccatctacttaaagc

SEQ ID NO: 185863 - DNA, 8038 bp, Cannabis indica
gaagcaagtgaaatgactaaaatgcacataaatctcaatgggggcaaaaccgagaaaaaggtcatttatttcagtacgtggtggtaaaatccttttattttctttcgaaagtaacagagtcatatataatatagaccaatactatagggacagggagtcgatccccaaaattagaacattatgtcctattatgtacggtgataatgcaagaagcaaaccacgttaataaaagaaaccataacacaagaagtaaatgtaaatttatatcgttgtacttagaaaaaaaaaaaaaaaaaaaaaagaaaaacagtttcctcagcatttaggtgacaatattaaatagctaattaaaatttctagcatgaggaaatatcaccctattctagacagaaacaaactttagcaaagttcatcatcatcatcatcatcatcatcgttgttttaattttgttgagcttccctttctatggtagaaaaccattcaagcctccctctttcttctctctgaagatattaatagcttaggccctcaaactgtgtaatgctgctgaatggtatcaatgtcaagacctttcagcttcaccactgactcaacatgacccttgagtgtatgcaactccctaagcctgcaatcataaatccaaacaaatatttttgttttaattttcttcttcgtagcaacagagacaaattcaatcatggtagttcttctaatgatcaaaatattgaggaaaaacaatctcttgctcaccttgcaacctcagccctgcgcttggcttgttctgcaatctctgaaagctccctgtaactacttttttcagggaaaatattgttagattctggtggttgaagaccatggagtgtcctctgtgctgcagcccattgtgcttctctctcttcttttccgtagtctttctttgtggtaaaggcagtctgttacaagaaagcgatcaataaaacaaaaaaatgacacctttaattaaatcaatgacttgacctattctccaatcacacaaaaccttaccttgttctccaagagattgtcccaagcttttccactaagaacgtagcgaattgcaaatttgagaagatcaagagggaaatatgttactacactatatagccagatgactccagcccagccccagccgtgaccttttattcgtgcaaatccccaattggcataaacagctatgaaggttgcaatctgaacaatagaatacagtatttatcttgaaagaagcttaactcacatgttactaaacagttcttacactattgagactcagttaccataatattgtagacaccacacctcataaaaagattctaaaatagactagtgcaacataaaacagtgacaatagatagaaaaaactcttaccaattgagcaataaggaaagcaccgagtaaaagaagtccagggcgttcaacaaaggaccagctgcgagaccttgtgacaaaaataagagcctgactcacaatactcacttgaaggtacaaggctgccatcatctcaggagggttatttctcaacgatcttacaccaaacttgtcctgtaattgaaaataggtaaaagtagaaacataagtagattatagaggagaaggaagaaattatatgtaaccaagaaaattagaagttagtagaagattcaagacaggtacttacagagaagaagtcggtatcactcataacccagaagaacactacagtcattagtgccaagtaacctccaagaacaatcccagtagcaaaaatttctttcagtttccagctgtctggcataggcgatggctttactctatctttagatattgtcataatcgttcctataggtgacataaaagaggaaaaaaaaaaataagattcacgttttagaagtacatcataatatgtaacattagtttgtaatactgtaataagtgatctcaccgtcattcagaattgcaatgatcaaaaccatgaaaggggcaaagtcgaatttccatatcaaagcaatgaacatgaatccaaactgtcaaaatgacacacataatgagaacacacacaaaaactaattgggaaaaaaaaatgccttgtcacaattgtgtttcaaaagcttcatctgtgcaaaacttaccactattctgatggtaattgaaactgcgtagatctgcataaaggaacagccaatacagaattagattaggcatgtaaaaattataatttaagaaattcaccaaattgcaaataaagaatgataacataaaaaggtaaactaacggtgtagttcttcatcctttggaaaatggccctgctggttagcactgcacttataatgacgctcagcccaggttcagtgaggacaatatctgaagcacctctggcagcgtcagtagcatcggcaacagcaattccaatatccgctctctttagagcaggggcatcattcacaccatctcctgtcattccacagatgtgcttcttctcctgaagcttcttcacaatttcatacttgtgttctgtcatgagaaaggagatcatcacatcagaagaagaaaacaaattgacaaatttgagaacaatactacaacaattaaaatatagtttgacaacattgcaaggacaccaaatcaagaaaaagcagggtggttagacattttgaagaccttagaaaacaaagacataagctagacaaaagggttatagtagtacaatataatgcatgtatattttagaaaagaagaagtgcaaagttacctggaaatactccagcaaacccatcagccttctcaatcaattcatccacaggaagtgcagcaatggatgcatctttgtcttggcctagcaatgatgaagatgggtacatgtttgttcccatgccaagccttctaccggtttccttagcaatggccagctgatcccctgaaaagtgagaagtgcacacaaattaaaaacagtctctggaatgaaaattgatccgtattcaaataaaaaaaatagcaattaagaataaaatatataaatatctatagtacaagtaagacaaacctgtaatcatcttgacattgacaccgaggttgagagctcttctaatggtttctgcactgtcatgtcggggagggtcaaacagtggcaataaaccaacaaactgccatggtgctcctggactttcttttgtcctctcaggtacttcctgtcttgcaacagctaaagaacgaagcccacgttcagcaaacttatcaattactgaatgaacctttttcctgacatcctccttgcagttgcaaaggtcaattatctgtttaaaaacatgcaaaacatgcgagttactatttctcctagaaacatttgtcaccccataccatatgtcatatgatgagacattatgttaaaggaaaggttacctgctcaggagctcccttgctagcacgatgccatttaccatcagagtcaatgtaggtcagagcagttcttttgtctactgggttaaatggaagaaaatggatctccctaataccagctcttgcctgaccagttcataatatcagtagaattctttataagaagttgaaagaaacaaaaaattcaattggcttacctcctttggatctgcaagcattccaacaattgcagcatcaatagcatcctgattttcagtccttgacgccctagctgcaagaagcataacatgctccttctccacccctttggtaaacacctcaatcaggtttttgtcaactgtcaacttgttcaaggtcagagtacctgtcttatacacagcacatccatgccagccatttcctcaatggctgtcatcttttggatagccccttgctcagagagcctgtgggaaccaatggccatgtacagaaaaacagtgggcatggcaataggaattcctccgatcaagagaacagtaaattgtcaatcccatctctatacttgcggtgctggatagggtacatgactattagctcgattactattccaacagcaatggagcaaatgcagaagttaccgatagcagtgagaactttctgaaagtgtccaacttggttggtgctgtccaccaaatgggcagctttgccaaagaaggtgtgaacaccagtggcaatcacaactgcttcaatttcaccctgcttacaagttgaaccagaaaacacttcctctgaaggatgtttagtgacaggaagggactctccagttagagcagattgatcaatttttaaaggatcaccctcgagaaggcgggcatcagcaggaacaatatcccctaacttgatgctgataatgtctccaggaaccaaaattgctgcatcttgctcactccatcgaccatctctaaggacctataacaagtttaaatgttcaatagaagaatataagaacatatttaaaaaaaaaataccataaaagctaaaaaccaaacaagtctgatggtgatggtgaggctgttgttttaccttagtctttggagcaagaccagccatgagagcagctgctgcattaccagcattgttttcttcaataaaactgatagttgagttgatgatcagcaggacaataataccaacaaagtcctgccaatccggaggccttccaccaccatttgccaaggcaatagccattatagcagcagcttccatgacccaggacaaaggattccacataaagcctaaaaacttcagaatcttgctctcctgttaggacagaaagaaaccacaccatcataataagcaaccacaagatgttggaagtgaagaaataacatcagttactaataagttatgaagtcaacctttttctcttccaatttgtttggtccaaagacttgaagccgttgggctccttcatctgacgacagtccttctttggtacatttcaactgctcaaacacttcctccatgggaatccgttcctgtaaccaacaacaaattattcatgatttaagtcataagaatctgtcattaactaacattcctgacttcaccagattacctattcttctcatatcgataagacatttttaactattattattattgctaaacttatgacgggaaaattaagccttgacgtatgatacagttaaataaatgatattctctcatgattagctctaattaattatatcattggaaaatatttgtttactgaaactatttaattttattttagtaaatgctttcctttttacgtgtttaactcatccttagttgtagcaatggtgtaatatttgtttaaagtgtttgttaaggctcctaacgtttgatgaattaatataatttgataagaaaaattaattccgaaaccattattaagtaaattaatctttcattattgtgatgttagatacaataaggtgtcttatagcaaagtattagttattaaggcggctttttttttaaaggtatgcagttgccgatcatgtgatcttatgtatatttacgtaattattcagtcagaggcgcacatacaaagtttggggctcaactcaaggaaccttattttattttaattattaataaaaaaaattcttaaaaaagaacacacctaaaattttgtttaaatataataaatcggcgaaaaatttctgccctgtaaatattgtatatacttggatacatatttagacagcagattgtaaaaaaataggagcttaacactactttaatccaaaaaaaaaaaaagaaatactttacagtttcccctctctacattgagacttaaagaaaagtcttggttaagtttttaataattaatgtgttaggttcagtaggtttttttttttggtggggcggggggaatgtttattatatttcaattctggggaatagacaaattaatttaattaaattagtgttaatttcagtaaagatccaaatatatataaatatatatatatatatttttgaatggaatccaaatatatatatatatattaatgcgtaattgaggaaacattatttcaatttgaaggaatatatatatagaaactaccctagaaaatagcaaaaatatcaaaagtacaaaggtaccacggaaggtgaggtgagcatgtatgcccaaattccaaaaagaggtggacaaaaaaagaatatatagaacatattgaaaattaattgaaaattgttattaaacatattgtaattaattagtactttttatattatttattaaatttttaaaattatgtgagatctgattttaatttgtgctaataattatatgttatattttgtggtgtttggctagagtaaccagaagcttgtattttttttttctcttttttcaccaccaaatcaggtcctgctataaaaataaaaaataagtactgctattctattagtatctaacactaaaattattaaattaaattatataaaattaaatatttaattatatactaatatttttcaaaaatatatatatatactaaaagcacgtagttcacacacgctagatagcgcgtagtgggaaaaagtagacaaaagataagttgtatttattctaattttccatttctcttttgagccacactcgataaagaagagtgcgctgtcaaggcgctgattccatgtgtgtgtatgcctttcgaaaatgctatttttctttctgtgtgatattttttctctaatgaaaacaacctttttttttttcacaaaaaaatatatatataatataatttctaaaggatttaaaatttaagaaaaaaaaattaagaagatgaagaaaaatcagtggagggggacatctaggccgcttgtgacagtagcggacccagtcgatggactccacgtgtcctagaacaactacagttgctttttcttttgtaaacagcactgtaactcaagaaagtttccacttgtcgccgtcgttgaaatgaacaccatcaattttcatcggcttaattgtagaaaattaaaaaattagaataaaaaaagctttgatacagccgtaaatcgtgattttataaatatcttcttcttttcttttcctgtcgttagaatcgtaatataaagttactttcattttcctttttttttgagaaaagcgtcattagtacttcttagttgacgcttgacgagaaagattatgagagaaacaactaacaaattcaaataagtaattcctgtattatattatatgtaaacaaagattaaaaatcactccgtaactgaagaaaaaaattaaagaaaaacaacgtgaagcattaaatatatccaaaatttcacttgatttctacttttttaactttctcagcaaccaaacataaacacatctcaagaaaagacaaaacagacatggagacaaagagaaagaaaagatgaggggaaggaataccagatcgacgctctcattcttgatctgctccagcgtaattcccttctcacctcccatgattggaaagctcaaaaggctaaacggagatgaagacgattctaatatatcagaaatgaaacgatttatagagaaagaagacaaacactatagagaaacataggaaaaacaacaaataattattttttttggttggaaaagtctccaaacaaaaaaaaataaaaataataactatttttttttatggaataatggggaagagaggcagtaataagagaccttgcactctgcttcgattcatatttatatgcaaaattttggtatccttgcggtccttcgactctgttgggctatgggcccacttatttccgtcactttagtggggcccattttgcttgatacgcgccacttgggtggtgtttcgataagctgcgtttggcttcatgttatgagaagtggaattcattgtagatcaacggtgaatgttaatcctttcaaatccaaaagaaaaaacggtgaattctgattacgatggatttgggttgtggtggtagagtcgtattaaatatggcttttagtcatttttttctattaatttttcctaactaattttttgtcttggtcaactaataaaattttcatttattaggattgggaaaaatccatacatagactaatgataatagacatttaagcaaaaaaaaaatgaa

SEQ ID NO: 185864 - DNA, 2393 bp, Cannabis indica
atgaaataaggaagtgtaaggctaaactctatctggtgcatgtcattactagtataaagagagcaaccactcctacctcaactcttctgtacagcagatcaagacttctaatagcatccttttcctcctgcaaaaagacactttaatgtgaataatccacacaagaaattactaatgagcagtgcatttctttatgattcttaacctgttaccttttccattcaaaatatttgaaatctccaattataaggtttaagataatacatctttagatttgttgtcaattttttcttttttaaaaggttttaaagatcttaaattaaaaagtaaaataaaatacaactacaattggtacataacatctgaaaagcttattttattgagagaaatacacttcgacacacacttacatcacgtcgagcaagatcaaggcgattccatatgaccattagaacaagctcagtaagttctcctttctcagctgcctcctcgattttctgcagagattatgaagataaatgaccaacaataagagttaaagataactaattatttatcaaaacgataaatgttctataaatccaagcaggagatgcagagggtgttattaaactcatgctgcttcttttcagttgcaagattattcatagccagaagtgctactaatgctaaccctttattacttttgcttgttttagagctcgttaatagacttaaggaccagaatcagcttgaagcttctcgcaccaaaatattagttggaatgaggaaggggtttgacaaatactaacatatatccatcacagtgaaaacaagtcttaatgagtagccaattggacttttgtaacaaaagtgccaattgaatttaatttaaattgctcaaattgtccatcagcttactcttaaagatctggaaaagcaagatcatgagtagcacaaaggaattgaggaaactaataaagaatacatcactattttccaggcctacgttcaaagaaactatagtgtatcttatctccgtggcatattgtatttgattacctcttccacttcttcagcagctcgaattaagctagaaaccaatattcgagcattgcgtacatcttcttctggatacccctttaaccgcaagccaatttcacggtactcttcaactttcctttcttcttcttcctgttcctcttgacgttttcggtgcagttcctttgttttctccctctgtcgggcttgccattcctaaccaaacaagattaaactctaataatctaccatttggtacataggataatgaaacaaatcatatactaataaatgaacatacgcaacatagttaatagagctaacaacagaagacttattttcataataataaaacaaaatcacttcataccacaattaagtaccctatcaacatttttttttcatttcaaaatatataaatataaacaaattgatcaaactaaaatcttctttcaccattttaaagtttcagaaatagtttataaaagagactcacttacatcatcgtagtactccttgggaagcccttctaggagtggctcatccttgctcacacacctctttaaatctggcaattaaaatgcagaaagcaaatcatatataactacaaaaatatatctattatatgttatgtatgtagaaaatagagtaagctaagtcatgtaagtttaagctagctatgagtgacagcagggactaacctactcggggttgagagttgagcttaacagacgaaagggaaattgagagaggtagtcgtgtgacgatcggtgaacataccagcggtgagcaagtgagccagagcaacttgcactccatttttgtctgattttaggagaaaaatacatacaacaaaaaattaggaaaaagacttccttgtgtagaataatgaagttaaaacataaaaatttcagtataaaagcaaacaaaaacacatggcgtcttctagtagtatagtagcaattaagacccatatccaagttcgcaaacagtcgtacatgaccaatttgaattgactaatacaaaatgataaatgaacaaaagagagaagggtagtcgacgtcgacccaccaggaggcaatcggcgacggcgtggcagttggaggttagaggttggggaagagaagggcgaactgagtggagctgtgactattggtgaatacactggatggcatggagattggagaagagatggtggtactggtactgagactgatagaaagaaatttagattttaatggcacaagataaagaaaagtttatgttaaattagtggacaaatagattttggttgaacttacaagaatagcagtcttttcaaaggttgttttgtttagattaattagggtacaatgcatttatcaaaaaaataa

SEQ ID NO: 185865 - DNA, 7221 bp, Cannabis indica
ttgtttatttttttttttttacgaatttatgatttttagaaagaaatcaacatcattttcgtgccgcaacattacactacattttcgcaatgtgaaaacgtgtaaacaactgtcttttttagaataacctaaaaacaacgctagaaaaaaaaggattatttcacaaatacacaaaaataataaaaaattataaaaatacgatttcacggaattttaaatatttttataattttttttattttatttatagaaaatacgagttttttatgttgtactcttgttaatttgttgttaattttttgttatatgtatgctattttttattgttgttttgatgttatttaaatgttaattttatataatttttgtgttattttttatggaaaaccataataatgtaaaaaagaaaaattatttaaaaaaaatccataatttttttttaaaaaattataatttagtaaaaacgtatatatttttttttgttttatattagagtcacgtcgttttatggaagtacatgtcgtttaaacgtagagagtgggacctaatcttcccgccaatttcataataaaatcgtatttatcatgaaatttccctccacccaaccaagagagagaaaacaaagaaagaaagaaagaaaatctcagcaatggcggacgaggagaaggaggagacgattcgacctgaaatcccaaccggccggatcaagaagataatgaagttagataaggacatcaagaaggttaacgcagaagctctatttctcatctcgcgctccactgaactcttcctcagattcctcgccgagaggtctgcggaggttgcgatcgagaagaaacgcaagatcgtcaagctcgaacacataagggcggccgtcaagaggcaccaaccgaccagcgatttcctccttgactcacttccactgcctcctcagccgtccgataagcaaccatctgaccggaaccactctcgcaatgttgctgaaaagccggtccctgtcggaactcgccgaatcgatgatttctttagcaagtcagcaaatgaaaccccaatcgaaatcaacgagtcttaggcctcgtctccttgcgagccttgaactgaaagtcggtgtgaatttcagctgattttgattagagttagcttaaattgataatttgatggttttggctgtaatggaaacatcatcactaattttttttaagatgtcatatttctaaatggttctgatatatatgttaatttatagtttttggaatattctggcgaatttgagtagttgactattgctatcgttatggttctttcttatttttctttaccaaaagttctaccacagattaagaccatgactagttttcgttaaaattttgatttgatatggaattttcgagagttcaaagaatgggtgaaagcttctgttccggtcttcctgagttccatttcaggtgattatttaagaataaattcagaccgaaattttgattttttttcaccaatatggctgttgaatttatgaagaacaatgtactctttacacgattgaaccacttactaatttgtgtttctttcatgtagtgctgaaggagcgcatgtagaggcatttgggttatggctgttgatctgagcacggtaaccctaaccaaattgtttatgtattgtttttaaagttgattgcacacatatacaaagatatacatgtactaggagcctggaacaatattagttaatagaaatacagatgaaacacaatatgctgttggtatgggtatgttggcaatcatatattgctcaattcatgttttattttaaattttggagaaaaatacaaactggaattaaattttatttagatttgaactcagtaactgcacactctattgtactagtgacagtaaaaaaatcggccatcctaaattttatttgctcctaagtcttattttcgatcagtatccaccaattatcctgttctggtacttggcttcttgctggtaaaaggggttgaaattttctgtgatatgataatcagatgggaaaatagattctatattcaaggtgaaaatgggccggaaaatgttgataccactgaagctgtttcatccctaacatttggagcatagccaggtcgtgaaaacatcttttgtctttgtactttctttccttcctttatgaaggatataccttgagtggttgagctaatattgtttgatccaaattgctgaattccaagagatatccttctgtttaaaggcataggactggtaaaacctccattcaggctcctgtctgatattcgcttactacccgtgcttggccttggcccaaatgaattttctagttggactacaacatgggtctgtaacttcttcttttcctgtgatgataaagactacatacaaatttcaggatgtcaaacactagtgagacataaaacgtatgataattatatatgagtgattatttggacttctgagtgcatacttaaaataatgcttacccgttgtctatacttctcctcctccctttcctgcctaaatacattatattcttccaacattgccaggagtggtacctgtataagagttttcttttagggttttatggcctaaattttgtattaacatttttctgttcatacataataaccaaaatcaataatggataaattgtaggattttgtagcagtttattagtgattcattgacatcagaagttttagtgggctgatgtaatctaattagtgaatttaactctgatgtttaaattgtaattgacagttgacaaattcagtattattgtgtctatgaattattttggtagctatgtctgtcacaaaagtaaagtttcctattattgtatcattcttcggtgttttcacaaagaaaaaaaaagaaccattcttcggtaatggacttaagtctaatgatatatgaactagtaagatacgtgtcttttttatttttttattgtcttaaacttcattatatatgaatgtatactctctagattcatgaaagtcgaaatggtaaatctgtggtgcattttaagatggtgctttgagtttgaaagtcgaaatgaaaattttaacaaaaattttgccataaaatcataaaaggtagttcatcatacctcatcatacaggaaaaccttatttctttcttcttcccagattctagtcttttctaccaatgaatccattagagctgcaggtcaacagtgcgtagagagagtcatcttaatcagaattctaatacattttcttaagatgatctgaatacattttctttggttgagattttcctgatcatcaatagtatcactaactttcagttttgtgctttttagtatggacctttgcctgttattcatattttcttttatcttacctgggattttgttgactgttattctggcacgttctgctcgttttaggtttctatgagcacctctgcttactgagtatctgttctcgtcctgaaagaataaatcagtatggaaatgtcacaggcacatacataatgtagatcatacacagttattaatacttgtttaataaacttctacgtaggattcactttattgtgttggaagacattaatgaaaacaacgatattggaaacagaccctgctatactcttccaaccatcgttcttcatcacgtgctagcatccatctttctgccttctccattatagcctttctgcttgaagcttcttctttggcttttgatatctgttcatccatactgacgaggagatcagcatggtcaatctctcctattattgtacataaattcagatcagtttctgggttacttaaatctttggaaaaatatcatttatctttttcctttttcctatcatataaggatttatcagtacacccacctgagttaatgaggttgattatgttattcatttctgctcgggaaggaatctccatatgtgaacgattgcatatttccttaagctcattctgttttttgaagaacaattccttcatcttacttgcttttaactgatccagtctcttgacttcagcctcagtcttgaaaaaaagttgaaattattagttccttataattggtgtaactttttatgtacaatgaactttgtttacctgcaggagtatactttgggtaagacttcctggatctgatacctccgctgatgacacagacaacaatcgaataacatgggaaaataatcgccggtcttcataggctgtgtccataagattccacaagtttgttaactctttacctagcaggtgaagctgcattaagaatattcagaaatatatcatgattgtaaggaaaatgtctgaagcagagttgaaacattcgtaaacttgaatttgggtttatctagccctctattatctttgcatctgctggacttatattttctttcattcaaagtttggattttcctagtcatattttagttgctgcgtttctgtattcttactacttttcaatttttagtactttgaaactgaattatgttttgctgctatgcaggtgacactaattaggtcgtttaattgaaggcaaattcagccgaacatctaatatcagatctaaccttttcaagccgcttttgcttttcttgctcgagggaatccactgtgctgttgagcttaaccaagacatggttgcttatgttttttgaaatcccacacaaatcatttaagcttgggtgaacttcaccaatgatattggttgaatccagtcctaatattgtagacagcttgtggactgtatctgtataatgttccactttctggagacgttcattctgtaaagtaagcaattcaaaggcataagaattaaaatgtattgatttagaattgaactcttagaatgtcaatgaaataattgtgaacctgctacagtacagtaccttctcattatggagtctttgtagctcaatttgatactcctcaagtttcttcagggatagatcgttatcatttactttaaggtccaatacagagtcactacattctgatttacctgctattctgcagaaatttctgaatttggccttgcacagttcggaactggttcatcctctcctctttcctcgatctcatctcctgtagagctggtgtgatggagtctagctgctctttcagtgttcctgccagtctatctggctgataagatgaaggatataaatcagttcaatgaagtgcaacaaaaggattgctttaatgattccaaaatcatgaacttagatcctactgctattcggttaatgcactattgtattaaggcatgtcctttatcatattatttgacttaacagggttttagttgaactacccgaccagggaatgatcgttcaccaagtgataaaagaagatgagtaaattcagcctcagcttccgccagctcctgatgcaggcgagctcttgacgtatttgctgcatcaacttttctcctgtagacctccacacactcttgttccaaatctagtaagaccttttctctttcaaattgatcttctcctacttcattccatatcatctgtcaaattttagtttgaggaaaaactaaagtcaaaatgagtatcatgatagaaaccatttctaatctattatattcattcataaatatttaatgatgaaataaagctcttgcctgcaattcttgtagtagatatccacatgaagtttctatcattgttgaacttcgtgttcctatcgaagtttgaaatgaactcatgggatgctgcttgctctatatgcagatctcagagattattattattattttttggctaaaagggggtgaagttccttgattggcagctaaggaatgagggacagggaagagaaaagagaagagagagtcaaatttagtggagctttggttgtgagttttgctttaaagacaagggtgactgacaggttggtacccctaagctttgggttcaagaatcaccaagttatgtctttacagtcttctctctttccctcttcttaatatttgaactgaaaataatgagctaatatggaactctctcaactcattaagttaaaatctctcattcagagatttgtttacttatttagtatttacattgacttgccttaataggacgtaaattctaagcaacataggcctttgataaaaaagttctgcgctcaatttagaatgttcacatctggctttttatggttgagtatttgagttacctgtaatctaatctatgatattaatagtgtcaaagatcggatgatgatcaccaaccaaatcacaaattccttaattaagtgattgctcatcacatttctttatgattaactcatcaattgcttcataagtccattttttttataattattaattatgttttcctttgtatctacataccaaaaaaataaaataaaaggagccggttgcactttttaatctagatgaatgaaaaaaatgtttcatgataataatcttttgttttaaggtccaatttcttatttgtcattatgacgtgattaaggcttaatcaagtgtatttacaataaagcaacttacttttttcacctttccattatataattatggttgattagagcaatcaaagtcttgcacatgaagactgtatcatgtatgtggggactaataaggagatagtgacggtttatcgattagataccatgagtgtcaagtgaccatttctaatgtcagaatataaagtacaaaatgaaactgattatgttaccatttgtaagaacttgccaagtaaaaggaagatcgactcagataatcaaaattagggtgccctacgattttgcattactcaaacgaagattgcaacccaagaatttgggccacctctattgtgaagaaatgatatctactttgctccacacgctgaaatgcctactgttgttggtattttgtcttagagaacaaaaacatgagataaaaatgagaggagattttgttttatttcagaaatataatgcatatcatgtttctaaattattaaattttcattttttttttatattttcaactcttacaaataaataatttggatgtgtaacttccaaaaaagttccacccataggaccttttttttttcttcagaaataaattaatctctcttcaaaggtttatttgcttaaagaaaatggtaaagttttgaagatgacagtgacagggtaatatgagaaatgagatttgagaacaacattttagccattccatggacg

SEQ ID NO: 185866 - DNA, 2553 bp, Cannabis indica
ttttgcttcaggaaaacttcttgattcatcatcttcttaccctgctcgatctcaggcatcttcttgaactttttcactatacgatgtactcctcctggagaagggtacacctcaggctgagtgtcatacgggctataaatgattgcacacgcatctacaccgcacaatgtgctcagctcgctcaccttttttagtaggcccttctttctcttcttataagtggcttttcgagaggcatcgttgttgatgtaagccaacttcaccttctttctagtcatgattttggcttaattgttaagccaaaaaagaaaaaagaaaaaaaacaagagctaaggagagaaactagctagtgtgccaaaatgggagacaaaaacatatcccaaataatacttttgtggtcttcctagttcactttggggtactatttattcacaaaaatcatagagaaggtggtattagggtttcatgaggaataaatgttaacaatcgaatatggtaactaattatttatttaattgttttttatttgagagttacatttgtattatatggacagttacaacacatatttcaaattttggcataataaaacattaatggtaaatttgttttctagagaagagtaataaaaaaaaaaattgtaacgttacataataaatctgaaaaaaattggaaatcttggagaaccaaaaaagaaaagtcaaataaaaaaatcaaatgaaattaaagtttcaatggaattattttgtccacaaatagaagaaaatccaaaccctattatctaattggatgaaaatatcatattttttttttttggccatttttattacataaaattatcagttacaaaactttaaaggaataaaatttacatgatgatatcttattgatatatataaatattaattatttggctaaagactttactaaatatttattaattatgatatctatgaccatatttgactaagacagctcatgcttactgtataatttgtattttatttcccatatttgtgtcatatagctgtgttgtataataattactatatatcatatttattacttgcaaaaataactttttttttcactatagtaattgctttataaactttattatatgaagcgctcaaaataaataaaataatattattgttgatgaaaaaattggtactataattaatttttttaaaaaaatatattctatatattttttatgtgacaattttttttaattacaaatatcatataattttagaaaacatatataagaaaataatgataaaatttatagaaaatacaaatattttgaagaattatatacaataataaataaaaaaaatactaatactaaaataaatttttaagaagttcaaaatataagaaaaacttacaaatattaacgtcccttgtagagtttacatgagtaatgcaaacttttttttcaaatgtgtaatgtccataactcaaccttattgtagcttttaggtcacttttccaccaaatatccaattatatatcgatattctctggaaaaattagcaatattacaccgtaaaagattaaaaaaaatcaaaaaaaattattaattagaacctctcaaatttctaatatttttattgatattatcgatatttttcacatagagcacctatgacaaagataaagtaaaatattgacattatttaattaaaacatgaaacatattattaccactcacattaccatatgacattaatttaaacaataacatagtttattcttgttcccaattgacaaaattatgcaattaatacttaatttgtagtgctattgtcagtaataataacggcattagctttcccatcttcattattgaaattctcgttcattgcagaaccctcagccttagttgcaatcgccatttgagtcgccaagctggtgtcatcattcttagcagcaatagtctttatccttttctttacaccttccaaactcttgtcaatgatatcaatgagatcattcaaatctttagcagataagttatgaagattagccttacctgatagattagagtacaggagttgggttaactcctcgcgattctctttcctcagctttatcaattgctcgttcatttccttgatttttttcctaaggaaagcttcttggttcaccatcttattgcttcgctccatctttaaaattttaccgaacctcattagaagattcacccctaccgttaaaaaaaacacaaggcttgctcaactcactcactttctttaccaaacctttcttcctctttttagtgtgctcttatcgtttgctttgtgccgctatttatacacaaatttaattaggtatatgtgacaaagaagtatttttcggttgaatatgctaaaacgtatcaatttttgttcaaaactgcataactgtaaatagtattttttgatacatttcattgtttctcgtatattttaatttaaatttaacgtttggcttctttaaggtttttaaaaataacaccacataaagtgatattttttatgagtgagcggttagtatttttttttt

SEQ ID NO: 185867 - DNA, 2334 bp, Cannabis indica
gttaataagccctatgaataactagtcacgtagccactaaagtagttattttcttttccttttgtttaatagatgataatacatgtgaaatacaaatagtgttgtcatgtggtccaactaaagtagttttttagtttttttttttttttttttgtaaagcaggtgaaaaggaagagtgtgtggaccattatccatgcttaatatagagatacaaatatattttgataaagatggcttcattgattattattccctcagatatatattagaaagctggaacaactattacttttttgttctatttttcagtttatagaggggatgagaagtgatataatttttgatttattattcacaaagtgagatatgaatgaaagatttgaagcctttattatgtaccaaaaaaaaaaaatcaactgaattaacaatgcttctggaattcatgtcctgataattgaggcattgaaataatgatgcttagtaataagagtgaccaatttggagtgtggaatttgttctctaggcgtcaatgggaactgacttcattcagatccctttataaattctgcatagcaatcatgcttcccaacgatgattatttccctcttattaagttcctgtgcaccaagaaccagaggaaccacaaatgaaatacttaacccaaaggaactttaaaaccatctatctacacgtttcaccaaaacaacactcaaaatgaataaaaggtatctggaacccaagaaattaacagcaatgattctttacagatgagataacttgaccagtcaaaagaagaaacaggataacaatcgcaacaacataataaatctctatgttattaaattcacaagcttcaagtttttcaaatgctttgtgaataagtagcttattactaaaagaccaaaccagaaaaagggcactgaagatgacaaacccaagcttcaaatccttccccgacgcatccagctgcaatattcgatgttttgtcaaaaaaaaaaaaaaccataaactaaagagcacataggagcaaacaaaagaaaaattgaaagaacatatacacgggtatttattatattctaagatagcaaggcacacactttaaaaccaccttctcagtcgagctcatagaagcttaacaaattccacatccacatgaataatgaataaacatgttttttaaaaataataaaaatatttagataatgcaaaatccagaaacataattcccagaggtttaaaataaaggattataaagaaaatctaattggacactgaaaccttcaactaataacagtagcaaaaaggtgcataccactacatcctttgccaccgtagtccaaagagtcgataaaaaaagcaccctatcccattgggaaactgttggaccattggtacatataacatattctagggacaaaagccactaactagtttagtaatatggctgctgatctggagctagttaaataataattccaagtaagccactacttctcccaatcctattggcaggctatatcttttctgttaatcccagacagctaatagtttagtttaaatgaacctagcaaagacaagccttcgagaggaatagatagtctcgaaggcttgggaaccctgaaggtaatgtgctcttgttatcaataaaaatcattaagtttgtcatacctctagagtgtatcagaagccaaatccattttctttttcacatcacatgaataatatgaaaggtcaatcttagttgtaactcaaactcaaaataaacacagacaaatagacacacaactaattagaaacgtcatctttgcagcaactcatcccaaaatacatatacacatgtgaacacccaaacaatgataatactcatgcagcacaagtcatagttattagttatattaataagatacatttcaagtcaaaaccaattacctacttgtcaacattgaccaaaagtacttttttgtataatatttgttccttcttcccttcttataatataaaaaattgagtttcattcacaagccaaccataacggtccacccagattttctttttcagaattagatgaaccgattgcatagcaaaaaaaaaaaagaaaaaaaaaaaagaaaatatacacataataatatataatataaattagaattagttaaactatttgcacagataggagaaattttttgaagctgcatatcaattaaatggaaaacaaggcaatcatctaccgataacacacattcatcaactacagcacaatataaatcagaaacaaaagaccatatgaaaccaatggaaaacctaatctgggtttaaatgttaatttataatgataat

SEQ ID NO: 185868 - DNA, 5866 bp, Cannabis indica
tggcatgtttcatatatttctaaatgttactttgtgtggaaccatgtaaagattaaaattttgttattatacaaataaataataaaacaaaaaaaaaacattaacattaacaaactacaaataatactaaaaactgcttttattgagtgcaacgagttaaaatcctacataactagtataaaatttaaataataggaaaataaatttgttactggaaactcaaagtgtaacttttaatatcgatgataatattttctgatacagatgtgcattgtataatctatgacaatcaactccgaatcacctgccaaaaaaaaccagatgagataacacagccttttaatgaataccaaatacaaatcatgtcatgtccaaggtgttgttaccgtttagattcaaatgcttttcttctcctttcattaatgttatcaatcaattaatcaaaactacatgtattaatacctttgttacactaatcactaaggtgagaaagtgctacagcaatttcagctccaacaagtgcattattcttcaccaacgcaatatctaacaattagttaagaaattgtttaaccaagtccaactcataaataacatatgatgataacagtatatgacaacgctaactagattccatagtaccaaaaacaggaaccataattgggaaaggatacttgatgaaagagaagctcctcctgttagttcattcactcgtgcaagcaagaaaggagtttccgcatttcctgttatgttcttgtccctgagaaatagttccaaaccccaacgatgatattattagaagatgtttcatgaaacacaataagaggtaaagataacgcactaaagatatctgttttacctagcttctttcagagctctttgaattacagaatcaattaaacttccagaagcttcgtgttcttgtggaattggaactgcgattagaatcccagttccaagaccgagtttcatgtttgcatctgttacatgaataataattagaaagagtagaggttacaaccaaaaactttacaattgcaagacaaatgttacaataaaagcataatttgactttccaattaccaataagtcgggcacattcttctgcggtgtctacacggcaaggaacctatttatttactcatatcagggtcccaacaaatagtacagtacctgttcctagagtacagtcatcttaatacaataaggaaaccgataaattattgaataataccttgcagccgctcgttcgggtaaaaaatgctggaaactcgttggtcttgtaagcagcaacgcaaactccttgagtctcctacagaaacgtatgtgaaaaaccaaataatagttggtaatataatggatttatgctcgactgttcataatatatagtggttttattaacacggagcatagatagtaccaaatattccaatgtccggggtatatctaatattgatttcacaccagcagaaataactgctactggtgtcctcccaagctcagtcagatcagaagatatatccattgctacaaaggaagatacatcaacaattaataaacaaccatcatgcttaacatttaacgagcttatataataaggcataaattaaaattagtataactaaaataaaacaaacaaatgagatggaatttggaatgaaatggtatcaaagctctttcatcatctaataacactacgggagtaatcaatccatacatcctagagtataaataatgaaattaaaagttactctacaactacacaaaagacaattatagccatgaactgccctcttgctaatgctaaataccacaggaaaatgtgcaagaacaaaaggagcttttcagggcaaggcctatctgtagcatgtcaacttaaaaccttacaatgtgaccttgattattattcctaaagggttgttgttataatatcactctatttaatattactctagttatatcattctcttttcctcactttcctaattacgtaaatttcagtgtcaagttagattcagggatattgttatcatacgactacattacatgtgggaaagatgagttgaagcatgaataatatataaagtaaatagcggctaaaataaccaatgtatttaaattgatgtctttctatactcattctttttcttataatcaatattttaaaattgtacttttatactcataaatcttttttattaaacggtaaatatactcaatgttttcaaaatgctgcacttttaaactcttttaaaactgttagatggtagtagtgagtagtgacaaaatacatatttttgagacattttgaaaagaaaaaataggtataaaagtgcaacattttgaaaatattaggtgcattcactgttaaaataataagattgaaaaacattgggtattttagccgctatttactcaataatacatacttattacaagctgaaatgatttataaaagaaggaaagaaagattagcttactgttttcaccgtgtctgtggactcctccaatccctcctgttacaaaaactgaaatgccaacctgaaacaattttcatattgagtaatagaaaaatgtgcaatgacacaaattggaaatatgtacccagttgcttgagtaatcaaacaatatcctaatttatttatttttaacaaataaataaactggttttaaacaatttaaaaagtaatcaccatagaagcaataagcatggttgctgatactgtagttgcgccatttcctttggaggccacctaggaaagagccttgttagtcaccacataaaattatgctggacatgataaactacaagcaaactatagttatggagtaataatttgataagcccccggtctgatttacatattatagaatgatgaataagtgaacttgtacatcacacctgtcacatattgtagaaggtagaataagggaatttgtacattcatttttggtgctaatgtatcatgtgcggtttataatgttccttgttctttttaatttttttttggaaaggagacaaaggtcacatgtcacatctccaaatatattgagaatcctcgcttacggcggaggaaggccatggttacaagcaccaacaaatttcttgtgagttgtatctgtagtgtgtatatatagttttagaaatcattcagtggggaaagcagatatggagtgagcctcttgtatggaaagccccaaacctctcgaacacttggaccttatatttgatttctatcattctaataaaagtgccaagacaaattcgagagaagaagaggattaatgatatctcttcaaagaaagttacatcagcatgttcatttactagaagttacagaaaataatcaaaagtaacctgaacaaccaatgcttaatattctcaagtaatcacttacaacatgtgcaatgtctctacgagctgtcttttgagcttgggtaccaaggttagcaagcctctctagctctaccacactcaaacctataaaacaatagtttagcaatattaaaagagcaatcacgaaccatcaactatacagtagcagctagagacttacattggcaaacaatacaagattccagaccacctacagctacaagccactatctttaacataccaacaatatctggcaaaatcacaggataattaagattgtagaccaatcaacctgggggtaacactttgattcaacaactaaaaatattcctttaccaaattttctttatcaaagcatcacaaaaagtttacataggcttaaaacttcaatcataaaaacaataaccaaatgctttctttttctctcttctacttaccaacataataagatataatgagaatacttggtcatcatgataggtctcccctattattatatcaggactttgttaaaaccattattaaagaaaattataacaaattcaaatcatttttaaagcaaaattgattggatttaaacatgcaataactcacagaactgtccaagaaaaaaagtgatatgacctccaaagcaatagccaaaaaaataatgttcactgcaatcactcaaatccctttatacttacttcaaacttcttaggctgaaaatttcaaataccaagtaataaaattgcaataaaaataagccccattatcaagaaaatttgtcttgaaaagaagagaaaagttgaatatttacctacacatggtatgccatctaaaattgcaatggtggccggaacagctcctttgcctcgcacaattgcctcaacctcctttgcagtttccagattttttggatatggcatccctatatgcaagcagaatatagaaaacaatattgagtctgaaatcatatgtgtcatatacattgtgaacaggttataaatcatagttttatgcacacatttcacaaagtcatatatgacaacacaaaaactaactgtagtttaaaaagacgaagtaatcaaacaaatcccatattagaagaaaaaactgtaatagagaagtgggttcaccatgggaaataatggtggattcaagggcaacaacaggacctccatttgacaaggcttcagaaacctccggagaaaccttgattaatcctacaccctatatatatatatatataaattacaaacaacaaagagagggaaagcgaatgatataagtagagaactagagtaatattatacgaaagccaattatgatgaatttgggctatgaaaatggaaccttgttgttatctgaagttttggaagggtccaagtgtctgcggagattcgataaccttgagagagatgaagaagacgccattaaaataagttaaaggagcaaagctaaacacaaacgagagtagcaagagaaaaaactcttaccatactttatatttataagtatgttccaatataaaatgctaattgcctataaattttagtctaattaagatttttacttctaaattttgacacgtaataaattatgtcccttaaatttttaagatcgttaaaaatgtccctaaactttaacatgtaccaaattatgtcctttgaatttttaaggttgttgaaaatgtctcctgaacttttaagattgttggatttaaagattatttttgtccaattttagtaaaaaaatctaatatagataaaagtttaggggcatgatttagtacatgtcaaagttcaaagggcatgctttggtatatttcaaaatctggagagcattgtttaatgtttagtatataaacaatcactgaaatagtttaaagatataatttagtacatttcaaagttcagggagcaaaaattataattagccttgtaaatattaagatgacttaagaaccctttttagcataatcttgcatttttgttttaagggtaattttgtaattcaacatattaaattgttcaaaaagaagaaaattatatgggaaattttatttacaccccaaaagttttaaaggcaccccattttgataattttattttatataaatttatattttaattgttacatattttttttaacttttttctttcaattcatattcttaaaaaatatacctatcaaacaaaataaagtgtattttaaatattatgataaaaaattaaataaaaattatgtgaaatttttaaaataaaaataaaaaaaaatacacatgagttagaaaaattatgaaaatgaaatcaaaataagtattgaaattaacataaaataatgtgaagaaaaattttaaaaaaatattaagagtaatttttaaaaattatttaagtttatattttttttaataatagggtgtatttataagtttaaggggtgcaaatagaactccccaaattatatttgtgcactatatattaataattacagcctattattaaaaa

SEQ ID NO: 185869 - DNA, 614 bp, Cannabis indica
atatatatatatatttaatatacataaaattataagagagctaataaaataaaattatgggccacaatttcaattttgataatattaaaaaaataaaaataattatggtgtataatatgatttaatgttaaaaatggaggataatgaagaaaccaagaattggacgtaacatggaaaaagacaataaaagttattttattctttggtaggtttctattgattgatattgaattagatcataatataatatgatcttggccgtccaaattaataaaatggttggtgggaaattgttgaccaatttaaccaaatacatggcaacactaaatcataaagttgaaatcccacttttaccctacaataatattagagaatattattccatatatccaataataaatacaaagacaaatacaactctattgcaataaaattacaagaaaaatgtgattgattaaatgaaagttacaacacatgtgtactagttacaagtaaatatgcattttattggatagaaaaaaatccctccataccgatctatgactctatcacttttatctattaaccgtatccatacttaaaaaatataagtaaataaaggtgccgtttggtaa

SEQ ID NO: 185870 - DNA, 2403 bp, Cannabis indica
acctttatttttattgttgctgtggtgctgccagctgccactgtgattttggtccttcatgtgctttgtggtttaattatttgtcttagattaataagaaatgtctttctgatatcaggttaaaattgcaattattggtattactgctggaggtgttggactggatttttcatcagcacaacatgtagtcttcttggagcttcctcagtccccatcattgatgcttcaggtccaataaatgaaattttatattccaaattaagctcttatcactagaatcaaagggaatggcttacaattttgagatttgtcccatgcaatcttattctcaaccctttgaggttcttgactgggtcaaatttagtgagaaatgttttaacattttatatgttatctaaatctcaatattcaatcttagtgggttggtgttataaaccaattcaatcatgtttataccttcgagcacagtagatgattaactcacaaatcttgtgataattcctgaactgatattttcatttttgatgaatcaaggaaattattgtgaattaaaattgttgtgtaactagagagagctgttcattttattttgtatctgttaaaggagtcaagttggaaattgacctttctctctcttccactcacctgtgagaagtaaatttcatcagaaccattaattggacaaaggaaaagaagaggatatgctattcccctaagcaatattagaaaacataatcccgaaagaaaaaaaaatataacaaagtaattctgaagtctagcactatagtagggtgtgatgcagttcaaaaacataagcccaatgcatatccaaaagatcagagtaagaaaatagcgctacataaccttgtagagcagagaacatcaatgtgaatgcattggcttttccctgctacattcttgtttttctgatgcatttgtttctttttcactttttggtaaaggccgaggatagagctcacaggagggggcaaaaaaatgcagtcaacatctacattttttgtgcgaaggtgattgtttatttcaatacgagtaatgtgcatgcatagttttctttaacacgcaaagtgatgtatattaccactttgcaggatacactagatgaatcacattggagatatttgaaccagagtttgcgccgtgtttcatctacaactgatggaaaatatgactcaatacaagcaatagaggttatttgcttactaatttcctttgtatgctattaataggcctttgagcactttcacctaattttcttaatcatggcttgtcaatgtcttttattgttttttcttaatagagaaaatgaatcctttttactcattaaatgtttcagtatttagtgaaaccaactagcagatgcaagatttggaatttgtagctttttctgatgtgttatgagggttgggttcttgggaatgggagtgtaaaaccaaacatatgtttggcatgattttagtggaggttttatgtttcttggggatgggaatgtaaaaccaaacttatatttggtatggttttagtggagggtttatgtttgtgtgtatcccattttaagtttatttttggggtaactcaaactcttaaacgcttgagtttgagattttcttaatctcaagcccgcgcaactaaaacccaccaagtaaaactctttccccaagcaccccatttgtaattctgtttgaagtaaacaatttgattcagtactaaagaattgtgaaaccaaagctaaatattgtaaatctgtgataacttattttgattttcttttcttccattttttgagatagctttaagtaaatatattcttaaacacaatgtaatggtttcatatttggtataattggcaattgataggttgaaggtgtttcttttttggggacatgtaatatggatacccccaaagatacagatcggctctcagcttgtacattggaacttcatgacagtgctatagcaagggatacagaacactctgaagaatataatgagtttgtggataaaacaagttctgaagagaaaagtgatatagagttcacttcagccaaagctaacaattcccttgttgaggtaatacttaggatgaatttctttttatacaatattgaattttgtttcttttggctggtttccttactgtaaatttaccagtttggttggttgattattaatttgatgtgttcgtgggttgggtacacccatgttcttgggtatgaaacaggccattgtgacttctggtgttgatattgacaagcattgttcaatttcagagggaaagtcagaagagaaatcttctgaaagtaaaattggtaaagctgatggatactcttctaagttggatgaggtttgtgattatgacagcccctagaaaagtacaccttatgt

SEQ ID NO: 185871 - DNA, 601 bp, Cannabis indica
acacgtcgatcaaacctgtcttctgtgtggtgctgcaaatgagaatacaagccatttattttttaaatgtcattacagcagtgcttgcctgtagaagatcaagtgtttgatgggttggaaatcaaattcggaagatctgctcaagcggatttgtcagattacctaggcgaagaaaataagttctgtaaggaaaagcataatgtactttcttgcttgctgcactagtgtatcacatatgatgagtcacacaaactatggcacatacccaatactgtacaaagattgcaaaaagatgttcattttagtgttactcttgtaatgctgaaaaaggcccaaaacatagatagaaattggttcactaacatttgtttaagagtcttaatgatgtggttgagattgtccaagcattattttgaatggcttgtaattcaacattgagcaatacaatatgattcttattccttaaaaaaaaaaaaatgagtcatgcacattttaaatttaattaataataatataataaactttgagatgcctaataggaattcttaaaactaatgccattaataaccttgggctcttttattttttcattgattttttt

SEQ ID NO: 185872 - DNA, 1308 bp, Cannabis indica
tatttataggggcctcaccgagtctgctcgccaaaacaacagcgatgcctatgctgccatggtatgcaacccttttaatttctttttaaaaggaatgcaaagttttggtttcttcttaacgttatttcatatggtggttgttggggagtaacagatggtgttagagagatatttttctatgtcgggcgagggaactgaacttgtactcccgaagaacgtggatctacaagaaagactgcgaaggggaccacccaaggacatcgattttttccctgaagaacatgataattgacattgttatttttgtgaaattatttggaaaactgcagttacaataatgttatgcaactgcacaaaatcggtcactttggggacgattgtaatgactctggtataaggttatttcgaagcactactcatcagctccatggaaacaaagcagaccaaataatttgaagaatatagactggtacaagacttggataacaatggctcctcaagtttttacgggttcttcagatgttagaaaccggcattgtttggagtctaattcatggaaaagcattcagatagccatccccaatgctctcttttctccttcatcctccagaaaccgtagctgcaggcttccccaagcttatttgaatgtgcaatgttcaagatacccagctccttcatcgtcagatgatttatcccattcttctaagtaccacaaaaccacgtataaaatgatttagtatggcaaaaacatgattacagagttaaaattggctagttaataaatattgtgcaggtattatggcctaacctgaggtaactcaattctgaaaagtaacaccagaaccatgttgccccaaaatacggcacacagccgagtaaaaaaacttagaatggacaacgagctcgacaatgtcatgtgcgtaaatgttctttaaagtaaatggcaccaccatatatatgttttgtgcataaaattaccaaggaattttatttgaaggatgtgcattcatactgacttccacttgtaagatgaatatctgaattttgtcctttatacgcatggaaataaatcaatacttggtcatgatttctattagcaatacacagaattcagaaatgcagcaacattatcatcggaaatgaagctgaattcctacccagaaagaattaaacccaatgtctactcgagtcacccacgttgagaaatctatcccaacttgaaaacctacagtttcttcacttaaaaaaagaccaaccatagagtaagggaactgtagttaaaaaaaaaaaaaaaaaagacaactagtt

SEQ ID NO: 185873 - DNA, 2566 bp, Cannabis indica
atatactgaacctccaatatataaacactagaattatcacagaacagtgaaggcttgtgaagcaggaattatatataaaaaaaaaaaaaaggctcacatgtcattctcttctctgttgtcatcaggtggaggctccaacgatctggtatcctcatcactgatgctctctgcatttaatttaagtacaccaacacaactctgaggtgaaatttcaacaataccatcatgagtacgtgatacaggatccacattcatcacagtaggttcgcaaatttcatattcattttgtgacttgtctgatttacaattaatggactcaatacttttggtattgccattctcagtaataccatcatgggtacctgatacaggatccatactcatcacaataggtttgcaaatttcatactcattttgtgacttctccaattcattattaattgattcaatacttttagtattgcctttgttctcaggaagcaacagctgatcttcagatcctcgagcagatctgacatcagattccttgctgtcaggaatagacagcaaaagccttggactttgagattgaactggagtcacagcaatctcaccacctttagatccatcacaaatatcatttccatcagcatggttcccagaattcagataaacttcttcgccagaattactattttgaatatcatgactctcaactcttacattatttaactccatttccagagataattcagtattttcacctgagctagggttaaaggtagcgtctatatcagaaacaccaacctcttcagcattacaaccaatggaatccacatttgggagtaccaagtcacttactgttttgctttcaatagtcttatcgggagatccaaccgtcaaagaaataatatttccattaggaaaggtattcatgtccattaaagcatccttacatgattgaacttcctcggcagcattagcagacatggcttccagagcacggtgtagccgtttagatggcggcaaagccgattcaccatcagccgagcagccaaatgattggtctttgttagctttccatgtatgaggcttacttccatggaactgagaaaaattatgtgaaggtgatacaacagatgctgaatttgtcattggcgagtccctctcaataggatcatcacaattcaaagattttccaactgctcctaatatttggttaacagcttctttctgggtgttctcctccgaggttgaaaggctattaggctctctcaaggaagatggttcacccatccgaacccttgctcgttttaccagtggcaagtgctcatctccatcttccttgggacagattccattcatcttctcacaaacattgtgggagctttcactagtactttgtacaccagcctccttatccactgtaaaagtaggttctaatgcatcactacacacccgctttctgcttggtttccttttcttttttactacaacagcctttatttggagatcaaaccctttgatcaactcaacatcaccctccaagcacccaacaagtgtctctgactgctcaattttacatccagaatcaatagtactgccttcattgaaactaaaggtatcagactccactgtgacaatttccgaaccattatcttcaatgctaccacttgaaacaaaagtagataaatcaacatcatcacattcagaggcatcagttgattttctcctttgtgaatttcttcttagcaacccttcccgaacaacagaagctgatatattcgcagcaattttgctattatcattacattgcacattagagccccgcaatttgcgagactctagccttgatgaagttcttgaccttctaactgtaggctctgtctgtgaaacaccactttgcaaagacaaatctctagatcttttcctcgaagaacttatggtacgcaaaggtgtttctgtaactcttgcagtatcagtaggatcttctttttcacacacagcacctacaggtgcagtagcagacgaatcctcaactagaaggctcggatcacttccatcagctatacaagaagaattaaacctagaatcaagagtcgcttcaggagcttcatgctgatctttcaacccaggatttgctgatgagtcaatcgagttcccaccattcatatgagtaactccttcagagttgacatcatcagattggtcttgtttcttcaacttatcataactatcaacgatctcctgcactgcacgaacaaaatcagcaccctttccatgacgtttgaccaaaagagtttgtttcttctcctcagtaaatgcctcaacatcagcagggttgcagaatgctctacataaaagatacatgttaatataacttattgcaagacttataataacttttaacaagtcagtcagttaaaatcaaagcaaacttgtgaaagcccaactacaagaagatataaagattattttacattaacaagctggaattttgtttcaaaaattgaagattagacagattagtggtttttttcccctattcttatgccataaatctagcaaactcacccagtaaactagc

SEQ ID NO: 185874 - DNA, 1543 bp, Cannabis indica
aaagaaaaaaaatgtaaaataaaaggtatcatttttctcttgttttacagcattaatttaattctataaatgattgttcagtttctagtccacgttttacattgaaggaaggggaaaaattaaataaatattgtatagcaattcagcatattaattcaaatttcgtcatattcagatcagtcaattatatatatgtacttctcagtctattgccaagtgggattgaatcttgaatatatataaggccgatggactcgacaagaacgaagaagaaagtttataaaaataaaaataaaagttgtcgagagtttcaggggcagacaagttcttcccctcgtgaaaataaaaattgtgataatactgcttaagatggagacaaagagatagaaataattaataagttttttaaaatatatttatatataacacactctcctctaaatataaacgcgtatttgatttgatcagcttgtagacgattttccaaataaataaataaaactacaagcacgttacactttttttttttttctttggagatgttatcctaaataggacaatctaatgttgaatatataaagaggtcaaacagttgtaaaagacggaggaccgagttggaataaagtgtaaaatttaggagcctcatcttctgtatgttgttctactaaaattgttgattagtatttagtaccgttttcaaattgagattcgatcatttcaatttataccagttaataattgctattaagaaatataaatatgtccgagatttaaaataaaaattaattttaaaattattgcgtgtctaaattgcagaagatgtatataatatagaatttaatacgttttttttatttttattttttgttaaataaaaaatccattgtcgacggcacagtactcgtgcatgcacatgagtttggcaattctcagtgatccgcggcagcagaaatgatctgtcttcatttattaatataactctcgcgggctactcttgggtactgcgaccgtagatgaccctccaaagtccaaactttattattataaactaatattaattattatatgcatgcatttatcaatttaattaatatatatatttaaataattatatatggagccagattaatcgatcgatggataacaaaaagaggaaaaatatataataacgaggactattcccgttttgagagggcttttttttttaacaaccttccttaacgagctaaggaaaccctcctactggtgcctcatctctaataatgtcattgagtttgaatgtttaaatgctatcaaaagatattataaataaaaaatttcgttaactaaatttcaacttcacaataataattttgcacagaagaaataaaagctataaaaataaaagtatgaatacagggttttttacgtggtttaatttgctattaaaaatctgcatagtccacgagtcaatcttattcagatttttaattatttttttttgaataaaaaaataatcttttattagacagaaacatctcctaaaacaatagactgaagagca

SEQ ID NO: 185875 - DNA, 11760 bp, Cannabis indica
ccattcacaaggaccccactttctctctcatcatcctccattgaaacaacaatccaaacaaatacacttcaattttcttcttttctattcttttgggttttagttttctttaacgaaataattattaataatcgaccatttggcttttgccaacagaaaagatcacttttttatttttcattcatacatattattacagtcaccaaagaatctaacacccccttactctttacgcgctttcgattcaatcccatctgggatttggaggaaagagatgatttgagaaaagggttttgtttattagcattaatggaggtgaaaacacagagaaattaaagattttgattgaatttggagttccagagatgatggagtctaataatagtaataataataataataagtctttgcgtttcataaaccatcaactgttcttctcagccgttcaatcaggtgatattgaaactcttaaagagttagttgataagcttactcatgaggaatcttctgatcagtcatctgtatctgatctgatggctattcagaatgattcaggtgagactgccctatatgttgctgcagataagaatatggaggatttgtttgggttcttgcttaggcactgtgatgttcagactgtgaaaatcaggtctaagtctgatatgaatgcctttcatgttgctgctaagcgtggccacttaggtattatgcctcttaattaatctctttacaccctgctcttgtttttgtttttgttcttcttttctaaatttgaattctgctcaagctttctgatttctgaaatggggtttttgatcatgtttgagaattgggtttttaatggtttttttctttgttggtgatgatattagctttagtttacttaatgaaaacttggcttttcaacacaaatttatgttacaacttttctcattttattcttagagatgagttgttgaacatgataaactgttggatcatatattcatgttattaataatcatttaagatgagtgaaaagaactgattacttagcattgatttgagtgtgtgtttgaaagtcggtaattagatatgaattcctaatgtttactagttacacaagaaaaattacatggtcgaacaaacgtgtcaaattatgtaattacctttaattacacccaaatccaattctatcatgtctttccaaacacgccctgaatgttttttatctacaattcataatggtttcataggtgatatttatggtataaaagagcattgattgtttttattaacagtctaattcttaagttatcttataaaagcttaaatctttatgtggtatgttgtattgactgtgttattacatatatcttttaggtatagtgaagatgcttgtaggaatttggccagagctttgtaaatgttgtgatgcaagaaacacaagccccctttattcagctgcctcccaagaccatttagaaatagtcaatgcaatccttgatgctgatgttagctcaatgatgatagtgagaaaaaataggcaaaacagcattgcataacacagctagatatggccaacttcgtattgtaaaggcgcttatagaccgcgatccagaaatagttcgtatcaaagataagaagggtcaaactgctcttcatatggcagtgaaaggtgattgtcctttggttgtggaggagttactgcttgctgatcactctatacttaacgatcgtgacaagaagggtaacaccgctctgcatttagctacaaggaagtgtcgttcgcaggtatatttccatttaaattatgcacaagatgaagaatcatacatgcatatgtgagttcaaaattctcacttaattagtctatctaatttcttgtgcttgtaaagctttgttttgattgtatcagtatgatatgcattatgaattcaaaatatctgactttaaaactgaaaacttaggtactaacattggaaaaagacattttgaatgagatcatctcattaaatatatgtaggacaaaattatagtagggaaatcacttttgttcctatcagtatggatgtttttgttataatataattctagcatgcgttccatcaatttttaaaaaacgttgaaaataaggttcaaacaatcagttacatgtgtgttagtttttaactttatttacgctcgtgcaactgattatagtataactataatgtacatcatcatatgaaacaatttggattataattctctatataacgaaaacaaaaacgttcttaccaatagggataaaagtgatgtttctaacacagaattttcctatatatataactgtcatgcctattcttcatctttttcacactacttgattgggatttggtttagatgggagctagccaactttcccttcttgttattgaatggatacacttggaatctctttttgattgtttacataccttatgctttaagctgatatcttctttgttctcctcaggttcagatagtcaacgttttgctcacctatccatctgttgatgtcaatgccataaataataatcaagagactgcattggatttggctgataacttaccatatggagaatcttcacacgaaattaaggaagctctagccgaagctggtgccaagaatgcccgatttgttggccaaatggatgaagctatggaactcaagagaactgtaagtgacattaagcatgaggttcaatcacaactcaaacataacgaaagaacacaacgacgagtttctggtattgcaaaagaactaaaaaagctacaccgagaagctgttcaaaacactacgaattctgtgactgttgttgctgttctttttgcatccatagccttcttggcgatattcaacttgcctggtcaatatctaatggaaggaaaggatgttggaaaggctaacattgctgatcatgttggtttccatgtattctaccttttgaatgccatatctctcttcatttctctatcggttgttgtggttcagataactttagtggcttgggatacaagggcacagaagcaggttgtatcggttgtaaacaaaatgatgtgggcggcctgtgcttgcacttgtggggcttttctttccatagcttacgaggtggtcgggaaaggagattcatggatggcgattgtcataaccgttgtgggaacaccgattcttattggtacacttgcattcatgtgttactttgttttcaggcaacattgtggcttccaccgcgactctcaaaggcgcatcagaagagcaagtggaagcaagtccttctcgtggtcggcttactctgcaaatatatcagatcctgaggactataattctgaccttgagaaaatctatgctttgtgaactttactagatgtttttcattcatattcttattgaatgttgatctgtaaaatagtaaaatggaaactagagttcagatgtaggtgttgccatcaaaatgttgagattatacccaagtgaaaaagtaatcggattttggttgtgtaacttacaaaagataaaagaaagggttatgtagattcatgtatattcaatgcaataatataactagtagcatttatttactttagattagaacaaagaaacaactccatatctaattttactaataacgatattatatcattaatattaagcagcaattagtgcataagtggcgttgttttaagaatggttagcaatattctataaaaataattatgttaaattatataaaactcgatactcatctcacttggtaaacttttggttctcaataaatacctaatcattttcagcctcaataatagatggttaaaagttgatgaaatcccaaaattgaagctcttttagagagttggaacttggaacagccaaattacaagtcaatttgcttaagcatgatcatattagtaaagtcctactatataattcttgtaagtattgctataattgaactttttggtcatcataattaaataaaagaaaaaaacaatcttggtgggtgacattcaaaccttttaagaaacccgtcaaaattaattaataatctccatatggtttaattaaacaacacaaattgaattaacaaacaaacaaattttgttttcttcttcccaagacaatgtgaacgtaaatttaactctgatttgtttattataatagtttataaacaagacataaaaagaacaaactgtatcatctaaattgaatatgatatattatatataaatatataaatatatatatatccctctaacccacatggtttttcaataaaaataacagaaccacgtgggggtttttgtatgtcgtttacaaagtcaaaagaatataagctcagcctaaactgaacttccatctcaatttccaaaaacaacaacccaattttcaacatcccaacctccacaagttctctccatagaacaaactactatgatatacaattttacagattatactagacatcccaattccatggcttcttcctatgttgggatcatccatcattataattttaacaagaaactccagaagcagagcgtattattgtcatagttgcaactgtcccggacctctccttgacgttcttgaaggtggccgattaatttcgggtggaggattgcttgtggcttcttccagtcttcgcacctcctgcatgtatatgaacatcttagaatctagtgatctacaatgcaaataagcctaaatcaactacacgtaacagactgaatggacacaacattatcatttgaggcaactaattattaaatttttcaaaactagaatccccgcctaaccctataatatttggggaccgggaaactataccaactactatatgagtagccaagagagactcgaacctcagaccttgagagaaaaaaccacatttcggaccattttagcaactaccccttttgagtatttgaggcaactacttaatgatcttgaagacgcaacttaaaaggcgcccacataaacagtatcacttgtaggtgaatattcacgcctcagtaacaatgtactgccactaacaataccgttactagctttagattcaatatgtatatatatatctaaacaatttccattgacgacaggaaaacggacgagcttcacaaacctttgatgatgaggaggaggaggaagaggaaggaggtgcaacactgcttcgaatttgtgactgcgctttagcatgcaaacgatgttgatgctgcatttgctcaaattgttgtagtcttaaattaaatttaattccattatgcaaattcttctcattctcatttgcatctccatcatcagttatatgtgacccccctgaaatttgctgaaaaatctgataggggttcccggaaggcgttcgcttgaggtgatcactgctaaaagaataggagggtacagtttttagacgagttcgtagtatcttgaaggctgcactttgctgcaaacaagaataacagtaagaatcaaatatcagagcataggcaaggagcagcaaaaataaccaaaatttttaagtaataataacaagagctcaagtctataggccaaacgagtgacaaatgatcgaaaaatggtattataattagctagtaatactaatgactttaagaaacaaatatagccactgtagtctcccttcgactggttctacatgcttttattgagcccgggcttttaaaatctttacatcgtcttggtgaactttttcaggtttaattatcttcctcaaaatttctgatcaattcattattggttatacttccttgattgatctcatttcttgaaaagactactttcggagctcatttgcaagtcataatcaagagcatatgatatttaattttcactggtcaatcaggcagttaaaaaaacatatattttggtccgtgtcacaacagtttgtttcacataaatggaaggcaagctatgcattctcttttcactctcccaaaccccaaaaagaaaattttcaaataagaaataatgaatacaagtgcttacatgaaaagagtaaaaagatgtacctgaggaagcaacatcaacagaccatacaaggtttttaacaaccacatgtatcttccaggttcgagaagctgcaagaaacaaatgatgctattaagttaatagaatatcatatgataacgcatctctgaaaaattaatgaataaaacataaacaaagaagccacaaaacacatctattatttaataatccatcaaatgcatctgcaataatttaaaagtgaagaatattaaccacctcaatcaatatttgcctacaagctcaagttcacaaccttataaatcatgaaaatcaaaagaagatgcattttctctccagcacaaagactaagagatcattaataagtaaatacatgatcaagtaaaatctggcaaaggccaattatcaataatggtgtacttttactaccaagtaaacaagcatctgcaaaaattggaggttatgacactataagaggttatgacactgacctgtaatctaagatatgcaaaaattggagtctccagcaagcgaatcaatttatccaactggaccaaaaattttacattaatatcctcctcccccagagactggattacagcacttgcatgttgatatgtctgtaccattacataaaaaatgataagacaatagcccaaagctgtaaaaaaaatgaacaacaaaagatgaggaagtggccaagaaattatgtaaacttgcctgagctaacaagcacagacttatgatcgccatgggcgagtggcaccatgaagcatacaatgaaacaaataaatccttcccggcagggttaaccagtgatttttttaaaagatctcgaagttcagataattctgaggatgtaagtaaaatcaaattcaaagcctgaaaacatacaaggaaaaccatgaaattaataaaaataatcaaagatgataatacataaaaagataatgatcagaacatataacttggaaaaaaaaatccacatcaaccagttacatcataatctcttgttatgagcagatatgggcttgcttcatttcaagaaatacaaaatcccaacccaaccacatcatcaatcattagattactcaagtatttactggtttaagctctcagaagaatgacaacctgaaccataacagatgcaaagttcagatcagattctccttctaatattgttgagaattcccgatagaccctttcagcatctaaatgtacacaaagtcgacggattatcaaagcaccacgcctgagatgataagaaacaacacatatcaaccactagtgatgacagtcaaactgtgagtaagagagagcaaagttataaatctcacttctccaaaagagaattgtcattcctaaaatgatgcactaggaaaacaacaagctgacgaaagtgttggggatcttttgcaatgcatgcatgaacctcaagaaccagaagtacaacctggaaagaaaattcataatatcttaagacaaggtcaaggtcaaggttctaacaggttaagaactagaacattattgtggttaacatgcaacaacactattgtatctccacatttaaaattgataggaaggattaaaatcgttcctttatttttataggcacataattcaataattaaaagcaaaatttcagtttgaaattatattgatgatggtttcaccaccttaccatactataaacaaataacagtgaagacacggaatactgcctcaaatatttttacactgaagagttgtttcattttgtagccacacaaagaaatcattattgtccatgtaatttgaaaacttgcaacatattattagaagatttggtgtattaagttggtggctggacaaactttaacccattttacattttaccacatctttataaaaatcagaaaccattatacatccccaagatgaattccaatagtggagtacaatcacatcctcacaagagatcaacattgttgaatataatagcacgcatatgttggctacttctgcagtaaagtctagtaacctcccactccatacaacatcaaaacatgttatacacactaatgagtgataaaacctgagcgtaaatgtttttttatgaagcataaggtggagttggcaagaaaaaatgtagatatttaagataaggttacctcatcagaaggatctgaaagtggattcaaaagtgtctcaaatatgtctctcaaagaagtcaagacctgttcaattaaaaaaaaatccatttaaatttttgagccaaaataaggaccagtccattggaaaataaatgcacataaggaactgtaaacttctattaccatacatcatgtaatcagagcttttcatatttcttttgaatcatttcacaatagtacccacagaactgtaataataaaagcacaaaccagccttttcttcatacttatattataaaactaaacattcatctgtcaataaaacaacatctccaggtaaattagacagtttgtctgcaagaaaaatccccctgattttcttgtaagaactacaaccattcaataaaaattgaccaaatgtatcagaagattttttgtgaaaaggaagttcaaagaaaaagacaagcatgatagcatagatattaaaagctgatattacttgagttgaaacaagccctctgttatttcaaacagaccataagcaaaatttgagatagttcacttgaaaactctagtgagttaaaaatgcatggtaatagatatatcacaaattttaaacaagtactgacacttctgttttttataggccaagaaagaattcatagagaatgcaagttcctgcttacctcagcacgatatctatttaaaagtgtcgaaatccagtgcaatgcttcaattttagtagcctcccattcactagataattgcctgcagtcaaaatatccatgaattaccacctatggtagcgcagcaattgttttgagataagttaccaccactcacttaaactaactttaagaaggaagcttggcagcttaaaagtaaataagggtaacatcaacatttcccgaagctcttaaatgagagcaagtactatattcccataaaagtgaaacttctaataacaattcaaagttttatttcacattaaaaaaattgcacctctttgcaatagagagtatggatcccacattaaaatcgtcagatggatgagctctgattgcacgaagttcttcattggtttcacgagcaatcttcacaaataaataagttaataatgagttttcttttccttttttcctttttaataataaaaaatgataaaacaacgaacaatcttctaaaactcactagtctaaataaaataaggaaaaactattgacaaacttaccactctaattttctcttctttatcagatatgcaaggcaatattgcacccagaatatcagcataataaggaacaagctgttctccaccaagttttacaaattcatttatctgcaaagtcaaacagcatatatatttgatcatcttataagcaatgatttaattggacctgtaattaataaattgggaatacaacataaaggaacctacccatgtgacggctgttaaccgagtaaattcatctggagaagcagccctttgcaccaaaatctcagccatgcgaccataatctacagacttcaagagtagagcactgcttgagtcagaaatcacaaatgaaaaagataatttgtttccagtaaaaagtactcgacaacatgcacacttatttatcttgttggcataagatggatttgattaaatattaagaaggcaagaaaccttgtcactaatcaaaagcacagacatagatttgatcaatattaagaaagaaagatatgatcactaagcaaaagcataaacataaatagaaagagaacaaacaaggcataaagttttagaaaagtgaagggagaagttaacaaagtcatcatcacagctatatacttaaaatcaagcagaaaattttctagaaggccatgtgcggatgggagggagcatattgccagccagcaacaagttttaggaaaaatagaagggcgacagcagaatcaatatagccaaatagctcaatataaaattagttcttactggggagctcttgatctcttgaagaaactctgaaagagcagaatcagcttgttgccgtatttcatggctagaatcacttaacatattgaacaaacctgaaaataatggaaaactatgaacccaaatgcacatagaaggaaacgaattaaaataaaattacaacttatatgtattaccatctaggaaatcaggtagaaagcccagcatatcaatgtctgggacactgtctaatacagtgatccatcctaccaaaaactgacgaacataaggattaaggacattcatgcgctccctcagcaatggtataaattcttcaatactgaagaagaacaacaccacataaggaaacttaattacaaataataaggaaataatcctcaactcttgatgagaaaattggaaaagtatgacagagaagataacacacctgaattgatcactttcagtaacaatatcctgtgccacaacaaaggattgaaataagaatgaaataccaagcaggaagacaactagagcaaacaagctaaaaattgaaattaaaaatgcaatcaatcagaaggattcagatgacaatccaccttcacaagccgatctagaagatgagcagcactctgtacattagcatctgagtcggctgaaagcttacataaagcatcaaaaatctgattaaagaatatgataaaatcccctcttacaacctgttcaaaaagcaagaatacatatcacacccagtatcaatatggggaattaaacatgataagcctatcatacttaagtcagctaaccactcaccttcgcaatattgtatagagcttcacaagcataatatcgaactctgctgtcttggtcagagaacgaattaagcacaggaggcacaatttgctggaaaataaataaaaagcttgtagtgaaataaattcagttcaaaatagcatatatataatgataaaatacttgatggttagaaaccaatccatgttttaatcaataaactcaagaaaaaaataaaagaaaatcgattccaatagggtccaaacttcactaaataaaaacctcaaatggatatgaaatctatagttagttatatttaccaaatgctaagaactgaatttcaacgaaacagcacctaaaagaccatatatccaaatcaattttgaaatagcaaaagcacaatcataacaacttggcattttccaattccctaacaacccaaccaggtgcaaacaattggaccagataacagctcttactcctacaggcttcttatacatctacacactatgtcccttcaaattaatcactactaaaagaaatctaacagttggaaaacataaaaccaatcgtcataaaaacttgaatttgatgtgaatgaatcctactttcattatactgatgatgttgaaaatacacaataatataaattacctttcagcctaacttgattgttaaagtgaactcaaaatcattttaagccaacatccgaaaacaacagattaagatcaaactactaacgaagaaaagatggaaaaaaacaaaattgaattcaatccttacctctagatgttgtgccgcatcagtactcaacccaactgtcgcagcagccaaccctatcaatcctcccttcacaaatttgtaaaaaaaaaaaa

SEQ ID NO: 185876 - DNA, 4010 bp, Cannabis indica
aatccattaaatgtttgaaaacgtttttttctctttgtgtgtcgtagacattggtgttacatggtggtcttaggactattgcttgcgtgaattgtttgtggtttggagtggttttatagtattgtcatagtgatttcggataactcaaaaaagaatttagaggagactgtgaatagtaaaaatatgttgacaatggttgtggaatctgataaggagaaatgggagtgtactgagcctagggtgactgtgggaaaattgtcctttgttggtaggatgttagctccacgcaaatgtaatgataagtttattaaaaatgtgtttagtaggatttggaaaaggaaagaaaggtgggatgtgcaatttttgcagggttctcttttaacgatgagatcttgtttcagcaagtgcttaagagaatgccttggacatttaaagttggtatccttattggcgaagagtagccaacttctggtctttgagatgaagcacaactgaatggtatttcatgttgggtttgattgacaaaatttcatcctaaagtgctcactgagaataatgctcgacgtctcacaagtttagtaaggcaaatacaagtcttgaattgggctagtcctaccagaatgttgatgaagagggaagtcaaagtcaatctctttataccaattatgaaactagtgttcgttaagaaacacctttcggtggatggaaagaagtgttgggtcaaattcaagttcaatttcttgccaatgatatgttatcgatgtgggtggtggggtcatgaagaaggtggttgtgagcaggaaatggtggttgttaaggaggtgaaggggaagatagttccgttatatggggattggctaaagacggataatccaaggaagggttgttttgatgaaggtggcaggaagtacctaaatgtgagggtagtagctgattctcatcacttcgctaatcgggtagtggtttccaatggtgagcagcaaagtgttaggatgggtggtgggattggaggttcgaaacaattatggtgggaaggaataggtgatcgtggaggtgagggatatgtaactgctaatcattcaatctgaaactgaataagcaatgtgggaaagataaaattatgcataacttggctgatgaggtagatttggaaatgtcagatggaccaatagggcaagtacacgtgatgatgggtcaaagttgtgagatgacacaacaaaacttgacattgggtaatacgactgaaataggggtctatagtaaaactttgggtcagcatatcaaagttatggataagttggttatgggcttggcttctagtagtggggctactattattaattgtaatttggactggacttctaggaatggactctgggttggatttgagaaatggtttaacttcaaacagaagaattaatgagggtaaagtagttgatagtgaaattaaatccttgtcaaaatggaagagaagctcaaagaaaagattggtgaaattgtcagagaagaagagtgtaactaggaccgatgcaattcaatagaaaagaaatggagaggtaggggaggaaatttttagaagtgaagggagacaattaaaaaaacaatggagaaggggttgtggggggttctgatagctcaaaggatgattttgctttcgacatagaggcggctattattgttgacagctgtaattctaggaatttcattggtaatgtcgctgctaaattgcagatacagaaagaatcgttcaagattaaagctcaacgtttgggaataatgagtatcagtgaggggatgtctcgattggaaaaaggtactggtattgatgattatgtgatttcgggtgagttttcttttgcttagtctaataggggagagattggtggagaatgatatttctgattctattgatttatcttctcccaattttgttgtggaagcgacgagccttgatattcaaggtcatcgaaagaaaaatgaaaatattatgttggaacttccaaggattaggaattcctggacgttcaatgcactctccttctattttttttttatatattttgtaggttttatgagaatttagtattttattgatttattgttttttgtaggtagccattcaaatacaatttattttttttttgtttttattttgagatgtctcaggtagtattttagggctacaatgctaaaactctagctcttctgatgtgatgtttgattacgttatagctttattgtttaaatttttgggagaagttttatctcatgtggctcgcttattttagtagctcatcattcagcaaggcatgcctttcggttagacgatgagctatcttagtttgaggaagttcctgtggcgattatggatatctgtattgtgaattcacgagtaattctaattactacataaaacaaataagaaagttaccacatgtatgtctttttattaattttttttctatttatactttatttattttactattctatttatatataatttttttaatcacttttacttttaagcataaacttatttttattttatgatttcttcataaattacttttcctttcttttttattttcttgtgcaatgaattcttgttctttcttgcatttaaatctccccaacttgaaggtgtggcctaaaataattatctttcttcttcttcctagacttatagttgctctctaccacagaaaatgaagcttggtttcttccaaaatcgaaacaaaattcgcaacatattttacaaccctaaaccatgatcaaatatatatctcaatttttagcccatttttcttcatcctctgaattattctctcttctctgtgatcgttcaagaacaccatgtgaaactttcattaatttcaaaagcagaaccgaagtcgcaaccgatagcgtaaccctaaattaccattaaattatattttaatctcaaccatgcctagtcacaacctaaatcgcaagacacaacataaagcttccattaattttctaaacaaaattgaatacttgcaactgatattgcaacacaaattgcaacagatattccaacccaaattgcaaccctaaatcaccataaagccatattgcaatctcggtcatgctcagttgcaacctaaattgtaattttaaatcatcattaagccatatcgttatcttagtcatgctcagtcgcaacctaaattgcaacccaaatcgcaaccctgaataaccattaacccatatcacaatcttaacagtgctcccttcgcaacttaaattgcaacctaaatcgtaacctttcttcttcttcctctcaatcattctccctgagccaaaggttagtagctctggcaataattgtcaaaaacttgccagagtcaaaggagacaattccgtatatgaagctttagactactttttttcttctttctttcttctttgttgaaatcacatcctttggagatggtgcatggcttcaatcctagttttgcaaaataaaaacttatattcatattaatgcaataaaaatcacttactgaatttgtacaaaaaagaatttagttgttgtataaataaaaaaaaaaatcaaattattatatttatcttctcacaaaatatattatatttatttttataagaaatatatataaattatatttataagctgaagtacttaaattattaatttttaagcaaaactacttaagtgacaagcaaatttgacattatatatacggataattaagtgctacaaatagtagaatttgaatattttgccacaaattgaaaatataatttgaatgcttttttttctttttctttttaaatggaataatttaaatacttaagtaagtattataaaggtaataatctaatgcttttgttgtatatatctcttattttaatttttctaatgaccaaatgataaaatagatatcttttattatggcatgctatactagtacctcatactagtacaaaggaatatggtaagtttaaatatgggaaatttgaat

SEQ ID NO: 185877 - DNA, 2869 bp, Cannabis indica
ttagtgaagaacatgacaagcatgccatcgggtccaagacttttttcgcttcccatactatgaagggcagtaaggacctcctcactagtgaaaggttgatgtagcaagttgttcattgcaggcgatatggttgcagggatggtatccaaagtaagatcaatagtagaagtgttaacaccattactgtcaaacatgttggtgaaataggaatggatttggtcagtgataccttgaagatttgagacaaaattcccattgctagtctgtatcttttttatatgattattaactttgcatccagaggctcgagaatgaaaaaactttgtataagcatcgccgactttcaaccaattaatgtgagatcgttggtgccagtatgtctcttctttctcaagaagatcgtccaaaattttcccagattggtggagctccaaaaaaaaaatagcatttgaaagatccaagtttctaagatcagtaacttgtttttgagctttggttatattcctcttcatattcctatattttttagtgtgccaagattgaagatgggaagaaatcatctaaacattgttaacaacctggtggagcagatgttgttcagaggaattccagtggcgagtaacgatatctttacattcgagatcatttaaccacaaggcttcatatctgaatctagatcttgttttggattcggagcagtagcatgggtggtagagagttcaactttaagagctctatgatctgaggaataatagtctaggtgatgaagacaagtagaaaggaaagtttgcttccaagtgagattaacaaatccataatcaagatactccttgatatttaaagtaccaagtgctctattgttacaagtgaaaatattatcagagtggtcaagacgagtgagatttccatagttaatagcaggatggaaattattatctacaacggacaagaaatattgtttacctccctgagtttttaccatgcttgctccccataaatctgcatggatgtattccagaactgctttggctctgtagttgctatttgagaacttgatcctatgttgttttccctaaacacaaatctcacagaaaggcagattagcatgattataatcttttagcaaaccttgtttagatagctcaactaaaccttgttcaccaatgtgtcctaatctggcatgccgcaatttcgattctgcattgcccttgtcaacatcagatgcttgagctagtgttatagttttaccatcaagataatataatccatgtctcttggttcctttcagtactagcagtgaacccttagtaattatgattactcatttacttgtcttgtaatcacatccttcatcatctaaggttcctaaagaaattaaatttcttttcaaatctggaatgtgtctaaccttgtgtaaagttttgaaagtcccatcaaaacttttgatgacgattgaaccaatgccaacaaaactatacttgtggtcatttcccattacaacactaccaccatttatctctgagtaatctatgaaccaatctctattgggactcatgtgataggtgcacccactgtccaagatccaatcatcttgatctttcaaataagaactggtacaaacatctccatttgtcttaattgcatctttattttcattgttaataactacaaatacatctccatcaaaatcatcaattactgcattcgagtcattgctgttgtcatcttcttctttatccttcttcttctttcttttatcttttaagtcccaacaacttctgatcaagtgtccaactttaccacagtaatgacacttcctagtttccctaggccttggctttgatcttgagttccacctgaattttgaacttcctcttcttcgtaatctccctcgagccatcaaagcttcatctgtctttgattcttgtcttgcaactttttgctaattcaactcagcatctcttgatatgagtgtgctcataacatcttccaaagtcaaggtgtccctgttatacataataacagtcctcatttctttaaattgattaggcaaagcattgagtaaaataacagcttgatcctcttcttttatggtttcactcatattagtaagagctaacacaattttattcagttcatcaaggttttgatctaatgtgttagtagcattaattttaaacccataatacttccctttcaagaagatcttagttgcagtagatcgagccatgtacaactggttgtgtttgctccgaattccaagagttgtcttctccccaataacttgttccaatacattgtctgcaaggttcatgagaatggttgatcttgcttgcttcatgatggtttctgaatctttcttcttggtttcatctaaagcatgctcagtcttctcggaagactcctccaatgctgaatccaatttcttatatcagtatggctaacatcttctccttctagagactgaagtctccagtaccatcaaacctctctagatcgaacctggttgatgatgaagccattgcagtagctttcttgatcctgatcacagagtttgagttcttgaaaccttagatatcttcccctgagctatgatgccactgttgtgattaaacaacacaaactcaaactaaaacaatgataatatacttagcaaaccagtttgctaacaaacaacaaaaattgagaaagataaaaaccaaaaaattaagagagcaaacacaagaaaattatcctggtttggatctcaatttgagtcctactccaactttccgccaaggagtttctccactatgaatcaacttggtacaaacaccaattgttttatagaatcaccaagaacaatctaagacagacatggctcttcgac

SEQ ID NO: 185878 - DNA, 7511 bp, Cannabis indica
gaaacaatacagagacacttgtattaattgatagaagagaaatagtacaaggaatgaagaagggtgcaggaaacgtgcaccaaaaaaaccaaaagaaaacatgaaaaggaaaacaattttcctgctaacaaaacagacagaagatatctaaatttgagaaagggaaaaacattcagcagaaaactatggctatctgctggtctatttggttggaaaaaaatagaaggatccttttttcgaagaagaggcatgttaggtttgcgtacacaaagagttcgtgtagagtagctacttcaaatgagaacagactacttagctttgtgatacttatcacaagcaaaatgaatgttgacataaattgggaatgatctcaaataagcatgacaatcacaaaggaaacaacaaaaattattgcttcaaaatcagcacaaataatatgcaaggtaaactacatcaccttaattttgatttctgtgttgggtatttgatgtaacagatctcgaagggacctctggattacaatagagatccccttcacatcatgaataatgctttctcctagatctgtaccagtgccaacattcagatgaatgtcctctacctgcatcccaaatcaaagaagatcaacatgagaattagatatgacttttgtttatgaagaccaacatgagagagagatattactttcgtgtatgactaattaatgtttacctgaattgttaatatttccaaatgcacagcattaatatcagttttacttccaaaacaccacttaaaggtattctgtactgttatatgaacaatgtccagcttcaagtagctgttaatcagaaatttaaagcaaaacgcagcatgagtatattgaaaaaccatccacagcaatcagaaaagaagttactatattctaatcatcaacttactcaaggctgtcggttctccgaggcattaatataatgggctgtctaagagaaatatccagcttcactgcaggtgatccttcaatttcactagttgtaaaccacttctctgaatttgttagctggtcttttagtttggcaactccttttatcgtggaacgaggcccataaagtaactacaacctgtatagcgtttcagatacaaaacaaaactttaaattcgtatcatggatagaggttaacacaatagaactgaagaataagacgatgaaatgtatgactattttacctcctgtataaagcgattcaagtatacaattcgtacttctgacagctctccaaagaaactatactcataacctttatagtcttcgtcgccaacactaaatgaagtaaaaaccaactgcacgatagcaaacaaaacatgctagaccaaacccaaaaaataaaggaaagagaccagaacacaacaaaacaggctacatgaaccatgtcaaacaaaattgtggtaatttattatgttttgggttattgttttttccgtttactggcttttgtttcggctctggtatagttttcaatgttgtctctctttctgttttgagatataatgttcctatccacggttttcctccaccacaagtgaggctttcaatattatattcgggggaggggtcagtagacaagtgacctgtttctcttttttcaaaaaaaaaattatggaactatcctacagccttcatgtacactgcactgcaattctccacccatttcagattttctactactatcttcaaaatagctcaaaacatagctatatacattacaattaacaggatttgatttttcttgcaaagtggactattttcttttttttttttgagaatttagagtttcccttttaccaactttcgtaaggagaagagagagagagaatacctcaacaaatgaactgcctccaggattcctcatatcacaagcccaaaaatacatatgattttctggaagactgtcatcagtaattctaagatttccaagggatgccttaatactaaacgaggacggaaacacctttaggaaaaaaaataaaaaaaatctgtaagaatcatcagaccaaacataaaccaacgaaaatgtaaataaaaagactggaattgtaggagagaatataaatgaacctttatatctgtaagcaaattatcttgggaaagacttgaaagcttggtttcatcttcattcagcaacaagatttgagcacgcttcatattcagggtaatattaaacacaactctagacttcccctttcctagcaaacctttaacaacagcatcctgagtagttgttgacagttgttcatcaatcatgtcatttttagggatgtcatgttttgcaactgttccaggggaattttcgatgaatgattcacagctttcatccttgacgttaatggcattaacaaattccataatggcaagaattgtgggtctacgacagaaaaatgataaggttgctagggtgatgatgacctgaaatgacattttatgaaataagtatatgagaaccatgtattaaactaaaaccagaacccactatttgcactaagaaacatacgcacctgcgtatctatattatcatatgtaggagaattttggtcgcagatcactatctgagctttcacaaaactatccattacatcagtttgggtaacatcatcagttggcacatctttagggagtagaccagaaatgtgggtaaaactaggaagcttatcagacaaactatcggatttgagaaacttttggctactaaaattccctgagaaatttcgtggtgactgcatagggtagtcaaaagactcaaccaaattctcttgtgcttcatagaacttatcatcaccttcactcgactctaagtcattgctttcagagatctgattcctttcatcatcaaatgttgaatatgcatctgtactcccaataaatgatctggcaacatagcgtggtcgagaaccattgctaagagaaactaaatcttcgatttccaaagatttcaagacagtaccaataagcatatcatgttctcttatggatacttcaacctattatccaaaaatacaaaacagtgagtaggaacaccaaaacagcagaaaaatgaaacaaaattaaacagttatttcacctgaccaccaatagctcgaaattcaaataagcgagtctcttctgttaggagcactttgaagaaactgtggtcatgctagaaaagagaagttcatctgtcagatttgtccattgcaaggcaacttatatcattatgaagctttcatataattacctgatcgctgtaactaaagcggaccttcaattcatcaagaacaccagtaataaatattttttccatctctaatagaccaatggctttatttttgtcatcaacctcgatttcagaatcatcagcatctgatgaagtttcagatagagtagttacaggagcagaagcctgcataaaaaacatagcaagttttcccctattcaatttcataataatacaacaaagttggatgctgaaaaaaaaaatataatacaataaagttaaagacaaaattagtgttttgagacacaatttttttaatcaaaacatcagtgcttgtgtatatgtattccaaatattttaaaaagcattccaactaatgtaaccattcatgagtacatattgatgtaatcattgagtactacccaaatattatatgccagtttatcatagattagcatttctgatttaagtgtagactaggtgcagtctgcagaagagataatgagtgaattctttttctgcattgcccagtttcattgcagatgtatataggcttttggaggagtatgaactactttggtgcattcaagcagtataagggatttttgttatttaagattaaggcaggagaaacaaaagcttcagcaaactgcagtagctgctgtttcatgggtcttatggatggaaagaaacaataaaaattttgaagaggaagagaatgaggtggagatattgttggataatatcaagaaaaaagttgctttatggctgcacaatgattagaattttatagatgttccttactaggcttagtttcgagattggagttttttcttgaaaagattgcttttaatttttttgtttttatacactaggctcctagtctaaccctacaatatttggggattgagaaactataacaatatctatataggtacccatgagggacttgaaccgcagaacttgtgggaccaaactacatgtctggccatttgagttaccactcttggatttgattttgcttttactttgcgcgactggttttccatctttacttgtatgtatgaaatacaaatagttttgttttcagaaaaaataaataataataacaataatgcaagccagtacaagacatttagcttgtctaatactcaaaagtccttcgaaaatatataaagaataaaaacactagcagaaatattcaacaactacttgcctcctatttgacttccttattatttaccataattttagacttagaaaagaaatcttttagtatttcttaaagttgtatcgttaggcatactcgttttaatattcctctatatatttgtgtcatttcactataatcttaaggaaaaagattagacatcttctacaggtgtataatacaaatttaaaagaacaaataactaattaatagatcttcaaaaaagggttaccgatgcacgatatattgctccttgcaaacggctctgccaagtcttccttgaatcatcagattcacattgcaatatgagtgcatttgcatcctccacaacctattcggcagtcataaagtcgtattaaacaatcaatgttgaaatataatgtaactaaacaatttcttaaatgataaacatgcagcaagaaccttgtctgaacgtgaactatcagaaacagccagtacatgatctgcatcatccacaacttctggcggaactcgagatatctgtttcccacgtaagctacaaaggaagaaattcacatccatgaaaatcaatattttagaagggcaggaaataaaatgccaaataaaaatctcatcttgcacaattatctatcttcttttcagatgatattacgaatttatttattctataaaaacattactagtgtgttattataatatcgtaagtaccattactaggaaagaagtttctattgaactactaaaggatatcacattctcttgagtcattggtatttaatattttatatgaaaatttgtatcttttctaatcccacaactccaaacaatcttctacaatatctccaatttttattttatttttttgggtcagacagtatctctgaatacttgttaggcctttctcacatcttcccaacaaacaacccatactgtgatattctaaagtgccttgatttttaaagacaatttaaggaagagaaaaaaaaacaataggaaaaaatcccctaggtaataaaaccaaaagtagaaagaagtgactaataagtcaatgttcaaaacatagcatttaaacctgatatattgtttgtatgatttggagccaggactctcaaggacatagaggaaaggcccaactaagcagaagtatcggcgctgccacacagcttctcgatttcccacaccctattatatgaacatttttgaaatcatgaaatgtagtaattctggtcagtagagatgcacaggtactaaaaaaaactaccatgtcacaaaggagaagatgagaaagaaaaagggacggaccttccgagtaagaagagataaccacccctcaaagtcagcctgattccaaggttgaaagaaatctgatttttcagtatcctctcccttaaagagctttgctatctgcatcagtcgatgatatcttgctggagaaaagtgaaaccctaatgacggtagtcgtatggcaagtcgcgttgaagggtaggaggcattctccattcgaatctgaataaatttccataataatatagaacttaatcattgacaaaaataactagtatatgtatagagaagaatgcatgacatcaaaagtacaagcaaatacctgttgaagctttagcattgccccacagttatcaataacgggcagaagactaacataatttgagtgagcaggagtagaatgcttctttgtgggaacttctccccaatgatagtcaccatcaaccagaaaggcagacacatccttcaaaaccaagttaaactgcaaatacatgtctaactccttggatgatccaagttcatcctgcaaaccgcacaacctatattcatttgatattaaaaaatttataatgccgttaaatgattaagaaacggttctgctataacctctgtacgaatcaccaaatttcccaagtcaagcataagttttgttgaatgtcggttgtcaggacaaaattctgttggaattgttattttgggtgcagctatatcaatgtccaacaaaaacctagcataagggtataaatgacaaaattttatcatggtgattaaatagaaaagcaaacctacatcaatattacaatatacattccctttagttacaaggatcaaaaacaaacatgaactctaaattggtcaataaatcagaaacatgaagtaagttgagcgttcattagtccagttatgtataaagtctgaaggctttaatcatattctttatttaatttaaataagatttaaataagagaacttttttaaatgaaaaatcagaagttcatgaaagaaagagtataatgtatcccaatagaaactgaagcataaaaacacaactaaaagcttaaaaacagagcaaaacaaaacattactaaacaaagtgtgtttcatccagccaagagtaagtaaagaaagcagagcatccttaactttcttcaccactgaatcccataaaagaaaaaatcccactcttttcaataaaagaatatgtttgtttcattcaaaccaattcagaaaaaaaatgttttatatgttataacaaagaagaaaatgttctgaaatgtattaagatgtcttttttaaacaatatgaaataacttctaattgcagacccttaaaactttttaaggaaatgaccatccctactagatattcaattctacatttaaacacataccaatttaatccagcaatcatttatgagtaggaatactctaacaatacaaccaataaattgactaaatcctagccaatatctgtaattaatacagtgtaaacacctggattgatttttcaatgccttgttcacttgttcctgagcagtgcgcctgacttcatctattgtcatctggaaaataaagaacaaaagaatacagtcaccatcactgttaactgaaaatttgaaattaattactgttaaccatacctgccgaatcatacaagcggcacctcaaaataatatgacactaatgcaaatatgccaaaaatcgttaaattttatcttccaccaaagcccggaaaaaaaaaactaaatacattttctttcataaataactaaaactacaaatcatcccccccccacaaccctaactaca

SEQ ID NO: 185879 - DNA, 6393 bp, Cannabis indica
tttaacaatctacttcatacgcgtataaaataaaattttgcaaagttatcttaaatagttataacatacatgatcataagaaaaactttaactaaaatattatttcagataataaaacaggtaaaaatgtattgatacatttcttttaagggaatccattgaattttccaaaattatatttcgaattgatattttagcacaaaagattaaaaaggagagatccaactcattgaccaacccatcttaatctgtcttcttaatatacagaaaattttggttcaaaatatcaataaacatacttatagagttttaataacaattgaaaattttccttaaaactcgtgcaagtcaaattttttggctcaccccctattttcatttgaagttgccttctggttctgtacaaataacgaacttcacatattttctttcaaacaactcttatatttaatttccaatttagtggacatcattctatgttcttttgtagatacttcaatatccccttgctaaaaaggcaaagccacacccccaaaaaatgaagcagaaaggggaatatcatgcaaaattgacacatgatggctctgcctctgcctatccgaagataggaaaataaaaatagtaaataaaagaacaaaaaagagagaaagatttgttgttaggggaacgagatgagtaacttttatataaagttctaagtgaccttatgcaatccgatgtttagatcggatgatatagaaatgagaagcggtagggattgaagccaaacggctttgaaaacccgtttgtgatgagctctaatggattgagatggtttgcttgcattgtacctaatatcaaagatgtgaatcatgggatctgcagagccagatgtaatgtataagccatcaggagaccatgactgatttatcagagctgattgagattcactgctttcttgcttccacccaaaagcatggatttctgtttgtctcagtctgatgtcaaacagacgaagctgcctctccagagtcctatcataagccaatcatgtcaatataccataacaggaacaaaggctgcataattgagtttagtccacataccacattgctcaaactataagcaaaaactctttctcagcatatatatataagcaaacaccataacagtttacataccacacattattcatttcaatatagttgttttcttgagcactataatgactggttaacaaataatggcacatcaaaacttaagggtcagaaaaaaaaaataccaagatagtacatattatatgaatcactatttatgtacagtgttgatacaaaaacgaatcaagaaactattaaaacaaactaagacataactaactttaacaactaacagcaaagtgctatttatctatactaacacatattattatgaaaagaaagtagagacaaaaagagatattctcacccagcatgaaccatgaatagattaaagtcacatggatttggcaacacactcatgcatttactttctatctgatgcttgaactctgctcttcccacattagcatcaaagccaataattctcttgtccgccccaacagatagtacaatatgcttctgttgcatcccggcaactcccattacagcagacgaatgaaaattcctgtgcaatggctttgacttccaaatattgtcatctttctcttcccatagcataacagcatgatcactaccgccagtaacaaactgagaattttcccatggcatgaaaattatactattgataatacccttcacatgaggcttatcatccaaaaatgtgacgcgcgccttctgtcaatatcaaaacaaaaagacaatagatagtttgtcttgttaaataaaaggaaacacaaattctagaaatttttatgtttttgtctgggtaatatttattccacttccacaaatgaactcaaataataaaagaggcctagtctaggccttaccccttgtgttctattcaaatctagcacagatatctgagaatctccatcatcggcactatatgcagaaaataaactagttccatccgggtgccaagctatatcttctggccatctccttcgtttttgggatgcacaatcagtagtactaagcagagatgcacctgaactgcactcagtaaagtacagggacagaacatattaagcaaaagagtatatgacctgaaataagacaaaccagcagataaaatagacaagttcattcctatatctcatttaactcaagttttaaattattacaaaaataactatatgcaaatttagaaagaaaaaagcttatcaagaagtaagagactttaccccctggcttgcacttgccaaaaactgactgctccatccaaagcactgtaaacatttaaaacacagcacaaaattaagttcccaagaaattattaattattgagagtaaaagttattataataagaaataaaagacttgcagattcaaacacaaagagataagcatgagaattttgaaaacactgaactttccaaaaccagatgacagatgacagttgctacaatgttatataaaaatactgatgatagaaaattgatccaaatgaagcacatttgtcagtctcaaacctatttttcaatgctcactgtatgaataataacttcagagatgcttttattactcctaaaagtataattattatttaagcattgttgttcttgttatgattccatatttctgttaatactaagatagaaactagttatcaaaaatattctatgttaaaagaaaggaagaagaagaagaaattttaatgaagttagatagctgcttcttttccctttttattctttaattttttattttttgaaaaacggaaaaggatcacttatcttaaactgacccccacccaagtttattgagtatccacacttaaggcggaggaaaaccatggttattggttacagagaaatatagaaaacaaaattatattctcttaaaacttaaaacaactaccccattggataaaacaattttcctttttatttttaagcattaaaatgaatttaaaataagtagacatcctaatgaaaatagaagttgttttatccaatgggggagttatatcataactatgtactaagcatttacaatgatctaaaattaaattgtaatcgagacatgctctttgactatagttttaattccatatcatacataagccaaattaataatggagctatgatcatcatcgtatcacttcctcttgcccacactctatttaataataaagaggtaaccatttgcatctagatgaggtactaattaacctgagtttagacatcaaaatttgctctaaacacatcatagtcaaccaaattggtacacaaaaatctttcaaaccataatagcctgtgacacaaatttattcataaaaaaacatgataattaccttgttacaaaaagctgatcatttactggacataaagcaagagctctcaattttctcttgtgctgacttgagatgtgattgctagtgtcacaccgaataatgcatggtttagagctattacgtaccaacggaatcaattctttatgctccttctgttctggaatatagaaaaaaatttaattaaaaaaatccaacaaaagaatataatagaatagaatatgacataaggttaacagaaaatgaaaagatgtcagtaattcgactcaagaggtacacattcaagaaactaaatgggagaaacactgaggcaaaacaataagactcttaccaaattttcttttagtccctttctccttctcatgggttttagtagtttcccgttcagaatatattcttgaagatttgtctccttttgctttgacagcactgttggagagattggagacagatgaactggcttgcacagtggagctacgtgaagttttagagcctgatgacactaaaggttgggaagtttttggagtaacagcaggaattaaaagttctggtttagattgtaattgttttctagaagaattttcattattccgaactggacttgatgatctgcgctccactttcacacttttggttccattatcaactattgatttagattgaagttgtttgctggagctttcattttgatgagaaggactaactgatcggcgctccatcttaatacttttatgtccgttatctgcatttttcttagatgacactgaacctcggagacgagccaacttagtttctgaatcaagcaaccttttctctgcttcttcaagctgtagagattttaaagtactattagcttacagaatccttacaaagggcctaaccaatgtatggaacaatctacatggataacatcccaaaggaattaaaataaataataaaaaacctaatactttaatttaacgtataagctcatttaattagtatcccaaaccaataaaattagatacaatcaaatcatgtttgggaagagtttcaccaaaagttcaaatcatttattgtatcaaaaattcataaaagatactatatagaatcataagtgacatatacatacaaatgatgaaattatacaaaaataaaacgaaaatttacgagaaagagtaggataaggttgtccttaagagtaggaatgttgcaaactacagctaaaagagcaaaaaaaagttactaaacacaaccaaacaaagcatttttttttagccaagagtagctaaggaaactgggggaaaacaaaattctgttgctagtgaaacccaaagaaaagctagaaacttaatttatttatttttcttgcaaaaaaatcacatccaactttttgcttcagagatggtgatttctttccaaccaaatgacacttgaagttgctataaccacacagcttcacataacagatgctaccttagacttgccaaaaccaatagtcttctcaaatcattaacacccccatatctttagaaagaaacccccaagcaaactctgcttcatctacaaaaccatatatttctggccactctacagtgcagacactattattcagtgtctcactacttccttgcacatcacacaccgcaagggaaattgactaaggtggggtttttctttgtaccaattcacaagaataaatcctcctaagattaacccgtcaacaaaaccttaattctcttagtaaggtggattcttttttctttgaaccaattcacaagtataaatctttctaagattaaccagtcaacaaaaaccttaattctcccgggaacatgtgatttccatatatatgtatacatagatatagatatatatttgaaaagttctcgaaaaaaagtaagatactcaaaatctgccaaagcatgaaaatgattttagccaggatagattcctgaatttcaaaccaggaaagaagcagcaacaaataaattttctaaaatgttttaataaagaaattggatcctccattgctgaatcatttcaattccgtctgacattaaattctaagaagatgaatatcaacagaattctaagtgagcagacaatggagatatttccataagtatcgttctagaaacgaactgaattccccagccctatagtattaccccatttagcaaatagaggaaaaatcattaaagttaaaccctgaattgactatatcccaagcaacgaagtggtttctcctttcattgtcaaaaccatccgcctaatgttgtcacaggcaacattatcagccaatgaagcaagcaactaacttttcagaaggttgaatcctagtattttcaaaaaagaagaaaccttcatttctcaaaacaaaattctaaacaagcttgccggaagagtaatacggattcgtacacacacacacatacacaaatatatattatataaaaggtagtgtggagattgaagatggattagctaaggacctgagattggtaataggagaggcggttgcggagatgttgaacttcgcgtgtacgatggtcgatgagagcgaccaaggcctcctcctgctctagacgctctagatgagtgtcgctgctatctccgttgtccgccattgttacttacttcttcattttcgtttttccttcttcttcttcttcttcttcttcgtgtcgttctattctgctcaatatgatgattatgaataagagaaagggaccgcccaaagattcttcgtatgccaaaccaaatgaaagaaaacccaaattgtaaaaactaactcctctcctctctaacccaatttgtaagaacgaacccatctgtctttttaattttattattattataattattattatttattaatttattttctctaaaggaaatgttttagtggtgaatttaaattggagttttatttgtaaaaattataaatacatctcaattaaataataccatcacagaaaa

SEQ ID NO: 185880 - DNA, 6898 bp, Cannabis indica
ttaggaggtgctgtttttctcaaacaaaaaaaaaaaaaaaagtttttctatcatatattataggatataatatgaaattcaaaagtgagctggggtaaggtagagaggtttgattccaaaacaattctacttttagcatatactactttgattttcactcgaatatttgaaatattaattaaatatatattcatttggaagtatgtagtgctatcagtactgttgctatgtttacatgataatgctatatatgcattagttgatttccatatatgttgcatttgggcaagtgcactattacctgcaaggaagggaagttgctacctgccactattaattaataataaaaactaaagagagagaacgagagagcaaaaccaaattattttcaatatcttatatatacacgtaagtagtagttatttgttgttgttgttttttattaaaaggcacatttcatattataggacttgattataattatttttcaataacaacacttataaacaacctatatatgctgatattgaagtgtcaaaagcacaaggggtatcatattttagtgtcttttaatagggattcgcactttttaattttaattaacaatatgaaaaacggtaaaataattataagctcacatcagtgttgtgttgtgtatcttcatagtatataataatccttgtgatattattatgagattatttcataaatacataaaaataataaaaaagaaattacaaaaatatgatttaatggaattttaaatatttttacgatttttttaattttatttacagaaaaaaacgctatttttatgttatagtctttttaatttgttattaattttttgttatctatatgttattgtttgttgttgttttgatattattaaaaaatagtatcttatataattatttctattattattataattaaaatttcagttgcttagttgcttacccaattgttctttttcttcttttgaaaatggattgcccaattggtcttcccacatctcactctttcggccaaaccaaaagcaagtatgggtgttaattttctttatcctattcctactaataagacatgactttccatttagtagggtatagtaattttacgctaaacccacaaataaatacaatactatattaataatacttaacaagtttgaaatcaagggatgattattaatattaatttaatttgaaaagaaaatggattcagcttttgagaaaattaaaagaaagtgaaagcacaaacattccatcctatcctactaataataaaaagaaaaacaccagggcataagatatagagaagaaaaataataattaatatatataagacttatataagaatgacattacaaacaaaactcagagtcacaactcacaactctgcccatttcaaagtttttgaaaattttggcaaaagtgcaaacgaaagaatgattctgttttttctttaccttttttttttgaatctaatcctgtggtcatataaaaaccctctttctgctagtgctaataaccaacccccattataccactcataaataacttctagccttccccacgttacagtctccgaaatgtaatacatacattaaaatcctttccctcctcttcttcttctctacagttctctacttctatacctccattactgattttcataaatttcctctttctttttttcttttccatttctttttaaagggtgttattgcctcactcttcagtagcagagcaaatctagctctctcacacttcttcttcttcttcaacaatggcttcttcttctctttctttcctttgttctctctgtctcattagctcactagtcttagcttcttcttctactactactgataggaaaaccttcatagttcaagtccaaagacaggccaagccttctattttcccaacccacaagaactggtacgagtcttctctggccactcttgcctcttcttctagtgaaaagacctcgacttttgacaatgctgtcatacacacttacgagaacgtctttcatggcttctctgcaaagctttcaccttccgaggcttctaagcttgaatcacttccccatgtccttgccgttattcccgaacaggtacggtacgtgcaaaccacgcgctcccctgagtttctcggcttgaagactaccggcagtgctggacttctgaaagagtctgactttgggtctgaccttgtgattggggttatagacacaggaatctggcctgagaggaagagcttcaacgaccgtgacctgggtccagttccttccaagtggaaaggccagtgcatcgcagggaaggactttccggcgacttcttgtaaccgcaagctcatcggagcgagatacttctgcgacggttacgagtccactaatggtaaaatgaacgacaccacagagttacgctcacctagagactccgatggccatggaacacacaccgcctcaatcgccgccggaaggtatgttttccctgcctcaacccttggatatgctcgtggagtcgccgccggcatggctcccaaagctcgcctagcaacctacaaggtctgctggaacgccggctgctacgactctgatattctggctgcattcgacgccgccgtcgcagatggtgttgacgtcatctccctcagtgtcggcggtgtcgtcgttccttactacctcgactccattgccatgggggctttcggagccgctgacgctggcgtcttcgtctcagcttctgccggtaatggcggccccggtggactcaccgtcacaaatgttgccccctgggttaccactgtcggtgctggtacgatggacagagattttccggcggacgttaagctcggtaatggtagaacgattcctggtgtgagtgtgtatggtgggccgggtcttacaccgggtaaaatgtacccgttattgtatgccggaaacgtaggtggtgatgggtactcttcttctttatgcttggaaggttctttggaccccaaattggtaaagggaaagatagtactctgcgataggggaatcaattccagagctgccaaaggggaagtagttcaaaaatcaggcggaatcggaatgattcttgctaatgttgtatccgatggggaagggttagtcgcagattgccacgtgttgcctgccacttcagtcggtgcttcagccggtgacgagattcgcaagtacattacatcatcatcaaagtcacaatctccacccactgccacaattatattcaaaggaactaagctaggagtgaggcctgcgccggtggttgcgtcattctccgctcgtgggcccaatccagagtcgccggagattctaaaaccagatgtgatagcacctggggttaacattctcgcggcttggcccgatcgagttggtccatcgggtattacttctgataagcggagaacagagttcaacatactttcagggacttcaatggcgtgcccacatgtctctggcttggccgcattgcttaaagctgctcaccctgattggagcccagcggctataaggtcagctctaatgactactgcttatacagtggacaacaggggagagaccatgttggatgaatcaacagggaatagctcaacagttttagaattcgggtcgggccacgttcacccagaaaaggcaatggatcctggattggtttacgacataacatcttatgattacatagatttcttatgcaattccaattacaccactaagaacattcaagtaatcactaggaaaaatgcggattgtagaggggctaagaaggcaggccatgctgggaacctcaattacccttccttagctgttgtgtttcagcaatatgggaagcacaagatgtcaactcatttcattcggactgtgaccaacgtgggcgagcctaactcagtctaccgtgtcacggtcagaccgccgagtggcactctggttacagtgcagccagataagcttgtgtttaggagggttggtcagaagttgaacttccttgttagagttgaagccacggcagtgaagctttcagcaggaagctcagatgtgaagagtggctctatagtttggtctgatggaattcacaaagtcacaagtcccttagttgtgactatgcaacaacctttctaagtctttgtggtgttgttttaggattttggttggaggggttttaggaattttgagtctctactccttagtacttgctttgttgtagaattataagttaatttctttgctccttataatgtataatgagaggatgttcttttttatttttacaaggttcagttttcagctccagaaaactagtgggggtttgtttgtaatgcacagtcaagaaagaaaaggcaatattttctgatattatgtaagattttaaggaagaaataatatgtttgtagaaaagttctgtgttttggtgtaaaagatgctgatgatgaaaacgtaatctgtttctttcattttatattcagaaatctagaacttatcaagtactccttctccttggtcaatatttttctaatccaagtatctgaacttaagctaactgctttgtaaccaagacactgtgataatgacagtcataaggacaacaatcatgtggggttactagtttcttgttatgctgtggggttactacttgatccggtaacccaagaaatcacactgccccacaaccaaattaatacaaaagaactaaataaagaatttattaatttgtgtagcccatatgccttcctggttaattagtcattttgtcactactttgctaaatttgatcatatccttagtattttagggtatgataggttctgaaaaccagactatgcatgcttttctgatttcaatatttattatttagtaagcgcccctaaaatgatgccattttaataagattctgagaaaagttggtcttttctgcctgacacctgaaaatgaagcattatcaatgtcctttgtttcagaatgcaatgcaattcaatcggtggatactaaaagccacttgagagtggagatggaattgcttgacaatatgagttatgggatattttcattaaacaatacaactttgcaaatctttcaactgcctttaattcagttaccagctgaatcttctttagtactttaaaatgttaacctacaaacttcgctgaagctcagttaataactcgaatattacaaattaatctttctataaatcatgtccaaaaacatgtgtgtctagaaaaagatatttcatgctatgtaattacagaaagttaaaatagtaccactctagtctctaggactagtttgtcctctgcatctattttttgttggactcacatgtgaccaatattaatagtccatatttgcttgcttaattcattttctaaaaagagaaaaatcagggctcaggtcctttatagatggctttaaatttaaacctttactttttcatttgatccagctaattttgagccacaaacatattccagtattccaccagctgaattatatacagtaagtttgtcacagaagttgggccaaattaggaccaataaaggccttttctattctgtctttctttcctgtgccaccaattagtgtatattcgtcagcatatctatatgggcctaaactaggccacatataacaagttgagtatcacttgtccttatctgtagatatttagttttcttcttaccaattggatttctatctaagataataaactcatatcaacatttaatacaaaaatccaaatacggggaaaatgatcagataaagtaatctgaaaatagcttttgacaatttcaaatggacagagagagagagagagagaaatagagtatagtattgcatgaagagactcgtgaagttccatcttgtctaaactgtgataacactactctctagagactagagggcttgtcacaaaatgagtcgttcttttagaatctttcttttggtttctcatatcattgaacaagctcaggcctcaagaaatcacacatgtcgtagtaaaagattaaattaggcccaaataagtgaagtgatttgaatgattaatgatatgtgggataaaatataaagccaaatatagtagatagatgaaatcaaagcagcccaccttataatccaaggtcacttatttgtccaatagtgatattgtacagattgcgtactacagtagccagagatttcgacgatccctatataaatatatatatatatatatatatgatatatgagtatgaatgatcttcagtaatagcgtcattttcatcaaaaccatacatactgggtccacaatccaaatcagttgtattaaaatcacctaagatgcactattcaaccaaaagggaaaatagatattgggtggtcctaactcctaatcttgggattttaacacttcaaaagctcttaactgcgatttagtattgaaataaagatgtggaccttatatatggaacatcataacaatcgtgttatagcagttaagtatacacctatctatattgctttaattattgacaagaaaaatacataataaattagaagcaacgtttatgaacagtgtattgaagataaaatattgcaaatagattgtgccagttgtcttcacatttctatccactaaaaaaagaaattgtttaattactcaagttgtattataaaacaaatacacctatccaccttactcttttctttttcttcttcttattcagggtatttttttttttaaaaaaaaaaaagaaaaacaattgctaatcatttcctcattgagcttgagaccgacatggaaactcaatttattgggtaattatgattttatttaagtcatctcttattttggtgaaatggaaggagaatatagatgatgtagtcttaataaagg

SEQ ID NO: 185881 - DNA, 3712 bp, Cannabis indica
tacctgtttgggagacttgtacagcatttcttggctcgaggattggtatacaaatatatttatatacatattatgttttatgtatatgcattttaattttttactggtagtgattcggtttcaatttcatcatcaatattatttgatgtgttttaattggtttatatatatatgtacagtgatatgaacgatgtaggcagcgaaactttgcaacagcaatacgaatcggtagttaaaattcataaatttgggtcctcggttgttaattatttccaacatataatacattattatgtcgtaattaaagatttacataaacatgttatgtctattagatgatatatattataaactatatctttaggttcgaaaaagaacattggaaggaaccgtattcaatggaagttctcatgttatgcaatatggagatatgagttttagtgggagtgtcctctctgtttacttgggtgacaatccttctcctcctactactactactaaatcatcttcaaatgttgtacctcaacgtgatgctgctctagttcatcttcaccacaaggttttatctatctcaaacatctcaatcccattcaatcatatcctctctactctctctctctctatatatatatatatatatattatatagtttcatttatttatcagtgaattttagttgtacatgtgttgtagatccgaaaatcagatgtcaattctgaggagtatctcctagctaagaagaagttgagtgaagaactggctcatagagagcatgttgactatagtataaatcaaattggaaagctcttgttgggacatcatgatcatcaaaatggctttaagaaccttcgatcttcagggcaacctcttgttgatgattgggactgtctcaaaactcttgtaatttgtccaatcactttcaacatatatatcataaaaatactttaatcctcatcatcacattattatttgattataataattttgaatcgtattattggatttggttgtgcaggtgaagacttatgagaagtactgtggatctttatcaacctatggattgaaatacacaggggaaattgctaacgcctgcaatgctggaatcactgtagatcaatttgctgcagcatctattcaaacttgctcataagaaacatcatatatgattaatgatttctctctttctttatattattatgcccgtgtttatcctttttcttgtttattcaaatttgaagcattgtaataataatactactcaataaccatgcaccactactagtagtactgatctggacaattgtttatgtcattatatatatgtatgtatctctatctatatcacaatcacacataacagaaaccatgtaataaagaaaattacttaataagaagatacttcctttatggtacatcacaacctaatatcacagtttaagaaataaactacatttaagtactcctattaacttaattattcatgcatgataagtactactaagttcattcacactcacctacctcagtcgtctcttcttgaaaactttggcttttcttcccacatttttcactttactagactgaaaatgtcttgaacctcttcctaatctacgagacctttccttaaacacatccaaagaaacttctctactcttcaaattaacatggtggtggcgctggcggtgtctacttgaactactaaaggagttgttctccaatagctctcttcttccccttttagcagagtagttgttcttcttaataaggtcattgtccaaatggtgattactatatctagaagaggagtcagtctcatcatcacttgtacggtatccttgttctatgtcatgaaaacgacggcgctgcaaccgcctgcgcctgcggcggcgacggtttactctcttggtgttgattagcttgtgccacaaaaaacaggttatatcttcgagggcaaaccaatatgcctcacaagcagcccaacacatcttacaaagactttttactatgcattggcaaatcccaatcttgaataataggtagaagaacaataaagctggaagcagataaaaacagaacaacaattttacaagcaaaagaatttcaatcaacaagaataaaagaaagagtttcaaaagaaaattacttactgatgtagcatagaatcaaaatcaataaaagtcttaacagatttgagacacataaatgctcaatgaaacaaaccacatcccatggtccagaacagatgtccctgcatatgcaaacatcttaaagttcattataaattgagaatatatgaaaagaaaaggaaaacccctttctaatcaaatcatttatgggtattttgatcctgaattatctgattcattgataacttccattatagcaaaaatcattaaatagaaaataaaagaaagaacatttacttactcgcatgaatgaccgaaaacggtcttaaagggggcagtaatggcgctccctaaaagacctccaacaccattggcagcgtgactaatcacacttcccattgtaataatatcaacaacaacacttcaactactctcccatttcttatcccattcgaattggaaattggaatgcctttcgcaaactgtaaatcttcgaagaaataattcatttagaatgaaaagaaaaaagcacgatcgaattgaatgtttctacttttcgaattcgattaaatttttgtttcaaatgatgatacgtgtgaaatagtgagtaatcaatattgacaaaacaaacatacctaggtgtccattgtatttcctttttattttcccaaatcaatcaaactgtattatatatattttcccaaatcaatcaaactgaactgtattatatattatatagtctgtgcgtcggtaaagaggaatgcaaacacatctcactcatctacttttttacccaatcaatcaactgtgtaattgaatgtgttcctatttaatatatttttattttgccaaaactgcttgtcctgtcccttttgtgtttttaaatatatgattatataaaagaatgatttatggcaaataattaaactattatttgatttattttaattgaaaaggaaagtaataatgattgtaagtgaaatatcctgatgataacgatttaaatttaacatcgactatatgtgaaatacaggataacaattttaaaatcataggtaattatcttttttcttacatttttattttgtgtgatcagcattcttttatttttaatcatttctttattataacatttgaagacatttctttgattgttttttacttttagataaatatttgtatgatgatttttctttagagttttatggtagattttttttttaatattatattctttataacctcaaaaaaatactctatacattaaaataatttatgatgtatatgtatacaaattcaaaataataagaaaataagtcaaataaggcttgtaattaaatttaataaattaatagatttttttaagtatattaccttttatttactatctattgacggtaagaactcatcaacgatattatagcaaaaaaccttgagtaatgattgataaaaatggtgtagtaatattaatgtaaaaatataagagagtgtgagtaagggagaagatgtgaaatgcttttattaagaaaattgtctcttaatgttacaagattccaacctcggtggtccttataggtggtccctat

SEQ ID NO: 185882 - DNA, 5007 bp, Cannabis indica
aagtgctttagtgcaaactccctttgacatgtgtatcttggatctgttttgcgcaaaacaccatgtccaaatccaggaacaacctgcattttattaaagacaaaaacacatggaagaataagagttatagaataatactgaacaagaggacatagttttacaggcccaaatcatcaagcgaataactgcatacatgatgaatgaaagattttgtttatttctttttatttattgttttccttaaataacataaaattgcttatcaatcttaagtgacctgctcggcgctaggggtgttgtctcttatcactaaatcaaataatagacaaacttcaaacatttcatgcaaaaagtaactgaacatgaatcactatcattacctttccgctattcaatgttttccatacatattctttcaactgttctttggttatgttctctccgcattcatctaccacagatttgatccaaagtaaaacttcctgcaaccaaaaattgttcaaattcaagagtagaggaaaaggaatgaaggactgcaagattggtgggggattaccaactaaaacataaactgccaaataaatgaacaaaaacaagctaaaaataatcacaacacatttcgtcattgataatataacatatttgactacccctcttggattctgtcctatgtatatataataacaaaatgtagaggttcgagatattacagaatttgatcatttatccgagttaaatttgattatgtaaagcatgtgacaaagttgcaatgaaacaattaaataacaagatagcagttcaatcgtatcaccactacaaagcttaaggagaccaactaatgtgtatatgcaataattgtctcaataaaaaatgcatataaacagcatggaagtggccaacatcatcacagaatagaagaaaaataaaaaataaaaaacatttttaatttactatgaatgaatggaacaacaacaactgatgagttttagcagtactaaacagaatgctttcaaatctaatagatagatggcagttgaaaactctatgcaatacctgatttgccaaaccatggagtggcccagccaaaccatttaatgcagctccaaatgaaaggtaaggatccgaaagggcactcgcaacctgtatttgaaagataccgtcaaggaagaaaaactaattaaaaattagcccaacaaatagataaataatattccaaaaccgcactacttcaccgcttaatgagaaattcagttatagttatgagttaatcatttctttcaacactgcacaatggttaactgaggccattcaaatcctgttgagagctgagaataccttgaatgtaagtccatttgcacttactttaatggagcgtattttgaaatgtcacaggcatatttctgaataaaataaagataaatgagattataggcatattaccgtgccagaagatggtgtattcagaagggtaagaggtatcgtaggaattgaacaagaaccaaaaaagaagttgaatggtaatgattaagatgaagtgttacaaaggaaacacagaagcaatgctttcaatcagatggcaacaatgcaaaaggaaacaagaaagagaagttttcttcaaagtcagcacggagaaagaatcagtacaccataatcagaattcttggaggaggacaggtgatttctcttagttaccagcaaaacatggaggaatcctaatataaggttttggaacaatcaaccttcaaagaagcaacttaagctatggtgctgtacatttatcatgctttaaatctactaagtgagcagaatctcggatttatgaagtaggcggatgctcgagtttcaagttgacagggctttaaatttatgaagaaactatcatttgtgaagcaacagcttaagttatggagctttcagttatgaagacgagcgagttggagcattagattgaaagaggaaagagaagttgaaatgagatttgcaaaagttgacctaacagagtttaacggaagtacttgttaaatttgcaaaggatggtctcatacacatggaataacaaaggaaacttatggtgtttaatcccaaaaaagaaaaaaccctgcaaagttagagattttagaccaattattttggtgacaaacttatagaagaatacatctaaatcgatgtcattgaggttgagagaagcacgtagtaagaccatgggtgaaacaagaaatgcatttgttgcaacaaggcagatttaagatgtatctttgattgctaactagtagagcattgtcataagaagaagggagttacttcaaagtggatttaggaaaagcatatgatctttgttgagttttgaattttgtattagataattacataccgaggatttggaggaagtggatataggggtgtttagtctcagtttcatactcattttttctgaatagaagactgaggggtaaatttaaaggttcacatggatccttttgtctacttttttgtttactttaaggggagattagtaaataaagccaaggaagtagatgttttttacatggctttggagtaggaagagaaaatagaagtaaaacatttaaaaattttgaatagatgattcgccgttctttttagagggatcaaagagactgcataatttaataaaaatcttttttagcctttgttagcgcatggcttccactttcccacgttgaaaatgtttgagaatagtgaactatttataaaaaacatgagtctctccagtaattaccaattggttttaaaagagatcccatgattctaaatataggatcggagcttcttaactcttgtagacattatttaatccaaacctgtccaaatattgagccaaaatagtcatttatgatttaggccaaaagagtctcttgcgttgagccactcatgattggtgagcacaaattagccaattaagaggatgttcgagtatggtgttccacaatgaaaatatttgagaatactgaaatatttataagtatcatgggtcactccaccaaacaccttgtgattcctaacagccttaaaagcaacttatggggtctgaatctgggcaaggcatggtttttcccaaggcaaattatattaggtgggcagttggtaccatagccttgaatttttagggtatactattggaagataatccaagaagagagttttggtgaaccaaatattagtaaattctctaaaagattaatctaaaggaggtaggcatactttcattcactttgttttatcctaaaaagtggtcccacaactgggtagcaatatgataaggagtcccacaaagagctcttgagtaggatgtcctttacaaaatgaaatggcagatttgttcagtttcgggaagaaagttggctaggatatgagattttattgtgtggatttcctaatttggctgaagttctctaaaagaaatagttgcatctctaattttcaggaatatgatgaagataatgataagttccgctgtctgtcatcaaggaacaaaagaatttttgaaaaagagagagctcgaactgattattgcatgtgggttcataatgtaaaggaatttaaagatattcctttctcgaattcataagtcctttcttttcctttgtaattttatataaatttctgtgtatagtttttgaagtttttggtagttgttctacaatttacttgctttaagtaaagctttgtttagtaatacaagtacttaagttccaaaagaaatacattctgcctataagggcatagagtagggaaaagaaaacttcatttttacattaaaatgcttagagcaggaggataacttacaaggtggcctgtgtgtgcactaacattcccaccttcatgatcactgtaacatattgcaagtagatgttaagaaaaactgtcagcctgtctctagttgccatccttaactggtgaagactaaaagttaattaagactcagtccgacattacaatgttacataattatgatcttagggaaagattataatacaaacctgtgaatggtaacataaagtctcataagctcgagcatcttaggatcatcaaaacccagcatgtgtgaaaaatttccaccatagtccagagagtcatctaggggaataatttttccatccttataaatcctaaataaaggaatcaaaagtgatcaaatcccgatacatcaggagatatttcaacataagcccatgcataatacgtgtgtatcaacgttaaatgcaagagaaatgataagcacaatggacagaagattttttacaactaaattataatgaagacaaaagaaaatcacatgcacattgtataaacatgcacttcttacactagtaaacacctaaaatagtttgatactcaaacatttgatgatgtaaaagcatctgcgctaatcaatgactaactgcaaagtgtcactgggatattaatattatatttgatacacttcactgaccttcgataaacgtaagcagctactaaaggaactcgagcaatcaaattaagtgagtcctcgtaggtaggttcccagtacctaagaaatatttaaaaatatttaaacatgtcaaaatcatagttgactgggttgaaaaaatcatagcaatgcaaagaagctcactttgatttatggatacccttctcatatgccttctgaaattcgctctcaacctgaattgcagacaaagtaccaggtagtatcaattagaagtagagctactcctatgaaatgaatagaaccaaacaaacaataacaaagcatcaacatgtgaaaaggaatttctttctgtcaagacagtaagaattaagttgctggataatccaactcctctggatttctttattgaattaaaatacactttccaagctttcgacaggcttggtttatcctatgtgacctaagtaaaacaattctctagacagcctttcccctaacaagtactagctatttatacaatctgcaactagcttataagaaaggaagatcacctcgaa

SEQ ID NO: 185883 - DNA, 4641 bp, Cannabis indica
aagttgtattatttaatacatatgtaacaaatgattcgtattataatatctacaaaggatctagggtcaaccccaatctcttcgacccagattggacacgggcttggaccgaactggactaagaccctggacccgacccagagttggtgttggggtcgagtttataaaaaatatattataattttacacaatttattgatataagtcaataccaaatataatattgtattaaataatactaagataatataatacaatacaatctaacacaatatacaatacaatacacgtaacaaacgagttctatattatttatttgttgtattttttggatcgtcttgtgccatcttcttttgttgtatgcttgttcattgttgtgtaaaactacatatctatgactatgagatcactcataattcattgttggtcggacttagcatgtgagagacatgtaatattgtgttgcttgcccgtagccccaattttaagctgatttgctagtttgaaatgacacagaatattgcacctacagtctatttttttttttagttgtagcataatagtattttacaatttattaatagcttataatataaaggtcttggattcgaacacatcacctttctatttttctcatctttccctcaccattaagctagccttagtagcttaacaggtatagtctattattaggaagtcgaaatcatcagttcgtgacatagagcatgacattttttatgtgaacgattgtacaaatatatgcatgattctcaaatagtttcacagcttatttcttaataatgtttagtaaaaagtgaacaaaatataaatacttctaagagttattcaatcaaactgatattctgtattggaatcatttcaatattataaaaatattaattttttatattcaatttaactgtaaatactagcagcgaaactttttatttttaacttattcgttaaggtttttaagaagtgtgataaggtgtagcaggctttacataataatcaaataattacataaaataaataaagtgtgtgtgcttaattcaatataagtatagtttaaatttaaatttgttcaataaaattttatggatcaaagtgtctttaattatataaattttaaattagaatttaattatttaaatatgatcaatttagttaaattgataaaattttattaattaattttaattttaaggtaataagtatgcacaatttcaaaatacaaataagtattattaaaaatattaagtaccatacttgttttctaaaagaatacaaaatattaaatgaggatattccataaaatgaaatagttataactaaagttatttgacacaataattattatttaatattatcaaattcataataaatcacaaacaacataacaccttgttgttgaaatcaaaatgtttttagctacatttttattaagttataatattttcagaaaactaaaattaatttgatttacaagtatttatgaatacatgatacattattagctaagaagccttattgctattgctataaatttccacaacatgatcatatggtctaaacacaactctttttttttccctttccaaaacttagtacctaaaaagtgcaaatcaaaagggtaaaaagaatagcaagaaaccaggtcaaacaaagatataattgtgtatgacaatttgagaatgagaaagaagtgatgagacaaagatgatgattatgtaattttaaggtacaaattcagtcatgaatgaatatgtgaaaaaatataagaaaatcaagttcgaaagaaaagtgttaaggaagaaggtcattaagggaagagaaagcagtcgagatattggcacggctcaatcaaataaagatgaccccaatttttaggggagatttgatttgattgaaccattccaatatcccaccatttttatccaaacacaaaaatatgaaatttagtaaccaaaacttgggaaccaaacaaatttacctctttgcttggtatttctattctgtctcagcacttagtatttcccattctttcctttgatgtgtgcctaaatagtatagcaagttgaattgaagcatgtatgaacaagaagaataaaggaatcattgaaaataagggccttgttgtatatatatatttatatagttggtgtgagaaggggagaggggtgtttggcatataagaaaatgaaggtgaaaagttggaataatggaggaaatggttgagatgtcaatgtcttcatttcacttgtaagacccaaaaaattatataatagaaaggaaaaaaaatgattggcctttttctcaatgcataatgggttcatcacattgttaagaaatgcataagaaggttcctcatggatttggagttgcctttttccattttcaactatggttgtttttattatctttgacatcttctttcattacttaaaacccaatcgaagtatctgttaaaactcaagtttatctctcttaagtgggtagtttttggatcaatataagttacaccaaacacatgatgaaatgggtaatttgttttcattatatgattggtgcttttgtcaaaataatacataaaacaatacccttatgttattaacctatatatatctaaggtcatcacatcacattaccaaaaaagtttgttcaaaaggcttttgaatgaaccataatatacttatctagaattgtgttttgcaagaaatccaacaacaaattacaccaaaaataataaattatgcctcaattatgtgtagattttccaagtggtgcaacctcccctctttaagtggctcctcaatatctccactaaaaacacaaagaaaccaaagattcggtagctagagaataaagaatacctaacttcttgtccttcttgcttgacaatatagtgcacattgtattaccaaattagatatatttatatgtattggacttggttttgcccattatgatattaaaaactatgtattgcccttaaagatttcctatagatgttaatatgaattgcaagtaagattttctcactaacatatattgtggaactaccaccaagtagtttgtattaacatgtattactacaaataattctgaggctttttgggcaaaacaactcctccaatagcacaataaggattttttcatagaagtaggtaaggggcaagcaaagactagagatatcaaaaatctagtgggtggaattattattattattattacattttcaccaactttaagaatctatgatctcagtccaaccatgtacatggtcagagtccaacaacaacgatacaagacaccattgttagagaatatgcttttattatagtaatcacaatttacttatggataatatatatcagctgttttggggttgtcaatatagaatcttatctgccatctcagccatttatggaacaaagaaaataacccacataggctactcaaatcaagtttctcaatcataccatgcaataaaaaggggaaaaaacaccaatgatcttttttatgtaaagcaaattttttatgcatgaaccccaattatgagcttgtcaagaaaattccacataggtgataggtgcctttctcagtaacaagtgtatcattcgaaataaatctttcaatggcctgaagaaaaacaatcaaatacaaagagagaactctcaaaaagctttgctctatgtcttggagctgcttatttccttacaaggaacacctcccaactaaaagatacatgtaaaaatgacaattaaatataaagacttttatcaaatagtgatgcccaatgacttcttaaacttttcaacctccaaatatgctgtggagtaaggaaggaactccatgaaatgttctttgctcagatcattgattgctacagcaagtttcgggatctctaaggtctcttcatgggaaagagttcggacaaaccttgcaggatttccagcccaaagttcgccagttggaattcgtctccctgggggaaccacggatccagcctccaagatagagtgagtctccaccaacgaaccttccatgagaatagagtgctgcccaataatgcactccggttcaattgtgcaagaacgcaagagactgtatgcaccgattgtcacaaacctctcaataaatgtctctgctggaaggcctagaattggaaagttgcataaactgaaaattattagccaaacaaagaaggcgccaaacatggccctaatccaggaatatgttagccaaactttgctggtgaaaagcaaatacaaaatctaaaaacttttgtttaataaaaactaaaacacaagtataagatacaaaagatgtgcatgtggcagagtaatcaaaggctgtctccagaaaagtaaaccatcaaaattaccggcaaaataaaatataattttggttccatgtctacaaaagttggaaaacaaaacagaaaataatttaggaaccaaaattattttattttgccgttaattttctgtgaagaatcagataatgcttcagagaaagaggtatcaagaaatataaacacaaggtaactaagattttaattcaaatttatctacgacgaagttgatgaagtgaagtttttcatttagatgattgtcaatggtaattcacacacaaaaa

SEQ ID NO: 185884 - DNA, 1023 bp, Cannabis indica
aaaacccacatgttaaaaaacatataacttgtatattctattgctaatttgctatcctgtatattctattttatttttccaatgtttcaatgttatcttgcactaatcttcgattcaacctaatggataccaaggcttgagtggacataaaaagctttgaaatgtgtgaaagcagtgaataaaaatgtgttttttttttttatttggaatgagtacaaaagagtactaattttataatatttagctgataaagtgagcttgatttcttccattttcctttaaaaacaaaaaaaaattcatcatcactgttgagttttatatgttcccattttctaacttagttaaaaaaatgttttaactcgagtggcttatttatttgatatttcggcataagctactacctacaccgttaactacttatttggcaagtgaaatgtcatgtgtatgtacagtattggctcatgtcttaaaaatcaagtaatgtttattttaattaattaataaagaaaaaaatgtaaaaaaaatgttttaaaagattttaaattaaaaataactcttttatttatcattgaaaaaattattttatttttctaaacaaaacattcattgaaaaaaaaagaaaatcgtaattttttccttgcgatggtgtcaacgaagaaggcaatggggttctgaacaagggaaccatccgaacaactaactgcgtgtgtgagagggtggagaaaaagagagaacaactgctccgttttgctctgttttggtttcttctggtatcccttgttaatattaacaagaataatttcactcttttaccttggaatgtcttcagcctttagaaaaataatgtttgtttattcaacaatgcaatgccaaaatttagaattgttctagagtgtttagatgaaagaattgagagttgtgcaaaaatatggtgggtggttgtggttgtctctttgtctcctcaacctcatgctgtttcacttgctaaatcagtagtttacaagtgtaggtagtaacaaaact

SEQ ID NO: 185885 - DNA, 2968 bp, Cannabis indica
catatggtatttggtaccataaactctacttgatcaataaaattttattagtttgaccagtatgttttcattgatatataattaaataaataaatttgaatttatcactcattaagtcaaaacattttgatcatattgaaaaaagaaattatcgatcaaattttaatacaaggtacaaaaaaatgtatgatttcaaaatataaggtattagtaagcattattgaaaatacaagatacctatgcacccatatatataagataataataataaaaaaaactatgtgataatgataatgacatgaattacctcaaagtgggttcatccacttccatgtagttcgcaagttttcctagagagatggttgaataaacatttaggaatgtacggacacctgataacaactgttgttgcttcacctcatatagaaacaattttaactgaagtctataggcatcctgcacaaacagattaaatgtgttataccacataaaatcctaaatgataaaaaaactacaaaagtaagaacaagccataatctaaatcaatcgctgactaatgtaattaacgacttttattaatgagagctaacacgagaggtatttaaagatttttatcaatgagaattggtcttttctcaaaaagataagactgaatcaactacagaaaatatcaagccctgttggttatacaagttcaagtagtgataattcatgaacaaatcaactttgaagctcaagttatcaatgataggcagaagaagattgactacagatgaatagtaaattccctaggcaattaggtacctggttgtaatttacaagcggctcctcaaaacttggggctgatggagtaataaactttgggcatgcatacgaaaaaagctcatcatagatagcaaaagcctcatcatcgtatctttgcattctaatcatcttttcaccatacttctcccttaactgagcgttaacggtttcctcaacaagctttacctggggacaaagtgagagagcaattgccaacaaggcatacatctgttcgttctttttcagtatctgctcatactgtggagatttctgatggaactgcttggttttgtaaatgtacaaaagaattttgttgaattcacgaattgcatctgtgtacctaaagaacaattattcacacataaaaacataaggacaagatttgaaaagaaaaaaatcacttccaccaaatccaaaatacatacccgtaaagggctgtttggtatgatgtaatatttttatgagaatgataatcttcaacattctcatgtttggttatgtggttttctatttaagtctggaaaaattattactgtgaaaataagtttccgtatgggtaatcttaaattcgttcaaaaaagtggattccgaacattctcttcaatcttaataacttttcacaataatttatcaagaattcttgtgttcaaccaaacaaggtaattcaattaactgtaatcaaaacaaaatattctcatgcataactaaatgcaattataagtttgcagacaatcatatcttctgctttaatattaaaattaatcatattattttgaactcctcgtactaaacgcaccctaaaagaagaaaaaaatattggactgacatacctcctcaacataagattggcaaaaccataatgataaatggtggttatgtggcttccaattacaacggtgtaaatcccatgctgagttatgtcaataggaagtaagcgtttcagaccagtatgataatcaccgagtaaacagtgaactcgaagtagtccgaccatgctaaaatatcccaacaccttcaatacattactcccaccattgtaatcgtatccatcagtagaagtaaattgttcaagtccttctttctctcgctcgagaatctgagtaatattagatttctccactagtgcttgcaagaagttgagcacaccatacacattccatgcctacacaataccataatcaacatattattagcttgccccccatcatagcatagcaaaacgataaaatttactagcatcaagaatttctagcgtggttcagttgcaattttccccaaaatcatggttctgtctttcctaagaactaaacccagtaacgaattctcctccagttctctaaagtcgtcaatcacaagcccaaattttttttctaaaagtgctcaaaactctattattgggaaaatttaataaaataacatgaaaatgttaagtaaataaagttgcaaaatgatcgttttatggtagcatagtgtaactctgagaccaagcatggttattttgctaataaaaattttcctaatgactatttttacaaaacagttctatacttgcctctcgattaagaaaaaattagtacctgatcgaactgtctcagaagctcaatctcctgttctgtcttgttcttcatcttggccctgtactggcagaagctctgaaactggtacacgaactcatccaccatatcccacagccactgattgggaagctgcatattaacgacgccatgtaacaccacttgaaacaagctaatataattgtcccaagagtcgatccgctgctttagcgtcggggtaagcctcgcgtacaaatgacggaaccacatctcgcggtagaggaggcagaagacgtggtcgttgtcgacgtaagtggatacggcgtccaccgaaggccatggagtgtccttaaagagcctctctgacaaggtttggaatgaagtctcgtacatctggtgaatctcgtatacatttttctcgcggatgtggcgataaaggtggaccacgaaggactttacagagtcaggtacgaaattagggtcataaccaaggtcctgcccagctgcagcggagtggcggtgagaaccagttgagtcttcgtagtcggcggaagcgtcctcgtagtcgtagggcgccatggctgaagctaaaggagtgggatagtactgta

SEQ ID NO: 185886 - DNA, 3978 bp, Cannabis indica
tctaattaatatttttaaacaaatataaaatggttcatctatgtatgtcttatttcctttttaactttgcccaatacttgactattaccaccaaattccaattcctaaatgaaacaaattacagaataatcacaatgacatcaacctaatattcataaactatcattaagaataatatccatagccacaacaaataagcaaattctatattatacatgacaacgtcatgatcacagcaaataataaatttcttatgcctaatgatccttatttctttatttccacaagaaatgctcttacaattgtgaggtaacctatttcttcacgttatccactcgttccatgattactgatccaatatgttcttctttttttttttttttgagaggagatccaatgtgttcttgttatagcaagtttggaccattttgttactcattttctattctttctaatttctgcaaaattagatcaaatgacatcttcctcctaaaaagattacagattagacatcattataattatacatattgttcacaggcataacgatatcaatgagcatatttgtaaaaaccattttaacatgcacagcacatcgtcataaaaaatatagttcccaaggtaaatacatactgttatgaattaataacaaccgggagcacatcaacaagtagactaaaaaaagtaacaaggtattctaaaatagtgccatggatacccattagtcaattacattgaattcttgaatgaaaatgatcactaaggcatttcattaaaatgtacttcataactaaattaaggcatttttttcaaacacctaatagatggcaggggagcaaggagctaaggacaggaataatttttgttcttatggaccgccttaccaatacaatgggaaaggtccatctcaaagctataacatattaacccaaaactgataatgtcattctagtataatgactaccttcatgtgtaagccaacgtgatctagctagtatacgtttctaactttctaggctagagttcaaactagctagctaatctttttcttaaccaatttagcataaagacgaaaaaagttgaagattatctgaggtcagtactcttgttttctagacccctttccaatcaaagaaactttaccaatattatttgtatagcatatcatgtcccttatctagcttgtcctaaaactttgaatcaataaataaaaagatcacaaataaacaatgaaatacaaaaattgtaaagcctgatgaacaataaagcccaaactaacaatctagcacactcaaacaattcatacctaaacaaagaggagatactcaaatataagcaaccaaagaaacaaatcccagcaatcaaatactccaactggaacaaagaaaagccttggaaaattaaaatttcaacagtaatgaaatagtgacctaaccttgcaaatcaacttgtcttctctttagaattaaagctcagaccccactaagctcattgtaatttgaaacctaatcaaaacacaaaatttccaaacactaataactaggtgacttcaatctttcaaaaaaaatagattgagaaatcaattttaagctctaatcacaacaagagtcaaatacacaatttcatgtaaaatctatcattttcttgaaattatattaatcaaaaaaatagatttaagaatcaagtttaagctctaatcacaacaagagtcgagcacacaatttcatataaaatctatcattttcttaaaattatattcatcaaaaacatagacttaggaatcaagtttaagctctaatcagaacaagagtcaagcacacaatttcatgtaaaatctatccattttttgagattatattcatcataatccacttcttattattgatctaatacttttgactcaaccacgctcatatgactcaacaactaaacaaaacaatgataaaaaataataataagacaaaataccctaagcaattaaatatgcatagcgtaatataccctaaaattagaatttcacattgtgctcaatgtgagataagaaaacactaacataaatatgaataagtaaaaactaaaaaataaaattaagaaagagattaataaaaaacaccctaaaaattgagcatcatcaaagcatcaatctcctgtggatcggcattgactatcgggccctccttcaatcaagaactcttcaccattaaaaatcaacttgcaatataattattcttcctatggcaacaagaaattcccacaagatcctaacaaagtcaatcagcttagttaaaagtatgattgttgttcattgaaccaaaacaacaatttcccaccaccatcaccaccactcaaaacaaaatgacaacctgatttttcaaatggcaactacagtgttccaagaactccaccaaactaacctagtcattgcaataattccccaaagcaaaagcgtttcttcacagatcatgctcagaatttgacactatcacaaccatcattaatgcaaaatttcacaatattcagcacctcaaaatttcagcaagacaatttgaaatcttatcatcaaaattcacatatatgccaagtaattcccaaatatgctccaagaaaaatctggcagtaaaaaatcacgccaagagcacaaataattgtcaaaataagttaacgaaacctgatctgaaatttgtgtagaaaaatgcttgaaaaacggctcatgaggatctgaacacggtctagcggctaaactcgggattcagtgacaaagctcggctcccgtgggcttcgacatggagaatcctcggccagaatatcgtccgtccctgagatttttgtttaactggtgcgtgatgcggatttagaattgtagaaattggaaattttgaagatttacttttgtttatgcatatttttttttatttttgtattctcatttttcattttatttttttaattcacatacgtttttttatgcctaaaataatagaactcaaataaagagagagactaaaaccaccataactttgtaaaaatagcctttataaaaaattttattaacaaaataactttataaaaaaatttattagcaaaataacctcctatgatcgtaaaaacgaccataaattatactgtgctaccataaacgatcattatgatcgcaaaacgactatgaatttacactgtacgaccatcatgatcgcatagagtaaattaagtgaggttattttgcaaattttagcatttcaaatggttagtttgacaaattttccatatctcatcattcttcgctaaccaatctccacctcctcgaatctcacttcgctgcaaaagttctgccaactcctcatcctcgtcctccaccttcctcgacaataacagttgactatggccaggacaaacaacaagtcaccactcacctcaccagtttcagaaaagatgatatcccaaaatggcaccgtttgcgtgttattcgtgaccgattcaagaaggactgggccttatcgaaggtctcgacaaggtttaccagtaccgaaattggtaagatatcgatggcgttttgaatcactgggtttgccaattttctaggaagaattttcctcttctcattagggtaattgactcttttcttttaaaaaaaaaaaggaaaaagttttggtttttgtattgctgaacttaccaaacactcagctaagtttttttctacatttttgctacaactactttttttcacaatacaactacaactgttctttcccacagcacatctatacaaactgacccttattatagtcgatccaataccaggtggcgtgccaaacccatccaatatcacccgagaaacgggtgttattgggtaccattgtgtagccacttggtcccatgtcaaagaggttaccatttcaatagggctgaggataattaactcacagtccagcgagttgatcgatgcctcatgttaatcccgagaaggtcagtagagcgaac

SEQ ID NO: 185887 - DNA, 1967 bp, Cannabis indica
tttttttttttttgttgatgagcaggtgaacttgagtattgcaattattccaatgtcgcatcagtttggttggagttcgtcagtggctggcttggtgcagtcgtcgttcttttggggctatgcattgagtcaattgccaggcgggtggcttgccaagatatttggtgggaggtttgtatatcatgctacctcacaaatactaaaacttattacactaatgttcaatcatgaagtgtcaatttctattgagtcatctattgcagaaagtatagcactactttattatgtatgttctatacagggcttcttagctcttgaggctttgtaagactggtagtggtagttttcgaacatgttaaactgatagtcctcttagtcaacatagttgatcggtagctagcctagggcctagcaatctcgttcttcagtcatcagattaaccagtgattattgaatttgagcattcatcataagcattttccttttgtggaccatgctagagccatatatattatatgtgttatgctcaactgtatcttttttcctatgcagaaaagttcttaagtttggagttttgacttggtcattggctacagcactcgtacctgttcttgcagggtatatgcccagcttgctattgtcaaggattttggtacttggttccacctccttgttttaagttaaaattctactgtgttgttcaattcaacttggttaagtttttattttatttgaaaggatcagattattaaatattatagaatcgaaggaaagaaagaacgacccatcttactgatgtgaatagtatgtattttgccacaactcccatattgacccctaatttctcttattttggtgttaggtaggaataggagaaggagtttccccgtcttccgcaactgacttgattgccaggcatgtatgacattcatattgctttgggagtatgatagtctgataaatgattatatatattgtttgttataatgttcttgtaaaagtgtgcttttcttgtcaaatagtctttgactctagctgtcccatttagctcataggctgtacttctaactaaataaccacattttcctgcagaacaatacctttggaagagcgctcacgagctgtggcatttgtttttggtggtttgagtgtaggaagtgttgcagggtatgttttactgaacactatttatgatttataaaagcttgcccttatttccaagcaactgctctcgcaatggaatcataatggtgaatggaatatcaaacttgatggcctatatttgatcaaaaatataacatctttgtaagatgggattttctgaaaggttacttttaaattataagaaaacaaaaatcatccgtactttgtagtctttgtttagttttacagtactacataaattagtgaattaataaataattatatgtactcatctcattaatgattactctataacatctgatctagtgagatctcattttcttacgttatatactttgaagttgttctcaaggaagtgttgcttcttctttcttcgtgatttttctcttcgacattttgatcacgaaattgctgacatgaacatacaaaaactgaactctggtttactagtgctgccataagtttattaactctgccttttcctctaatccttctaaagtgctttagtttagttattataacatttaaaatccatgcagatatctcttggctccacccctaattcaaaatcttggttgggagtatgtgttctacatatttggcctcttgggagtaggctggtaagagtcatctctaaactcactgaagattccctaaccttcttctaattcagtgctagtgcaactgcaatattttcaaaagcatgtatttgagtaaagcaaaactagtcttgttgctaattagtaaaagttgcaaaatattttattttgctgtacatgattcttctctactcaaggcagtac

SEQ ID NO: 185888 - DNA, 3884 bp, Cannabis indica
cattgggttttgaggatataacctaggagatgtaccgtggatatataatctctctgatgtcggtggcatggcagtatttctctgagcaatagaagacaagtacattctctctgatgttgaaggcatcgaatcagatgattgagaaacagcagccagattgtcattcctctgagatgctgaagacatgtatatcctctctgaatgtagagcaatattgttcctctgagtggacgagccaatgtggtcactgcgatgagatgttgctggcatgtatagcctcccagatgttgtgaacatgccgtcagacctttgaaatgtttgactcgtactgtcacccagatgagatgttgttagcatatataccctctcagaacttggatgaacattagcatcagcttggtgagatgatgctgccacattgtcacttctatgtgacattgagcctactgtgtcatgagagacaggtatataaaccctctcaggagtaagggccatgttgatgtcagtcctctgagaagccagtgatgtgttgtcactcctctgagacgttgcagtatgaattcgttccgatgatggcggaagcgcgtcattcctttgagatgttggatgagaggcttcatcccacctggatgcctgtggcatatacattctctcagatatctgggtagaggttattgacactccttggtttggtaaatcccgttctgttggaggcagagctagcgacatctctccattggataattccctctctgatgcgggtggcaggtagacacctcggcttggcaaatctctatcagctgttgaagacacagaagacactcccgggttaggtaaatctgcctcagatgaagtgattgggagtgaaactccatggcttggagaatcagtctcagattctgaatgcaaagaaggtgactctctctggcttgctgaatctctatctgtagaagaaggcaaggctgaacacgcagctcttcttgtcatatctttctcagaaggtggaggcacagctacaggcaatactaggcttgataaatctttccactgttgggcaacagttttgatttgggtgtaaaattgaactcctgatttacctgcaataagaatcagaaacataacagtcagaaaatggctcagccatgcagtctgacagaaaaagaaattttactgcagagagttatataaccagagaaagaggccttgatccactgaatgatgaaaatggcaatggaactggaacagaaacattgatcccaacctaaataaatacatgacagcaggacatgagtaattacaatcatgaagaagaatagcattctcaaaactgccctacaaaaacttgatcaaagcacataaagatgatatgcaataacatttcacattctgatcaaatcatattatagggtttttctaatttagttttaggaaataatttgtattattgtttggcatcaatttcatatacttaaccaccagatacacaggttgatgtcagagtcacgatcacttaataatttttacgaatatggcgattcttgaccctctcatctcaagaaactctagtagaatgccttaccagtccaacgtcaacttcattctgaaacttccttgcagaaataccagatgtggtgaatactgaagctccattaacatacctgagagaatacaaagcatcaaaaatgtcccaaggactacaaattacgaagtagtaactaggagaaacacgatatcaacaaaccaaatgttttccatgaaagggaaaatactttcatggaaatatctcataaaatgaaattgtatgttctcattttttaagtgtccctaaatcgggacttttatgaacaataaactagcaaagactatcaccttaaggaattattatcatagtttccaaacaagactaaaaatgattctttttaacttattttcaaagaaaatttaacatgaaacaagattcaagatccatggcaaaaaacaaaaacgaaaaaaatatccctcctccctctccccctctctctccctctccctctccctctcaataattttgttgactaattgggataatatgatgacaatttttcacatgatattttccaagaattaggagctcaccaaacaaataatcaaatgcaaagtcatttgacaattttacaagaggcattagcatccatcccagattttagaaaaagatctactggatatttattaatagtacctgcttctgttaacaatcatgatggcctcttctaggctgtcaacctgtttgtagagagataacagaacatttggtgatcaaacactaacacagtaatatcatataacactggtaaacactgcaaagaatatgcataaaaaacacacatataaatagagagaaagagagcaaagaggttgaaattacctgcatacaaagaagaatcggtccaaacatctcttcctgctcaataaaaagatacagtaaactcttctgcaaactgagattcataattaaccaagcccattcactccatatagtgaaaatatgagaaagtaccttgtagcaatccatgttggttgtaatatcacttaagattgtaggaccaatgaaactcccattctcatagcctggaacctacaaaaggaaatttaaaaataaataaatagctaagaaaatgtttctggataactactttaagggatttaacatatggctgttagcctaaagattcaaggcaagcccaatgcctgtatgttctttacacaaattctagcactgaaatctttacaggaaaaagcttaatggaatgaagaaaaagaaaaagtgtacagcattatctttctgtcctataaataaaattggagaagataggcaacaaggtgactgtaacagtgcttacagaaggaagattttacattttaacaacttcaattttgcacagagaatatatgcctacgataattcaaattaatatcaagaaccagaacaaagaattaccacaacttttctcccatcaagcaaaagtcgagcaccactctcgagactgttgtgaactaatctgcatatgcgatcctttgcctgcttattccaagcacatcaaagcttataaaagcaatatgatactatattgaaaattatcaatgtaagtatgaattgtttttcaaattatgcaggaaaagaaaaaaaaaaactcagacctcattttacttccttaagatgttaatttcaggtgtggtctccataatttaccactacttatacttaattagattctaattacattttttaacatttatatcccaacctttcgatttcatatcacttaagtcctcaaaacatatttccatgaaaaaaaatcaattgaaatcacacttttcacacatgatcagagatattttactcctaaaattttcagaggtgccagataatccatttgcatccataaaagcatctgccatctatatttataccaaaaattgattgtaagatttatcattttactactaacttagcacgtgtagaggtcaagataaaaccaaaaatccaaatggcagaaaacagatttgttcagcacttcatattttgagcacaataatggtatagtcaaaaaagtgacttttgatagagaagtgttggaacggtactatggggactcaggtgatataatataagattgaatggctgtaaatctaaacacttaagatacatatttaggatgtaagtttaataaatggtaaagtaatagggaaaagagttaaaaataaccccttaagataaaccgaccaaatttggaagcaagtaaagcacctctttagtaattactggaccaaggtctgcattgggatcagttcccacattgactttcagggcttttgcacgatccacaagttctttttccctaaaa

SEQ ID NO: 185889 - DNA, 5665 bp, Cannabis indica
tctgtgaagctctttaagtctcatctttagcttagcgcccagacggacggttctccatcttcctcgtctatagggaaggagcatgatacccatggttcccttcaaaacttcgggtagatgggacactatacccgtgactttcttcaaaactctgggtaaaggaacaaacatccaaacaagtgatgaataagtatcacattttttcatgtaacttcttataaacagtattaactataaactcttccagagtacaatcagcaaaacttgaccactatgacatttttttatgagaaatacccacccaatataaatcagttgcagttatccagaaatttgaattttatattttttgaaaacgatagacttttgttcgcatacaatgccaccacaaaggcaatctataatccagctattgagcaataaaaaaaatgtgcagcatgaaaaaaataaaaaaataaaaaatcaagataattttcttcttttgtccatttattaaaaaaatactataatgtgaaacacatagaacggcctcttagctggtcattcattttccagataattggtgaaaataatactatcaaagttgtgattaaaatccataatatattactcattttactggtcatggcattcaagtaatcaagatccaattttttcagtttcggaacacttacttcacccaatggaccatcatggtcatcaccaacaacttctaatgcttcaagcatggtgccagttgagcctccaatcagtaatacctgaaacagtataggacgatatctgaaaaccacagtattaagtttcacaatgcgtttaactagacaaactcaaaactccatcacttgccgtcaaaacaactatggcagtggttgcagtaaatatagtctggccatgtccatctggaagatcgtgaacagattgcaaagcaagagcaaaagccatagctcctcgaagtcctactcaaacaaataacaataataaggaaatatcaccagttaagaattccaaatttccaaataataaattccactatatcttaccactgtaccaaagggccttttgatgttttagtggtatttttctatttgcaggtctaaccaaattgaccaaatatccacatgagaaaacatttgcagccctacaaacaatgattacacaaacttgtttatttcacaatcagaaaggctactttgacgtaaatattagtaataattatcatgggaattttatcagcgaagtctagtaattttgtgaatgcactacacttaccttgcaactacaataaatatctaggatgtgaagaggccagttaaaggaaacataaagcttctataaacataaaataaaaagaacatgagatatataaatctatgcaaggatacaatcgagaagaaaatgaatccgacatgtgaccagctatgctgttccatagcaatatcaaaacccatgtatataaacctggcaatgaaacagtaaactcagggcaagctttcataaaggttgtgagtggaaaatttacaataacttgacaagtgatagaagacaacataagctctcttacacaaatgtctctgctagtgatgatatcaaatggaaaaaggaagatacaaatcgttgggaattttctgacaaattagagtacgtgtaatgcttcatgacctaagacagatcaagaataatatttttacaaaccccaacataaagtaggtaattagacttgaaaactatgtgagattctactcacaattcctgtgaataatattgacacgataccagagaggccaagaccttctgcaagcatatacctaaagaagatagtttatgttaaaatcaaacaattccagtgaaaactgcaaatggaaaagaaaacttgtctctgtgtgtgtatacttatatatacattaacaaaatgattacaaagatcacttacgagaaatatggaaaaagaacaaaaagacaacactccaagttctgcagactgaacagatgggggaaaaaagaaggaaaatgttagggctgtaaagaatttcagattattcgcaagttaacagaacttgtcatcttaatactcacttttcgatgtccaatcctgcatacttaaaaaggttctgataattaaggtctcacaataccttttgaaagaaaaaacttattaagaataatatgttaagccaaataaaagtcaaattaaccaaattcaacaacaaaaaaggatatcaaagcagaaataaatccaacgccgacgcctgcataataaaccgcgcaaattagtaaatttgtgtaggattacttatgctgcagcgtaacaaataataataataatagtaaagaacgagattgtaatacattggaactcattttcatttcatttatttcctacagaaagagagattgcaagttgtctaaaagaaatatttatttcgatgagttcttaatccataaaactaaaattctaccaagatataatagattgatcttacttctttattgaatgaatataataaatagtataataaaatatattcaaagaaaaagagataagaaatatacaaataaatacaaatgagaaaaaagaatggggtatatcagcttcagcacataatataaattcacacagtaagaatgttaaagttgatactatcttccaagatataataagcctgtaaataagaaattaacctgcagacaatgatccaacaaatgtctcaagaaacctcagaatcaccatgaagaagttttctccagacgaggcattactttttaccatggccatagtcctgtacagcagaatgtagttgaattaaaacaaaaattttaactttttacagctaaaagaaaatagtataccgctcaacatacctgtacagtgaaattgccatctaccagattgtggaacgaaattcacaaagaatacacaacacacatagtcaatccccaaaggcagatatacaaactaaaaacattaaatgctgaatgtagtagtgaaatcttactgcgtcattcagaacagattctccaaaaactaaggcatataggttcatatctgttccaagttcctgcagttcacaacatcaccattaaagcatgttatataaatggaaaacataaagtacaataaatgatagaagagcaagtaaagcacctgaaatatggacaaaaccgtaacaggatctgtagctgatataagagcaccaaacatcagacactccacaaaaggaagcctgtacatgaggtacaccagaccaccaaggtaactgcaccacaaatgaacagcaacaaaagaaatacttagagaagaggtagcaagagtcaattcattaaagacttttccctcttaaaagaaaacagtgaataattagtcaaatgatttaataaatgggagaagcttacactaaaacaccagtaacaattgaagatatgaaagttcctaaaatagcaaacgtgacaatggctccaaaatttgagaagaaaggtttctgtgacgattgtagccattaagtaaagggcatcatataaggtggttgtatattagaattacacacaaagaaaaagaaaaagaaaatggtgaagaagaagaagaagaagaagaagaactcacaggtgaaagactgaaccctgattgagtgagagctgaagtgttaagaaaaacgatatctggtatactaggaaggtgaattaacctcagcataagcaaatactacaaattatgtgtaactaagaaaaatggcacatagaagagtggatataatatgattggaggtaagaggaacaagaagaaaaattcctcatgaaaattgaaccaagccctgcacaaattgacatttgacggatcaactccaacaaaaaaactgaattgctttattttccttcaaattcagtagaaaaaaaacaaaatgaaatttagggattaattgaacaaaggaatggacctgatgttattttcagtatttgagacgttagcaagtacaccaacaattaaacctgccacaaaactaatgctgtaaaaacctaaattcccacataccctaaacaacaatcccaactatcactaccaaaaaaactaggtcataaacttaatgatcagtcaaattacctatcaaaagggaagcactcgcttcgggaagataataaaacttgtgacgacgaaggacatgaccaaggacgaaggagagaaccaacatcatgatctgaagaaggattccaacgccagcggcctgctgctccttcccaggggtaggtgctggtacagaagaattagtcccattgggaccggtcggagatatctgcaacccaatcaattgaacatcttctatcatccccattgtttgggttctcgaacggagatactgaagctcgcgttaccggagctagatcgccgatttgcctctttggctgtaaaatttgatacagagaccaaagaaaactctctcctttggagtttgaagcgtttcacctcctattttattttctgcttattattcaaaaacatttgttccgtctctcacggatacaatttttattttaataaatccttaattttaatgaataacaataataataataatgtgtttaaaagagacaaatcttacttttcactttcagcaataccaattttgtagaatataattacaataatattgtattgtgccaacatattggaattatcaaaattaaaaaaagagtatatagtacaaaaataataactttgcaaacaaaacacatgccatctttttttgacaagaacacatcggttttctttgaaaaaatattgtgtaagtaattattataacttgcactaaaatattatatgacctatatttctatcctcccttaaacaatgtcaatgagaatataccacctctaaattactcacttacaattctaaatattaacattataataatgaacataatttttccattcagtttcttttttgaataaatttttccattcagttttaaataactaaacatataaaatttaatttaggtataaaagaattttattatatgaaataagaataacactttttcaacgattcatccagattatatgtatactgaaatggttcacagttcacacctttgatttcaatttcaatgtattcattgccaacaatatactccaacgtacctacctatacatcgaaaacttaaattcaaccaatacatttactacaagtctacgtatattacgtatgaaaagaaaaggtcaaaattttatagcaaatgaaatgaatgcaaactcttcactcttcactcttcacaacacaacttcgtatactatgatgagtaacatttaagtgataatttgtgtctcatgtaaccttcccaactcataaatacataatataaattactcgttacttatcagataattatatattttgaataaatttcgtttttccattttttatacaggttttgtctaaattgagaactcttaagattctgtaaagtgcattaattaatgattacgttgtttaatattataggctataattaattaatgttcatgcgttaattatcattaaatcacattctaattatgtggcaacatgcacctttaatatttgatagtcaaaatttccctctttcagatgtggtatctcgctaatttagagaagtagggagtttgtttgcttacataaattaaaaattgtttt

SEQ ID NO: 185890 - DNA, 6520 bp, Cannabis indica
agatagagtgacaggagcagcaataagccataaaagttagctgggccaggctgggcctaatgatgtcaatgtttactctaatgcaagttggcaagtttttttttttaattttaattattttttttaataatgccatgtgaatgtgatattccacaaaagtagtagctgctgcatgaccaaatcatcgtcaccacacgaattggaaaatgggtggttgttgtaatgcaaacccttatagttcaaaataaggaaatatgggtactattagtactagatactatgcaaaatttgattttgattcttgatgatatgcactgtcttttatctaggtgtactttctaaaaatacataatcaaattcacactctttttattttagtttttagttaatgctattattgtattttagttccaaaaaaaacacttttactttatatgattcattactcttttttttatatattatattatttaaaaagataaaaaaaaaattaatgaaagaaaggaggagagaaatattattaggtgataattttgaaatgtagagattattgagttaattgtaattcggtagtggtagttaagagtatctccaatgtaaataattttaaaaatcgtcacaaaattttacattactctaaaatataatttttattttctcccatctacatcatttttatcacttactacttttaaatataatatttaattttctctttctagtactcataacccctgacaaagatacatggacaacgataatagaaacaacattgaagttgatctaagaatgttttaagttgtataacatataattttcgagataggaatttccttcaacagtatcgtttatcgtgttagacaataacccttccttgtttagttagtttgttaattctattcctttctataaaaaaaaaaatgtagaaattaaaaattataacaaaaggtaaaaaaaaaaaaaaaggagtaaaagagagcatctattaaagtgtttttaatattttattttttggtatattatgaaagtacatctattttacatcattcattgtgattgtgagagagctcaaatattgatgagatgagacctaaaattcaactctcttttaaaccagtaatgcagagccaataaatgtagttccttccttgtatttaactcatacacccaccaaaaagagatgaggtactaatggtagccacattgtaaaaaaaaagggggtaatagttagaaatatctatggtgttttatggaccactattagctgtgaagagtaccaaaataataatacaaacatacactgcaaacccttatactattcttctcaaatatttcagaacctcaaatatatgccttatttttaactttgtgtttctccaaatgggatggtattggaatataataaaagtgctttgtatctttgtcttatggcttttaattattattatattatttataattccacatgggatgggaaaactggaaaggaccattaactttacacaccaatagaagaagataagcttgaaccttcaatctagataatcatttatctttttctcttttctttcattcttttggattctcataatcttgaaccttcaatctagataatcaatcaactccatcaaggtcattggaataaataataatacccaaaaaaaattgactaaagtgaaaaaatagccaataatgtaagttagcatgaatagagatacaacattagaacaaactgacattttctattatgaaaagaaacattgtatctatacaagttaatagtggaggggcctgaccaataaaacagccattaattaaggacttttgtgtaaaaactgattccccaagacaactcttttacagggcacacccgtaaatacaaagattttgatgtcaccatatacaaatacaagaatggtcaactttcatggtcttgttaatattgcactgaaatgcacagttcatcccaacaaggaccaatcagattagtgatcagcaagctctgtcatgcatcgcattttaagattaatcgtcattcgaaaacatcatctggatttctcagaaaaagggaacccccacttcttatataacaaaaacaatggttcctgtttgtatcaaaagctgctagtgaaatctacctttttcaacaaagggcactctcgaaagaaacctggatttgagctagatgtcgtggcttcgggactgaagcagttgctaggccttctagcaactttacaacgtcggttgcatcatctagataatattttgctttgcttggctttctcccaacagtgcaggcaaagatctcgggaggcgcaggcaaggatggactagagaccgtgcttagtatgctttcgaacatgtcttcatcagatctatcatctccaatgcacataacaaaatctggtgccgtccctcttcaaccattctcaaaagaaccttttcggcaaccaaacctttgcttacccctgtatgttaaatgcgattagctatatatttcacatagttgtgattagctataaatttcacatagttgtgtgtgtgcttttgttaagagagagaagagaatatatacctgtggcttaacttcaacaatgtgctgacccctcttaacaacaactggttcattagagagtacattttcgagatgatccaacaattcttttgcttgacaggaaccgaaatcagggtctgcatcttgatgatgccataccaatgcactctctttaacctcaatagtagatccatcggtagcctctgtgtacaatgtcataacaggttcaacaatttctttccaatcaagatcagcaacaacaggactagtctcccactccgatgttccgcttgacctacacaaaacaaacaaaagataagaaaaaacctcggtacactagagaaaacgccttatgggctagtctaaaaaacaaaagatgagggcaagaaagacatcattataccttatgaaatatccatgctcagctgcaattcctagtctatcacatggggcaaaccactcgcttaaagaacttcttcccctcccactaacaatatacacggtgttcttaggatcattgcagagagaatttatagtggagattacttcggggcttggagatttcataatagaagcctgggaaacaacggtaccatcataatcaagaaatatagcccttctagtggttctcttatatgctgagacaatatgctcaattgccaacttcttgaagttgggagaaagagaaacaactctaaaacccaggcccaaaccaatcccccagcaacgtttattgtaatgatcctgacatgctctttccaaatcctgcataaaactacgagcccaataggcaacatcgtgagaactaacataacggtaatgcttctcatggcgcaattttttctcagacatacacatggtaagtgctaaattcaatgcatcagcaacagcatcaatgtcccaaggattaactctgattgctccactaagggaaggtgagcaaccaatgaattcagacacgacaagcatactcgtgcgaggagtatctgcttgtatgcctaaagctttatccatacatggagttccctgcctgcaaacaacgtacttgtaaggaactaagttcattccatctctcacagcattcactatgcaacattctgctacagcataataagctgtcttctcccaacgtggaataggagaatcaattaaaatcacaggcttgtagttagatgaaccataagcctcattaatcctttcagccgtcaaataagtctcacttttagcttcctgaacatccttccccaagcctcttgcagggttcacaatctgaaccaagactacatttccctgcaatgcagggttttgctgcaaaagctgttcaattgctaaaagtttgagactgatacctttaaatatatccatgtcatcaactccaagaatcaacttcttgccgctaaatcgttcttgaatctcctttatttttgcagctgtagcagaagaatttaaaaaggattcaagccggcccatatgaacacctactggaagaatcttaatgtacacagtgcggccaaaataatcaagtccaatatgccctcgctttgattcatagtcaagaccaagcattctactgcaacatgagagaaagtgacgagcataatcgaaagtatgaaaaccaattaaatcacaattcagcaagccccttagaatttcgtcacgaacaggcaaagtcctatagatttcagaagaagggaatgggctatgaaggaagaatcctagctttactcgatagaatctcttccgcaaaaatgtaggaagaatcatcaaatgataatcatgaacccaaacaaaatcatcgtcaggattaatgacttccatgactttatcagcaaatattctatttgcagatacatatgcctgccacagggagcggtcaaatcgatcgccgtgatctggacaaatcggtagcatgtaatgaaataggggccacagctgctgtttgcaaaaacccaggtagaactttttatggacatcatgaggtagaaatgtaggcacacagttgaaatcctccaacaatgtctgtgcaacttcatcctgttcattgacatctatttcagttttgagcgaaccaacataaatgacctcagtttccgaagagaacccatccttcaactgtaacagaagggaatcctcatcaaaactgaagcaccattttccagtttctgtgtccttttttgcatgcaaaggtaatatattcgccacaataatttttcgatcacgacaaacagaagaagcagcatcagaatccgcatcattactgctatctaaatcagagataatgccagcaactgtcatcacacgaggaaggggccgaggactgggagtagaaggaaaatctagtaggccactattggccaaacctaataggtttgtacaagaccttgatgccattgtgagtagaaaaataatatatttcctactaagacataaagagagtagaacttgctgataaagtttctgcccagctagaaatatacaccaacctgcaaaataaaaatataacacaacgcaaacatcaataaaatgtgaagataagttccataatcaagcgcataatcagtattaaaaacccaaaaagaaaaacctccactacagagagggagaacagcagattatcagtaacactattcaagtaaaacctaatttaagtctatacatatatatacacccaatggaacataatatttaaaactgagatattgttctcaaactatacaatgaaattacagtaagttaggcacctttgacaaccccaagagaaaaattaaatacaaacacgctttcatttcacaaaattcttcacctaatcactgtactcaccagtaatctacccattaaaagttaaaagcatgtctaaatatcaatatcattaaatcctttaaacaggatttcttccattttctgattgcgtgagactctaaaaacggtattaattgtccttttcttgttacctttgaatcattttccttttaaagaatcatatcaacctagaagaaagggtattacacaagataagttctagtaattttagtatctttacacctcaagttatcttatcttaccttaccttatcctatctatctaatcttatatcttatatgcaaataactaaaaaaagcaaattgatttctccgtcaatagaaaccaaatgcattttcaaagtttatctaagaaagttttttcaaataataataataaataaatacaaatttattcaacaaccaaaattaaagatcttaacccccccaaaaaaagttgatgatctcatacaacgttacatataattaagatcagtcaaatttgtaaaacaaaactcaaatagaagatccaaaagttttccaaaaaaaaagacctaatatcagatatcatgtttcaaaacccttcggcttcaatttacagaaacaaagcaaacgaatcaaaaaaaaaacccaagtcaaaaattcagaagaagtaaaaaaaacaatcaacaacagagatcagcaaaactcgaaaccatttcctttctgtttatttactttaatacccctctcacacaaaactttctcggccaccaaacagaatacagacaaatttcttaaaaactcatctcaacaagttcacagcagatcagagaaaaacataaccatttcctactctcaaatcaagcctaaggagataccttcgcagcgagattccggtgatcggatatggctgttataatacaccggcgcgtgacccaaatcctagagagagagagagagagaatggaggctgtgctggatgtttcaatgaagaatgagaaagatccttaaagagagagagatatagatatagatatatagagatatatatattattatatatatatatgtataaatcagagacatgggataggatccataaaaagctttaccgcggtttttttttatttttatttttgttttatattacctatttaaatcgagtctgggttttttcggatttgcg

SEQ ID NO: 185891 - DNA, 4677 bp, Cannabis indica
tagtagagagagagagagagagagagagagaaggggaagatagttaggtttagttttattatttgaaggcataatcggaactaaaaaactttgtagcaaatttttgtttaatattttgtatggtgttatattatgagaccatgcacaatatttaagcacgatatattaaattttcttataaaaatccataagaagtttggtagcaactaaaataactagcctagtcaccaatcactatggcttaggattgttcacaaagtatctaatccgatctaatctaattcaatctataaagcgtggatattcacacttatgcggattgattggattgaaaaaactaaaattcacacttatgagaattggatattatttgatctaaaaaattaatcgatcaaagtttgaaagatgacttaataaagcattaaaatagcttcgaaatgcaagttgagtcgcgtcaatcaaatcaatattgagtgagttataactattttactgaaggttaatctggactcagtgctcaagttgacatccgaacacccaggttgacatccagcgcccaagttgacatgtgacgtcaacttggacattgggtgagttggaaaacgtaccaagaatgtactttttgatgcctaagtgatatttagacctcacttagcctgtttttgtgttttggcaaagttggtcaccagttctctgagatattattattctgtgaaaataagagactcgaaactacccaatttctgagtaagtcactttgccaaaaaagtgaaaatatgaagttataaatttgactattatgacttcatggctctcaattaaaatgaaaatctatatgaactgtcgagacaaaatcaaaattggataagcaaaacctagcgcaccaggccatatattaacttggacattgggtgcttattttagagcttctaggatgtcatcttgacacttccaatgtttttgaacttgagaaaaaggtctcctaccctatttttggccatttcatagagaattctcggagcaaaatttacatttgagtgatcaaaaccagctcaccaggttgattgtcaacttgggcattgggcccagcacctggtcaacctaggagatgggctcacttttgaagcccttgcaattgtgattttctccccaagtctactgtatttttgttatttctaatgactaaaaaatgcacgaaatactttgtcagaaaactaattggaaatagtttgggttgacaatatgtgaacctgggcgctgggtccagtttcaggctaaaaatgcctcaaatatgctcgtggtatgtctggttcatgtcccaacacaaattttgacccattcgcactaagatcgtcctagaaacttctagttgggctgtcaacctgggcgttgagtgaaaccctaggtggccgggtcgatttttgaggtgcaattttatgtgttttcagctcccaagacctggacttggatggtccatatcttcatggtacataaaactgaaatatggtgagttggaaacgacttatcaaaatctaaacacccattccagagttcccagggtcaacttgactactatgactcgggactactcaactccgagatattatctttcttgccacgtgtcaaacattgatatccacatcactagaaaaaagtttttggattaacacaatttaatcacggttgtaaaataaactaaatgtatacctaaatgacaaactttcctccttatgataatgaagataatataaaaaaaaatatactccactctctaaaagagttattttgatacaccatctatttgcagtagcatacccaatgttaatgccaaaattagctcaacacaaattgtattataacttgaattctttacaccaagttcattctaataaaaatacaatctttatcagcttacacaatttccctctcaattatctcaatttgtttggagcgtttacttctcgagctcaaagtgttcttaaggatgtattctgacagaattttgactagtttggtgcgatcgatgattcatcatctttttttaatgatggggtcttctatttataggtaggaacgaccgttagtccttcgttgctcctctgttcagatggttcacgtggattagttcctctctatactacgtgcgttctcagccttttgctttcaacactccttaagcgcttatcctctcatttctcgagttctactctaaatccttcctttttgagctctttgctcaaaggggtgtttcgacatttaggttaacttttttaattcatctttttattatgtacattataattatatatgactattcgtaaatttttagaaaattataaataatttactgtactgaaataaagttcaaacagttaccaattgctaccacgcgtataaaaaattaatcacaagtgcaacacaatatttatttttggattcaaaatttctaaaaatttacatttaactctaaataattacacgatcataaaattattcaaaaaaaaaaaattacgccatcataaaaaaattattagattaaaagctcctctaaatattgaaataataataataaaaaaaaaagtccattaaaacacaccatagagggtgttctataaactttcccaactataaaatcacccataataataccaataataacaataataataaaggaaaatgtgaaacaagtgtttttgccaactgccaactgccaaaggataagaaattgtaagagaagtaaaacaagcaaagatgagagttttacatacacaaatagaaacttaaaagtaaaagattctatttttatttattgtatatcgttttctttctttaactttaatgaaaacaaaacaaaacaaacaaacaaagaaggtacacacactaatacacacctttaatctctgatgaatctgatctcaccatcatcatcatcatcatcattcatcagtggtaacaagtaacttaactttttcatcttccaagcctcacgttactctctgcttaatcttaatctatccacatataattaaaaaaagatagcccccacacaagggcacaatctcatttaaatgctatatttatatttattacattgtatgacatgcctatactcatttgacctttctctctctgtgtcagtcttctttgctggggatctcggttcctctatttcttcactctcagattcgaccttcaaccacttcattcattcatctcccttgagcttgaggttggtggttcggttccttactctttcttaatttttcttcaagatttgggttttcattcatatttgtctagatcgattttactcagctgcccacttgctaaatttgtgtttttttctaataaaaatcgtttcttggaacgacccatttggttaattcgtcaaaacttcattaacaatgccgattagtttcgaagaatcatatgggttattctttgcttcttcttagggcatcattacagcacttttcattgctaatttcgttttcattcacagcttattttactttttcctgttctagatgtctgaactggagcagacattgcaacatttgatgatttgtcaattattgaggtgatggtctccccttttccccattttgataagtgataagaacacaagattcctggttagttcttagctttagggtggaacctatatatatgtgccttaaatggtgatttagtgggtaggagtcaatactttgtggtcagtttgtgaaagcaaagaatgtccaagatgatcaacaaaccgcttctgctgacttatctttacctatttatctacattctgctttcctctggagttatattatacaacaaggtaatgctctctttctcaatcacctttgtgtgtttttaccaatttatttatgtttgttaagactttacttgaatgaatttctttgcagtgggttctctccccaaagtatttcaattttccacttcctataacacttaccatgattcacatgggattttctggagcagtggcattttttcttgtccgtgtgttcaaggtatggcatggtcattcataatgttttctttctgaaaaggcttataatacattagtgattacatattcatgtcttttttagtaatagtcttttgaatctgcaggttgcaactcctgtcaaaatgacatttgaaatgtaagtcatacatagtggtatttcctttttcttcttttcttcagacactgttaatttgtttccatttccttatttagtttgtctttctaaattgttcttttcacatgtgacagatatgcaacttgtgttataccgataagtgcctttttcgcttcaagtctttggtaagcactcaaatgcttattaccctacttcttaagttgatgttgaatctgttgatgtgatcagtaatgtgggacagaagcgtgtgtattatttggttagatttgataagtcttttatatcttaaaaagtagatgttggacttttgaggaagactttcaatcgttttcatgaatgttgtatcaagatactaagcaatttcatattcattgtatagtcaaaagttcatccacttgaggctagatcaagtggtagtggttgggtgagtgtgtgagggagagagtttggggttcgaaaagcgttctgctattcttgaacctctattaaattacatcttccgtagtttaaattatta

SEQ ID NO: 185892 - DNA, 2848 bp, Cannabis indica
atatataaatataaatattcctcccacccaatattgttctctacctatcaaaccaaaccaacccaacctatatgtcagttttggaaacacatgatgaaaaaggatcacagatatatttatatatatataactcatctctccccttttcatttttttttttaattttttgctactttattttcttctcccaaaatcaatatatatatatatataatcatagtaaaattgtaacattatttttgcaccctcctggcctctaagtctcaagtcaaaataatatggttttgatttttgttttgggtataaaatttatatattgtgagatgatgattattattatgacaagtagctataggtcgtagttgtagttgatgtgttagcaatccaacaccgttggatatcttctgctattcttttggcgtccattgatgccccaaggagtccacgctttgtgaaccccaccgcataaagcccactctctcctttccatccattaggaaatggcctttttggcaatccatctttttttgaaaacatttctccttcctatatttttattaattaattaaaaccaccaacaaaaaattatatctatatatatatgtgtgtaacgaaactacatttttttttaatgttattattaattatatattattttacctttaaccaagagggtacgttgcttctgtaacctgttgccaatatgattgcatcaaatttctctgttgttccatccacgaattccactctatgtcgttttagccgctttatacctggaaatacctaaaatatatatgttcaatattattaaaaaaaatgaaaaaggaattataaattccattaataataatgagtaaacagaaaaagttgttatttatgtacatgtactaaaaataaagtatatgggttataatgtatgtcactatatatatattaaactataaacagctagatgaaactattgaaaaacataatcatgattatttgatatcttttttattttttctttctttcaaatatttgaaaaatcaaaaaacgatactctactaaagcgagtggctgtgccactataaatttatattatataacacacaggaaatcttagaaattacaatcgcaatcatatcatttgattcttgtaccacataatatgatcaatcaacaaaaagttaatatatatatatatatagaggagtagtactagtactactatatagttgtctaattcacgagaaaccctccaacaaaattatataattattataaaaaatgaaattaaaaaaaaaaaagaaaaaagaaaagtggaataatgtagtagtagtagtagtagtacttgaatgtctccacttttgatcatggcaagtgtgccaacgtctaaaactggggtctttccggacaagttcttgagctctaagggacccaaaggagggcggtccaatccgaagagagaggtgtcgcctaatatgagcctcgacacgattagaaggaagcgatcgacaagtcgtatgggcaaccacttgagcaaccacatggacaccccgaaagtggattttcccagcatctctcgtggtaggatgtgtaccttcattattcatttaccatcccatttaattaattaaattaaattacataaactagtatttcttaccaatgttattatatacgcttgcttcggaatctcaagaaaaaaaaaagaaagatgaaagatatttgtttttgccaaaaatagggttttatgtggaatcattcattgtgctttgattgtgtgtttgagtatatatatgtaaacgttttgaaacttggaaccaattgaaatatgggcttttcttttttttctttccttttttttcctacctacctactttataacactctattactaatactactactgctgctgctgcttataacttttgttgccatgaaaattaataatttgaagcaaaactaataaactgtttgtttccacgtttttctatataataactggttgaacttagaacataataataagtataccaaggtaattaataattaagagaatagagaaaatgatggagtagagtaaaaggtataagtaatcttactttgtccctaacgacaagagcaggagaagcattataattgcatagatccaaacagacctccatcccagaattgccacaaccaaccaccaaaactctcttccctcgaaattcatggccactcttatacaagctggtgtgccttatgggcccaccaaactccccaatccctttaatctccggctcaagcgcctccgcattctccccagtagcaactatcacccaccggcacacgtactcgctctcgctcgtcctcactcgccacaaccccactgtattgtcgtactccgccgatgacaccgtttgattgaaacgcggcctaatatggaacctctccgcgtactcctccaagtactgtacgaactgtcgtttggatggataggttgggaaatcagatggaaacgacatgaatggaagctcacaaaagtgttttggcaaatggagactaagtctgtcgtaagtcttcaactgccaaagggaagctatgcagttggatctttcaagcacaacgctgggcacccctttttctttcaggcatgccgccaccgctagacccgatggccccgctcccacgatcaccggacccgccacataaacacagcaacatctcctcctcctcatgcttttcaaatcatcctctaccataataacaggatcatgggcttgtttcccttctatttctcttaagtacaactccatgtaataataatgccgccacactgataataagaagagatccaattccaaatccaacacctacctac

SEQ ID NO: 185893 - DNA, 2450 bp, Cannabis indica
attatatcaatcacatcaacttttttactgtatcctttaatacctcaccaaaatatttattcttttattttacctcatacatttacattacaccatatataaacttctctatattttttctatttcatttataaattatttatttaatatattttataattaaataaataaatacaataatattacacaatactaaaaaaagtttaaaatattgtttgtttaaaatattaatatcatatttatagctcaacaaataatgtaattttacatatgtagttaaagcactatttatgagctaattttttaatgaatttttatctttaacttaatatttaactattagctattttagctattataatgtgattgctcttatgtgcttcgaaatttcaaatagaataaaatgtctttgcatccaaacctcaaaaaaaatatggtggtctttttttttttgttggaataaaggttgactcgttccaaataatttgtaacaatgtgtccttttctgacaacaaattgcattacaaaaacacgcacgttggatttttttattatatttttaacatagagataatatatactaaccaaagattgcgattttgtttgtttaaaaaagataactatggccattctgtcatcaagattacaaccaaaacaaaaaggaaaatatattacatatattaaattgagacgaatgtcaacgtagcgtaaggggaaaaacagctaattaatattactaatttaatttttacactaaatagcaaacacgttgaaggaaaaaagaagaaaaaataagttatcaaaaaaaaaaaaaaaaaaaaaaaaaaagaagaaaaaataattataattattttacatttattttgtttaaagaaaacccttgtctttgcagcattgaatagcacccgcaagcatttcatcaaggccgaatttgaacttgaacccagtttccaaaagcttcattgaggacagactagaatatttcttcttatcaaccttaatttcttttaaatcactgaaccaataaaaatacataaattaatccattagggggagaagaaaaactagaaatatatataaataagttgattaacaatgttaaggccaaaactcactctactaatgataaatgaaattctgggtatcttgttgaaagagaatgaaacaattcgtgaatggttatatccgtcgaagaacaaatgtacctccctgctttcgcattagtactataatgtttctctagaaaaaagatatgcgcacttgccacgtcatctatgtgtaccatatcaaacttaacaaaatgtttatatacatcctggtttcctgccaatttatatatacatgtatatgattaattaatgctaatatatattatagactatatttatagtaatataattaagaaatgtattaattaccaaaaatcatggcgagtggaaagtaaacggaggaaggtattttgggacaaataaaaggtccaaccaccaaaggaataaccaaagtaacgagatttaatccatgcttctcggcaaaatctagtgcggttctttccactacagtctttgataccaaataagaagagcttactctatcattattgctcttacgacgacaaacctcgagatcgctccatgtcgtttcgtcgcttacgcagctagggtcgttgtcgttgaacaaaccgttacggcactggatgtgtaaacgacacgttttatggtgtcagagttggcgaggcaagccttgaggatgccaagtgtcccttctacggctcttctggtaactatttcttccgtctcttttccgtccacgttcatgggatgggctaaatgaaagactcctacgcacccttggattgctctgtcgaaactctctggacggtccagatctgcctcaacaatctctaatctctcttttgcacctggtaggcttgtgaggtagcttatatctcttttgttattatctatatatatattatataccacataacataaatttaatttgatcataaattattaactgtacaatatatataattgaaatttaattatatatgtgttatttatatacctgatgagtgagatctaacggtagctcttattgagtgaccatgttgaagaagtctcattatgagccatgaagccacataaccagttccaccagttacacaaattgtgcctctgccttcttcttcttcttccatatctaataatttttcttgtttcttgtcattttatataaactggttatatataaaggccttattataacgtataggaagcttaaaattaaaggaagtcaactctcaccggattcaactcaagctgtatacctgatttcctgtaatattacatgtgcaatttcttattttcgttcctcattaattttattttatttgtagtgcgagaacaagtctagaaaaagcctccaaaactaaaaaggcaatgtataat

SEQ ID NO: 185894 - DNA, 1092 bp, Cannabis indica
tctagactggttgaaattagacacagcagagaccacaacaacaagaaagacagcaaaaataatactccccccatcaaaccacccatctttccagccatgttgcttgataccaaaccccaaagagagcagggcacaaaccaagagtatgataataacggtgtctttaaacgcatcaaacacaaaagtgagaaacccttttgcaggtggcttctggtattcattagctccaagaacattctttctatatatgaaatcagaattactaataccattcgtgacatcagtttgaagggtttcagccagttctttgactcctccatattgactcacaaggctttcaatgttcttagccctaacaatatcagcaagagctttcgggtcaatactatcaagaaaagaaaaagaatcattattatcattaccacctgatcgtttggagggctggacgtcaatggcgatataggagagggagcgcaaaagttttgctttgctttgggttacgttcttggcaagataacgaagagttgtagtgaaggatatggcagtgaaaaccaacctccatttgcgtttgtgggatttggttggtgagccattttcgggtaatttgttctgttcatcatgcatggatatttgcaaggattttcttggccttagagacatggaaatgtattgttaagttgaatctttagagaaggaaacaacaaaagaagagaggtattcactttatatttactatcacagaaattaaagtaaaggagtaataagaggtaatgagaaattattactgtaccatgtataaatatatgtatatgtacggtatatgacgcgttcagttaaatttagaaggtgatgagaaagagcactgtgtcttcgtcgaaattactaatttactacggttataaataacagagaagtttttgcttgaaaatagagaaattacttctctttctctattaagggtggttattttcattcaacttattcattgttttattaaagacatatttttttgttaactttgatagggaaattgcctctttctgtttgtacgattaataaggaattttcttttcttttttttttttaaggaat

SEQ ID NO: 185895 - DNA, 994 bp, Cannabis indica
ttaacgttatttaatttttggtctcaaaactttctcaaaaaacctatacattttggaaatagctttttgttcgagttagagccttgtttacaacactaccccataaattgaatttttggtaaaatcttctaaacttaacttttgttttgatacactattgttagggagccaatgttaagtgttaaattatattgctgatgtgtattcaattatagacatgaaatattggggtaaatactattttggacattgtgttttgcaaaagttatcgattggacgctgtgttttgttaaatgacaaaatagatcctctattttccaaaatggtaaaaataggaccatgagcttaatttttaacaatttttatttttaatataaccaacttgaagataattcttaatacgaacagatacaaaaaatgtaaaattttttatcatagcacttttagatcgaattataattaaattttattttgggttgacccaagaattttactttctgcagaactcacatttttctttcttgatgtacaacttttcttccctcaactttgtcaacaccttccttagctgttgcaggtgctcctccaacgagttgttgtagatcacaatgtcgtccaaatataccacaacgaactgatccaagaattcatatagcacatcattcatcagattgcaaaatgtcgcgggggcgttagtcaacccaaaatgcatcactagaaactcaaaagacttgtacttcgtcacacaggtagtcttggcttcatctcccaccgcaatttgaaccttccagtatcctgcctggaggtctaacttgctgaaatatgatggttttttagtctatcaaacaaatctactgcatttggcactgggtacatgttctttaccatgactttattcaaagcacgacagtgcacgcacatctgtaattacccatctgatttcttttggaataatatcggggcaccataaggagccttagagggcaccatatat

SEQ ID NO: 185896 - DNA, 3693 bp, Cannabis indica
acataaaaaaaactaaattaaagaaattgagattctcaaagcatattagtttatacaggtcttatctagcatgcattatccacaagactcttttcaacaatacaattcatttctctaataatgttggtgaataaataacacaatcccaaaactgcatgatacaaaaatattaccatgaacttttgttgtcctctttttctcaaaatagaattgtttacagtagaaataatggaggcatgtgatgtgacagacatattaagtttagctacttaacttgttagcatatacattcctcacttctttccacctccagaaacattaaacttgaaaaatatgatgtctccatcttgaaccacataagtcttcccctcttgtttgtacttcccagcagcctttgaaaataaaagtgtcacaacatcaataatttagacatgtaaaaactcaaaattagggggagagaaaattaagtgctaacaatattttccaatgaatacctaagtcagttttcaagagcatgaatatcgataaattagctaagtgacaaataattatcacttgggaatccaaaattaatttctggtacggtggatgaataataacaacactaaattcactcattaatatgattaaaaatgccgaagacggtggaggaatgtaattacgaaaatataattgaatctttctggttgaagagaataccttaacagctgattcagtgccgagttccttcagatcttcaaatttcatgacctgcacattgttagaaaatccaaaaaagtaacttctttgctccaacatatgtactaataagagttgacacaattaatatgtcatgataacgctgtatgatagatttttagaagtgagcctaaaaataaagcaacagcagtaacaaaatgtttggccttcaaaaactttgaattaactatatcttagttattaccatgcacaagtttttgggagaaaaagaaagaatattgatataacctacgctgcaacaccgaaacaaaccataaggtccacccaagcctggctccaaactcaagggttcatttgggacttgggcatcccatccccattattccggagacaccaaagggtggaactttaagctcagaagatactaatctctcaaagtctagtacaacttgaaaaccaatttaagttttgattattcaatatagagtttggtagaaactgacatattagtgaacagctatgattggctaaatatttactattaaaacaaaatgcaatcattctctctctctttccactttttcttctctgcttttaaagggagtgggtagggtttggggacaaattccaacaaacataaaggatttgatggtcatgctagtcattaggtatagcagacaggtcagcactaacattaggcaggtcatggaattaacacttataattcttgtgaagtaagagttgcaactaaaagtaataaacaaaactcattgacagaaagtaaaaagaatcaaggtttcagcagggacctcggcacagatgaaccctctctcaaaatcagtatggatggcccctgcagcttgaggagcttttgtctgccgtctgatctgccagcacttaacctgcaaaaggcaacttattagaaatattttgagccaataaatcatcaacgtgaaagtaagaaacaccaggatgtatattcacataaattggaaaatatggaaagatgataaatttgtcatgggaggagaaaagaagttatcaagcacagggaaagacagcttctcatttttcagaagcaaactcgggtctgcaacatatatttcttgagatttgatcattctaccctaacactttaaggtggtaattaaagtattatgtctacagttattaattgtgtagtgcaatataagtatttttggtagctcatatgaggctttgaatggaaaatttaataaacttctaaatttctaatgcacagccatgacaagagttatgaaggcaattaggaataaacaaaataaacaatttaataccgtgaatttcaaatatagcggaagctaaagtaaaaaagatggaaaattgaagacattttacctcatcaggaccagctgtgaaaaagtaaatgagattaattgctgcaaatccagtctttatgatctttggaagggcactgcaacataaatgcatcaatgttaaatacattgtactcgtataaattataattcctatgttttgcatatcagtgattcattaaaggatacacaacaaaagactctgaactaaaaaagaccaaaagaattacagcttatggaacagctattttatgttattgcccaaacttcagagatgaaacttgaaaggagaaaaaaaaaaacagacaaccagaacctagcccagaatggaatagaaagaaaacagagtaattattggtgactcgtagctaatacaaatcattcaaatgaaaaagaatggactcctataatcacaaacaaggggatctagtttaagctgtttccattgttaaaggccgttttagtatgtaattgtatcactatattatatgacagcattcactattagtatcttattaaaaagtacacactttacaatatcattctgcctgatagacaaatatgtaaaccgcatgcgggtagttggaggttccataaaagcaaggatataaaaagtagaattcacctttgtactttgttctcttcacaatactttgccgcttcatcaggtggcaaatcagcaagatttctttctaaagcgcagctgaaaggaataatttgttccccaccatgttcttggaccctagaaaagaaattacgatcttattcttattccttctaacatataggaaatatccaaacataacaaatataaataatactaacaaaactgtctggagatattacttaataataataaaaagacttgagagtaaaataaaaagttgataatactaaggtaccaaaagaaactctttataacaatttgccacaatataatgatattctttttaatgtcaagccttttaattttgtttggaaatcatttttcccgtttagaataaaggggtgtttgcttggctattttcttacaaagatacttgtgatttgattcaaaggaaaaggaatttagggatttccttctttccttaaatactcttggctagaaaataacttcttatagcaatagtttttgttttagttgctctaattatggtgtgtttctttataaggatgccttatcctcctttatcaaattgtttcttcaaaacaacttgtttcttgcgaaaaacaatatgcattcttctgtgtgaagaatatagctgcagttcttcctgttgctgaacaaaatcactttgatccaaaaagaactgatgggtaaaatttaggtaagttgacactggtgtagaatgtacagaaaagtaaggcatgttgataactaataatacaaaatgtggaataaaagacatactttaaacgtaaacccaaattaacaagagaaaaaacaatatatgaatgatcgtaccaagcatgtatctttggcaaaaacttgttcttttttctttggtaatctttctcattcatgttaacctgtgaagaaaatacagaattaaatatcggaggatgtataattttttattcagataaggtatctttcagattaaatactagatttatttgtatgactgattcttaacct

SEQ ID NO: 185897 - DNA, 1688 bp, Cannabis indica
aaattgaataaatattatttgtgggtatatatataaagagactcaaagcttctaatatgtttggttcttgagcccagtcattacactggggtcgagagagagaactaagctatggctctcattttcccgagaaatctgaatcgcggaaaccaagcatagatgtttccgttctcttcaaagttttcttcccatgtttaacgattcttaatttcaattttctagggattgattttgattatttatttctatatacatttgattaattaattaactgagaaatatttaaaatggaaggtggaagaagaggtagtactgataacagggctgagtgtggtggtggtggtcgcccaagaactactctcttcgatcagatgtcagcagtagcggacggccgagatttaacaggcttaactctagacgacatcttaaccgctgaaaaacgagccctacattcctcatcaccgcgtcagcctcacgcgccaccatctattcccggtcccgtggttcggactctcttagatattatcagagacgaagatcctaaatccggttcttgtaaggaattcgctgcttctagagataagaaatcctggaaatctttcaaggatcgactccgattaaagcgttccggctccggtgccgcctggacttcctctgttcatactccgacttctgatattctcatacctaattcgcgatcgcaagtttttcgccacaactcggctagagaacgaagccttgtcgactcatttaccgacatgactcaactcgacgagtcgtctcccgataacggcggcggtagtcgattcaacagaccgcagatttcgcgccgaagctcgactcgtttcggagtcgccgccatgtacgactgttctccgaacgaggaagagaatgaagaaccaaatgttccgagtctccggcaccaaatttcccggcgccactccacgcgttactctctggcaatgtcggaggagaataataacagcaacagtcctgtagccgatctaactgagccggcggcgccgatgcgcgaaggttcgcggcgactctcggtgattttggcagaggagcgatcgctttctgcgagagaagcagtggctgcgcaagaagcagctgaggctgaagccgccgctgcggcagctgatgaggcggaaacaaccggtacggttgaagaagaagcggcgccggagacggattccggtcagccagcgagaatgtcgttaatggacctattggaagaaacagaccgtcagatgggatttgtgggatcgagatacatgattggagatgaggatgaagatgagaatggattggaagaagaagaagaggatgatgaagaagaagaagaagaatccgccggcaccggcgccggcggtggaggtggtggaacaggaggagttgagaagaattgctgcgtgtgcatggtaaggcataagggcgcggcttttatcccctgcggtcatactttctgtagactctgttctagggagctttgggttagtagagggaattgtcctctttgtaatggtttcattttggaaattcttgatattttctgataattaatccaaaataatttgtgtttaattttatttttttattaaacatttttgtaattttattttggggggttggaatttaatctattcattctttagagtatatattataaaagattgtaataggtt

SEQ ID NO: 185898 - DNA, 7212 bp, Cannabis indica
agtaggttcagaggcaatttgtttgagttctggacgagtgtcccgagccctggatcccttattggcagtcatcaacttttgatacactgccacttccaactgaaaaggactagttggagattcattgcaagttgcgttctttccgtggcactgcttgcacattgtgaggaaggtaacgtcctcattcgtaggaaatgatgtagtaattgtgcagtcaccatgacaggaacctgcaaaatatggtacaaataagtcatcagtagagtagaatacaaaatgacaaagctcacataaccacggaaaaataaagcctatcagtgacaaatttcacttgtcaggaacaaacattatacaaaacaaagtgtagctccatacagataaaaccttagctcgtttaatactcccccagaactgaatggtttacaatagaagcaaaataaaataagcttaactcaaaaaaccaaaactgtatatatttttacaccaattttgaccctttctacagtgacctttttgaaggaaaaaaaatccagctaagcttgagttcaaacacaaatgcacaaaaacaatgcttccccttgcatttaagaccaagaccatccaagttagaggatgttttacacttctaattgattaaaaacatagatagccaagggaaaagtaacctggaggtagtgagagaatcatatgattatgtttatttagttcctttactttcatttttcctggctcagtagtcaagcatctctatgttcgaggtaacaagttgttttaatctgaaacttgcacttcataaggaattctattttatacatatgcaactttgaacgctttgacaaaaagagaaaagaatctttttagtatttctgagaatgtttgggttatatttctgatataacaataaccaaatatccaagtccctcataaacatctacaaagacaaaattgatatcctagcgagaatataacatacctttgcatatgctacacttgacaacattcctgaaaatatcaaaaaagcaattcatgagcttaggtgaatctggggaagagagagaagaacgaaaacaagagattgaggtgagaatgattactggactacaacatctcgatggcatgaaatacaggtgcataactccagattatctctcttgcatgtaagatagaaaaatatgtctctgtgaagaggcttcaactgttttctctttgtaagcaaattaaaatgcccctgaaccgatggcaaagacctttcacttacagtcatttcatacaatttaatcaagtgtaaaggaatacgattttcaggaaaccaatacttgtcctttccatcctgacttttctctatttcaatgatgctcttcattacacgtgaaggaagatgcttttggctaccaaaagcaactccgtaagtaaccttgctttctacaacttttttgctacaaacaaatgcatttctaaaagcagaagcttcggcatcaacatttttcccctccaagatatttagctcgggatgaacgagttcactccatcttacatgcaaatccaagtatctgacctgatcaaaattttaatctaagtattaaaagttcagttctgaactttataattctaaatgcttccaaatatgagagaacaataaacaaaaagaaagggggcaaagaacacagtataaatgcaatgcaactgatataacaaacctgaagtgcaagctgggaagcatttgtactcatttcaacagcagctctccaaaccaactgtctgtttcttttaggaatctctggaccatcagtataaaataatccagagatctttttcgaacctcctataaacagaaatccacaaagcatacatttaatttccaattaattgtgtatcactaatgagaagaaaatgcacgtcttcacctaaatcatggtcatgtcagtgaatggttgaatgacttgttttatgggaagggttaagactaaggtaaagcagttaccttgacgagctgcttttctgaccatcgaaaggggcaaaattgctttctggaatacaagctttgattgctttcccccttgccaccagacaaaacttttattatggctaccatcagttgtcaattcagagatcacagcttgcttcttgctacgctttccaataggaccacgtttttgtgtcactccagcagtggacattgcattttgcattgcagaatattcaactaaccaatcatcaacgagcttaacccaatcactagaaagtgcaaggatccggatattttcctcaagctgcagataaaacaggcgtccaacaggttgtaatttcgacgaggaaccattgcttttattatttagaacattaaaaaaaaagggcatccaccaaattgaaaaatattcgtaattcgtccaacgtgcattagcataaatggtgggaaacttgtcaataacagagtaaatgatcaactaagtacaaaagcatgctaggtttatgatcaactaagtactaaagtcaaattctagatgactttcttattaactgtattgtatacatttctacactgcaaatcttaactagaccttcaaaaatctaaataatttatacttaagagaaagatatcaaacttaagttttgatctataagggacaaagatgcaacttgaaaggccaacaaaatacaaagtacagaaaattgaaaggcaaaagctaatagatcaaagaacaaaacatacttgaagcaggaagcgttttaattcactgcacgttgatgcttgttcaacctgtttacgccattctctccgataatttgcattcatgtaggggccatgtaatagaccacataaactttcctccatatacaatatgtatgttgcaatgcttgcaataatcccttcactctttatggaacggatgctggcaagggtcttcatagcacttttagtggcagacaaggcagcatgatttaacatgcaccctcttttgctcgaaacagaagccttacatgaaaggcaccaaccacatctctctcttggaacctctacaagcttcttatcagaagttggccagaagaaacgtgaggctgttagtgagaatgctttaacttgcaaatagttttcagacgaagcttttttggagtctgaagcataagcttcagaattccgagttccctctggcaaaagagtagccaatttagcagcagctgatgcagcaaagtccccatgcatgtagtaatttaagtaggactgaggtttataaaggtgccccataaaaacacaattattatttgaattgtgttgatccttccctaaagctacagttctgctatcttttctttgagaagatagattcaccagacaattactcccattaggatgctcaatgtagctgcaattgctgttttctgaagagtatgcaataagtgatctctcaccaaattttgactggtaatatcagatgaatcagcatgctgtctaactaaacttgtcgatccattcccctcatgcagcttcgtatttgtgagagggtactccaattgcttggtctcaccactaatctgagatccaggacagtggtcaacttgaactgggtgaatagatgtcccattatctacactactttgatctatactagcagtaggacagttggaatcttcttttagatttgataaatttgcatccttgatggtcatctctgaaaggggtaagatacttgagggaatatcccaatattgcaaaactgcatggcagacccccaaatacaaagattcatgttgtggagaggtactaaagcatctgcaggacttttggaatgtcctccctattgtaatatcgaaggcatggttcttccgtgacagaagccttgagcctgaaaaaactatgtcagcagattgttcaacgaagacaaaaagttttaagcagcaccaataacaaaccccaaaaatatgcagaaagggtcaaagtccaaggctctaaataaaaataaaggatatacttttgaaagaccagttcaaaaaaatggtgtatcgcaaaaataatccatcacgtataaggatgttcggcatagattcaataaataatgcaactactgaaacaaaggagtatataacaaagatgaaggaaacatacaccaacaagtagttgcaagtacccatgaagatttgcccatatgaatcaatgccaagtatttctgctcctctaagggacgttccgaatgtaatagttggccccaacttgttaattgtacactctggacaataccaagaaccttctggtatagacaatttcaataacacctatacacctggtgtgatatgcggatgggcacccatcacaacaaagcaaggttccatccatgccacaaagccgacattcatcactatttcgatccacatccatatcaacagcatccaattcaccttttttactcgtttggctcactttaaaagccccaatagattctctttccttacaggcagaagtttttgaatacctgggatgaacccttttcggtttgatttcaggaggatccatttcttctgcatcgtaatcgattccaacttccgactcctcacgtaaatcaatttcagcccttagttctgcagaatcaagggcatcatcacaaaggacttgcagaataagcagtttcctaccaactgataaagaataataatcccttcccaacacctcatcgtaaaatcccttccactcaggtccttttgtgtatctcataattgttaaatactggaccataaaaacaggccaagtcaatgtatcaagcaagctccaatcgatgcacctgaagatcaattacgaaataatcttaaagttcaataaaacaagtcatcgatacaagaaagtttaggaacccatgatggtgaagttaataaataatcacttaaccaaaaacacgttggcaatccaaatactggaattagtaattcacatctaagcattgatagccaacagcaaacccactgtacaaataataaaattaataacctattatataaaaaacaattcttctaaataacatagttttttttaaaaaaaataataataacaaaagagagagaaggataatggtgtcaatttggtgaatatatattataggtagctttcaatgtgatgctaaacaagcagcaaactttctggttctaaattcaaaagatgtcacttggggtacttgcatttgcacttcaagcttttcaattgaattggaaacattctttcaaagcattgctttcacagctacataactaacatgaacaatgattcttactgtgcctctttaattattcttcgaaaaaatgctattaaaattatctaatctacagagcacgcagaagtatatattttatgcataagtacctcaagcattttgatgcaagctctgaaccatcttcagagattctatcaagatgacgcctcagagcacgcataacagaaacatggattgcatccgacaatgtatttggaacacgacatttaagagatcccacaaaatcatccaaagtaaacgggctcaagaacaaacagatgctaaatgatcgcaagaaaccataaactgagaaaagttgtgatacatactgctccggaacaccgatggtaccggaagaaggtggcaattgaggtggaggaacagctggtacctcagcttcaatgctcaagtctctatccctggcacactcagaagaatcatttgatgaatcagcatcagcatcaacttctccatcatcatttccagtaactgttcccccaggcaaatcaattgttttggatgcttcaaccttatccacatcgtttttcgattccacatccataccatgcttcactttacttttcaatatcaactcatcaagtttcttctttcgggtgttcaacttactggtaaaatccttgtcgtccaaaatgctcccacgaatctcacggctttccaaatcttcacagtccccatcttcgtaatgaactctatacaaaccatcagcataatacacaactttcccgagaaaaactccattatcctcaaactccttcatcatatatcgacccaacaatgcaataggtttcgtttcaacagccagcttcttcgtttcaatacccgatttttcatcctcctctctcctccgtttcctcggtcgtcccctttttttcacaaccggagactccatttaccaaatcgaatcaaatcctaacccaaacaacttccgaaaaaaaccaaacaaaaaaattcaatacagctaaacgaaaatgatccaacacttcatcgaaattgcagcaaacatctagggttcgaagcggatcctaaaaaatcagaaaaaaaaaaaactgcaatatcactaaaaaaaaatccacaagcattcaccgttttcgcattcgcaataacgaaattcaacaactcattaaagcaccagattgaaatccgaaaatcaaaaaaaatgcttcctcttccaaaaaaaaaaaacaaagcgaggaaaaagatgaagatgatgagaggaatccgtaccttgttaaaagtggagaagcgccattggagcagggataggaaggttctagggcaacaacgataaagaaagcgaaagcccaaaaggtaagagagaacaatggcctctctgtccacactcttctacgcgggttaaaaaatccaaaggccttcttgcgtagttgtaatctcacgactcgtccgagtttcctgatccaactcggccgagtgcaaatctcacccgcttttttaatattaatttacgaaaattaaccctaactccaaaaaaaaaaatattttatttttaatcatatgtgcgcatccacacggaataacctgtgtcttccatgctctcctccaataaatttgtatgctatagtacactttcaacctttgttttagtattcattattattattttagctaatttttttttagattgtgtatgttttaatttttttgaccccataaaaaatttaaaaactatctaaatagtatatagtgttgaaaaaaatagtttaaaccattgtcaaacacgtgtataagaaaaatactcatgagtctaataaaataatttaaatttattttcagtactgtaaattacttataattttttaaaaatttacatataattttaaataactaaacagtatatgttcctaaaaaaaaatttaatgccaaaacagataaataatatatcgaaaacaatccttttaagaattgtactttagaattaccctattatatatttatatat

SEQ ID NO: 185899 - DNA, 2814 bp, Cannabis indica
gccctacccccaacctagagtagttatgtggggaagtagaattaagctacagtttgttacttctcaaaatagggttattttgtatcaacaacacctacatacctttgaacctgggcctgccaagttggagagatttttgagttaaagaaaatggagttatttagtattaattataaattactagcactgctgctatctgaatccaatatcttcccttgcaatgcaggccatcactttggaagagatcaaagaatcaacagctaatatgtaactgacaaatgttttaattgtcactgtcatgatctgtatgtatgaatgtatatctcataaaaaccaatctaaaaacgaatgaattttcattactctgcctctgatgtagtccatatttgactcctgctcttcgttctactacacttgaaacacactcatacaggaggttcaataatacaattgaaatgaaaggaaggtatgagttttattctttgaaattgtttcaaactaagctcaaatatgctgattttcttgaatttataaaatagagaaattccaatctgtaaaatcatatttgaattaaattaatgaggagttagacgtagtgcccactttttgttttcacccaccattttaatgataaaactccggcgattctctacaaaagcaacacatgcacattcatgttctcctttcaagctctggttcgtcttcttttcctaccattcttgctacatgttcttcatttgtgatttcttttccatttgtttatgagttttaatgatttttattcaatttttacggttttccatgttgttttagtgtagttgagttgggatgagttatgatctttattatgtgtacatttgaatgagtttcaagcacgtctccacgtgtttaataaaactcatcaactatagttcatctgtttgaaattttttgaaacgttataatttgtcacaattgagtagtaaagcttttttatgagtttgatgatgagagtacagcttttattatttggttacaagtgagcaggatataatagaagggttagttaaagctgatccgtattgtctaatcaattgctctgtatcttgagacattgtttattgtacaatatagtagccacttgtgctcagtttataccagtgttctctgtggacatagaccttaaattgtgtttgcttttaatagtagatttcgtttcatgtttatttgagttcattcatatctctaaattagtaattttgtcttagaagttaggaaatataatggttcacactatgctaaagaaaatgttaaaggacagtttaagatccaacactccaactaagtgtcttagtgggttagtttttggaagcgtttaacacgtattgtgttggaggttggaggttacgaatccttggttatgtggtggggatgtcaacaaaattcttgagaacaaggggttctcggggcagaacgcttatgcacaattttagaggctacagtttgctgtggtatttctgatttggggtttgaaaagcctcctttaacgtggtgtaatggtcatgggacgacttcatttgtccaagaatgccttgataggatgctttgtaactcggcctggacttccctttttctcattctttgtttcaccatatgagttactatgggttggataacaagcctttgagtcatattgtagggatcttatcaaatcaagttgggttaagggtgatgacgcttttgttgctagtgtggtgaacaatgttgaggaggtagcgtcgactctttctgggttgaacaaaaattgttttcagtttcattgttttgatattaatgccaagaaaaaggagctggatcgtctttatttgttgttgtttaaagaaatgtggcctatgttcaaaaaggtggagttatcgtcgtgatattaatgccaagacgaaggaattgatgcatcttgatttattgttgattaaagaaacatggatgtataaaatggtggagtctcaacttgatactttgttataaagaagagcgttattggcttgccctgcaagatcaaagaacaaatggctcaaagtgggtgatcgtaattcaacttactttcataagtgtgcttcgtcttggaaaaagaggaatcacattgcgagtcttgaagattcttttggggtggtgtggatgtttatggaaggtatgagtatggtgcttcatgattatttctctactttatctacttctgatcgctccttgtaatgatgagtttcgtgaagttcttgataatgttaagtcacgagtgactcctgtgatgaatgattttctaattcaatcctttgatgcagaggatattagaatggctcttttttagataaaccctaataaatgtcttggccccaatgggaagacgattgagttctatcaaaagtatttggaagagattgttgttagggctagtttaacacaattgtattgtggggaaaaacagttgtagttgtgttgggagaaaaaataggtatagcagaattgtgaaaaaagctaagttgagtataattattaattttaaagtgttgctagttgttatgattctattataatggtaatggtaatgataattataatgtaattcattataatcacaaaatatataaaaacttatattatataaaattccaatacatatttagttatttttttcttaaagtataaatttatatgcatttgataaaaacataattataatattttcatcacataaaaaaaaaaaaaaacctcaagtatattctagcctggtgtatttggaccgcctacttacctttggctcctcacttgtgtgtatggtcc

SEQ ID NO: 185900 - DNA, 2440 bp, Cannabis indica
agtttatgattacacttcagtcgattatgttagttagtactgctgtgttttatctacttgtatataaaagacattttctcattttgtaaccattcagttctaataatcaataaaaaaacagaattcctttttctctttctgctctaataatatcatatactaactaaagtagtgagtgagctaatctccacctataaagatgcaaataattaatcttatgcaaattattttgtcattggcaaaaacacaaacccacctaataaaaaaccaaaccaataattgagaattccatgtatattaattaaaaagttacacattgagagccaaagagccaagccacaaattaactaaagctcagctaagccgagtgaagacctcagaatagatgatgacaaatataaatcataaaaatgtgaaaaaaagattttgaataaatttgattatttatttctatcatcttttaatatttatctctttgaaactaacgaagccaccataccaaaccaagcatgagtcaacaagttgaaactccccactctccctctcaaaataaataaataaaaaaaaaaaaaaaatttaatttttattttgaaaataaattttgttataaattaattttaatattgtgtgacaaatgagcaataaaatcccaattagaatattaataataaacttcgaactccatttataaaacaccgtcttcttccttcttcgactctctctctctctaaagactctattaaacttctcaacattctttctctctctaaaacgctcgtcttcataagaagatgactcaagtggatttggaaactctagtttcggcttgtgcaggcggcggtggaggttccatggatcggaaaatcgcctgcgagacacttgccgacaccgccgaaaaaccaccggagcaagactctggtgaaccggaggtaccgccggatttccctccggagtctttttggctctcgaaggatgcagagtacgactggttagaccgtaatgtattctacgagcgtaaagaatctcagaaaggaaattcacactcgacgaacctaaatccgaatttgaatccaggatcaaactcgaattcgcagcgattctcgatgaatttgaaatcgaaggcggcaattatcggtcttccgaagcctcagaagacgcatttcgtcgaagcgaaaaatcggaagaactgtaaagcagggaacgccaggcttttccctaagcgatctgcatcaaccgggaaatcggacggtccgatgatcgaaccttcgtcgccgaaggtctcgtgtatgggacgtgtgagatcgaaaagagacagaaagcgtcgctggaggaagaatcgccaaagatcgctgaaatcatcgtccgaaccggcggtggagaacgttaaaccggtggagagacgaaaaaccggattcttcgcgacttttcgcgccatattcagaaccggttgccgagaaaaagcagacgacggaagctggaggccgataccgatttccgactctcactcgggagatagcgtatcgacgagaaatcacgatttctcgggagttgatatcgacgcgccgtcgttcgagtctcatccgaggcggagcgtggaaatcgaagcccccggtttgggcggtatgaatcggttcgcgtctggacgaagatctagttcttgggtcggtgattcttctggtatccacgtggcgtaatctgattgggtgagaatcgtttacttgcggcgtcgatggcgcgcgcgtgcctgtgggacccgttggagccaaagttagttgaaagatggtcgtgattggcagtctgtgtgggacccaattccattttaaaattctcgttaggtgacgtggcacgttcaattgacggtttgcccaactctttcgttaacggtaaaaggaaacttaagatttcaacatttacgtttcctttaaatatatatatatatatattttttggtttgtaaataggataaaatgtttttgttggagtgcacagttgtaaattttctattttattttttaataaataatttttgtaattttcagattttgaaggaaggaatatttttcatacaaaattattattttgttttggtgaccgcaaattatggttatgaatgtttatttaaatatataaattagctggataataatattgatatattaaaaggaattttcaccgaaatataggagatcaattgtgaatatctgatatttcttcaactgctaatctccaaaattttgaattaatttttttaaactaaattatagtttatggaatatattcttgatatttctgaggttgtctcataatatttacaaacaatatttgtattgtatctgtttgcttttaattcaaaactgattgccaagctcatctaacaatttaaattaagtaaaattatatatttttacaaatttaaacatttaatttagtaaatataata

SEQ ID NO: 185901 - DNA, 1494 bp, Cannabis indica
  modified_base (1483)..(1483): a, c, t, g, unknown or other
atttatgtaaatacccctaaaatttagagataattatacaaaatactaattttgtacatttttttttatatatttacgttcaaagatatatattttttaatatttttacagagttctatcaaaataatataaaagcaacaaaaaaattacataagtataatagaaaagtaaacatttaaataaaacaaaaaataacatacagataacaaaaagttaataaataagcaacaagtagtaaaaacattaaaaactatattaaaaagaccaaatttttctgtaaaaaatgattttttacactatatactgaaatttcaaacgttttttttactgtggggtggaatttttttttcaaaaatactgtgtttttgtcttcaaaaatacagtgtaagtttcatattgtgtactgtgttaagtttttattgctgttttacggttatttgttagttgttgtactgttgtttttaattaaattgtttagttgttttacggttattttataaaaaaacagtatttttgtaaaaaattctgtcccacaataaaattataaactttgacccaaaatttataaaaaatccaaaaaaaaaaaaaacataaaaataataaaaatatttaaaattttgtacaaccgtatttttataattttttttattatttttgtgtatttgtgaaataactcttaaaatttatttaactaaagaaatacatacaatttattagtactaatcatacaaatattaattctaacaaaaacatatacgtattcccaaaattcgatattatttatccatgtactgaataaaataaaataaaatgtttcacacatattattgtgtatcgaatatatctttctgtcctatataaattataagttgacaaatttaaaactaaatgaaaagttgacaggtacaccgtacacagtacactactcaaatttctcttctatgactatagctagctatcagtatcatacaacattgtagttggtctataaataatgtatattatgttttgacaaattaataccaaagattaataaacaaataatttttgcaccatttcccttgttttttccatgtctgaatatttacatatatctttatatatataagtgtgtatacataaataaatagaagttggtattggttgttcaaattttgtccaaaaaaataaaaataaataagttggttgattaaagaccaaataagagctataaaaaagtagttagtaatatataagatataatataaggcaggaattttctgatagaatcaatggatcgatcttcacaatcaaaatatatattggattaaattatagaatcaatggatccatctttataatacatattggattaatttaacaatattaattatagaagataaaaagtacttaacaatgaattcctaagattatgataattaagacttgaatgaggaacaacatgacaaaaacttagcactaacaattttaattcttcttttcngaaaaaaaaaa

SEQ ID NO: 185902 - DNA, 4163 bp, Cannabis indica
gaactcagattacagtgccgatcctgaagagagacgatgatgatacgattctgattccgataatggttagattcactctctaaattgttaattatactttcaataacccatcttgagattttccttgattgaaagaaaatcatttcttggctcagatttttctcaacgttcaaggaaatcaaggtttgggagagagaatgaagaagatgatagaatggatgatcctaatggtaatatttccattcctagaaattttacattttctgaaatttatatatatatattatataattaagtataatggatctactgctacagtactttttactattgcttttgaaattttggtgaatttggttgagaagagagaatgaatgagtataaggcagctctgcacaattttgaaacagagcaaaatccaataacacttgtcaattattggctgtttttttggaagtttctcttgtcattttcatttgtaagaagcatatttgttcagttatggcaacaggttttttctgcataatcttaaccaactggtcttagtgtaattaggattgtgaaagatctaactttttgtatgtcttattaacagaatgtaaatatatagtttatgtgattacatataactaaaatagtagttttgtaatattttataacatttattttggtgtaacttttgtaaaataatgaggtattttggaatattttaatacagatggttaaacctccatttactataatatatattctctctctctctctctctctctcttttgacaaaagtataaaattttatatctaatatatgctcactcatttaaactattaatgagtacaagtaaatatattattaaataaataaataactatttgtattcttagttgcttactctatattttttattatgtattagttgtttttataaaccatgaataataatattaaaagctatgaaaaatgtttcttcattataatcacaatcttccatcttcacattttatttagtccatcttaagttccatttgataattttatacaaatggtattggatgttttgtgagagtaaaagtctgctaacaaatatggttttattctctgaaattatgaggaatttcttctcaatttgcataaaaaagcatacatgatttctaaaaatgaaaattaaaagagaaagaaaaataaaaagtggaaaaatattgtgatgaaggatcattagatatcaatttaatttaaaaaattggatcaaattaaaatcataacacttgatatgtaattgtgttattggaatatctaactcaatatatgctataaactcaaaatgttattgctaattatcttgaaattggaactgttttaatcttcttcttcttcccttttcttggtaggtactagttggtgttacataccatgttaacaatttcatgattttaacattaaataagctctttcatgtgtttatatagtttcaatatttagtaagctttgtcatgtatttcattcttcagttcttgtgttcttgtttgtaaaataaaattcagatactcttccaaggttgcgaagacgaaaatcagaaacatttagagcacaatatataaactcaaaggaactcaggtacagtgcacccgctccctatttttccaagtctacatgtaagtctaaatcttagttgcactgattcttattagtgccaagaaagagtatttgtttattattggactgtgctaatcacttgtctttgtttttccatgtttttttgttctcttcttttatagaatatgcgttgcgacatggaatgtaggaggaaaacttcccccggaagaccttgacattgatgaatggataggcatcaccgatccagctgatatatatgtgctcgggtaagtattttaccctttttctttctgaatttcttatgcatttcatgttttgattatgtgtggataatgttctcaaattactatcattttaaccatgctagctttccacttttgttagcaaaaataaacaaaggggtagcatttttccaactctaaatgtcgatagtcaaactgttctaacaaataattcggtattgaaaaagacaatgtcattagaaaagttaagagatcatgctcttacaaatgcttttcaataaccaggcttcaagagattgtgccactaaatgctggaaatatctttggtgctgaagacaagcgcccggttgcaatgtgggaaaatattattcgagaaacacttaataggattcgacctacaacaaacaagattaaatcgttcagtgatcctccatctccttcaaagtttaagccatctgatgatatacctgatattgaagaagagatattagttgatagtgatagcgatagtgatttaaacgacgaactctatgatattggtgaagaagttcatccattaataaatgaagaagcatcagaagtgttctgtaactgcaaggatgattttgatgttgaagcaacagatcaaagcacaagtgaggatgtgattttggatgctgaaatggttggcaaagcaaatctaagcaggcaatattcttcttcaaagaggttgaatcgacttaattgtttaaaaacttacgatgatctattaatcgaacaaggtctagctaatgtgaaattaaaaaagatgcttagtggaactgaaaggattggtttaagttggccagagcctccattaaacttgttatcacaacatttgttagagagaccaacttcctttaagccaactaaatcattcaaaccatcaaaatcttttagaacatatacttctttcaagtcaacagatggagcatcagatctagctttgcttgcagaaattgatctcgaatctcttatgaagcgaaaacgaagatcatcgtttgtaaggatagtaagtaagcagatggttggtattttccttaccatatgggttcgtaggagcttgcgaagacacattcagaatgtcaaggtgtctactgttggtgttggtgttatgggttacattggtaacaaggtaagcttttctcttattttttctcaacaaaacaagttttactatattttactcattgtgaaccgattttgcttaaaataacttcatttgcttatcgacatttcagggatcagtttctgtgagcatgtctatttatcagacaatgttttgtttcatatgcactcatttgacatcaggtgaaaaagaagtagacaaacttaaaagaaacaccgatgtccaagaaatacatcgaagaagtcgtttccattcagtttcctctataggccttcccaaaagcattcgggaccacgagtgagtacttatggaatttcgttttatgcaattcaacttttgtcattcatttcagtaattgaattagattgacttggattgaacatgattttgtgtatcttacccttgtgttagactatgactaagtaatactctattgcttttctcttgcagaaaaattatttggttaggggatctgaattaccgaatcaatttgccacatgaaaaagtaagagaattaatttcgaagaagatgtgggctgagttgattgaaagtgaccaggtgggtttgtatttcttcatataggacttgattaatgtgtacatattcttcattaactatgaataagcttatgcctatgtatttggcggttttgaagtttaaaccactctccatgtcttactagttaagatttattatcatgcttttatttctgatatgcactagaaaatacatgttcaatcccaattgactgtgatctgaaaaatttaccttatacattattgagaatcatggggttacatctcaaaaccaattggtaatgagtggagtagccagcccatattcttatatatggctcaatactttaccatttattcaatgtaggacaatgtccacaatatatttcttactgtattagtaagtagtataactgaacgaaaaaaactgttttgtattgaactttcaaatgaagaacacattgttgcttgtgtggcttaaaacaaatcccaggtctcgtggtgttacgccatatatgctttcgtagttcaaactattcagttgaattttacaaactttagttatgtattgaataatagatggagaaagatcagtgattcatttagatgcagtgttaggcttataatttgctctcatgggtac

SEQ ID NO: 185903 - DNA, 6634 bp, Cannabis indica
tcattgtacattacaactacttcctgcctgccatggaatattcattacattatttctatattgaataaactacaacttccttaaatatatctatgtatctcctgctagacttaatatcttgcacactcagtaatctctgcaattttgattgattgaacagcacaatttgtgtattgtgctattaatgtatcaagagatcgaatactcatacaaatttctcatgacatgatcgaaatccaaataactgtaagcttgctcctatattcatactgggttggaataaatttttgtccccctacagactattcaccaagattggacactacaattctttccaaccattcattaccatagttataccttcaattttttcttatatatatagaaataattttacctttggtgctcctgaaggaaaggttgctgggaagactggggatccacagtagattcaggtctgaaagtgtaaccttatgtaagtacttagcaatattgttatgaactgaagaaatcaagaaatgaaaagagtaaaaaggtacatagttgtttcaaaggatgatggtgataatgaagtaggagtataagaagattccctctgagaggcaaggttttggacattctggaattcttgtaacactgttttgaaatcttttgcaagcttcacatcttctatcttcttactcttggaagtagctgaaaactgaaacaaattgcaatattgaccataatagtaattgtattttatataattcatcttcttcttcaaatgaattaaaacaaagcaagaaagatttacatggtgatggtgagtcttatcagattgagttaaggatttcagctgagctgtagtaactttcactatctgaagtattcgttgtctgctttcatgcctgtgccatcaattatatataaattatataaacataatatatatatatatatatatatagatgatatgatatctttttctatagtaaagttagtaaaagcttacagcttgcggcggtgatcgggagtgtccttggcggttccgacagcatccaccaaacgtcgaaaagcagcaacagaagtattgagctgaaaaatggctgctgccacaccttgagaggggacttgggtgtttggcatattcttgaaagctcatagttatcaatcacagtactatttgctctctcaaagattcaattttgaaatcaaatcaaagcagagctctgaattggatgattatgatgatgattattatgacacaacacaactaatggacccaaataaagatcaattatttatatagtttctagaaagagtaaagaagacaacgaaatgtgggccattttattattatggcagctggactattaaagcatctttctcttccaatcataacgcataaaaaagttacaaataaagaaagataaatatttttttaaaaaaaaaaacctttttcattaagatctactggtcaaagtcaattgtacagttgagaatatctgggcagttgctgttgtaataatttataaatctttttgtttgaattgtgtatcaagcaacaaatatcaaaagcgctattcctgttctgttctgttgtgtttgatataatctttattccattatgtttccaagccaactttacaccttcaaattttccatgtctttactccaccaaaaacatcctgacaaagtaaagattagcattaacagatcagcttgacatacaatatataatttctagccatagctaagagacacttacccctttgcatctagtactttcaactttggtcaattcccacatttgaaacctgtaacaaatgcctggattcgaaactgcttcgtgtgattcatattttgtaaagatcattgctcggtacgaatatacaagtctgggaaagagtccaacacaagaacatattcttggctcccttctattttactgcaaattcaaaagaaacagataaggagaggggtaaatatatcaatacggcatagcttctagaaagaaagagttgttcttgaaagtacccagaaaataaaaataaatataaaatctagtattttataagagctggtaatgaagcatgaagttctgccaagcattgaaagatccaattcaagagttgttctttaggaagctctaaaagaagttcagcctgcaacaaagaaaagtcaattaaattaaaacagatcacaccataaaagacatggaaatacaatccatcaacatcataagactgattaccttgatttcattggcctcaaaaatcaaagaatttcggtgagcctcagaaaccattgaatctgtaatgagcttgaaaaccttcttgctcatgtttgtttccataacaaccatttttcctgaagcatatattttgcttattccaaggtctgctgccattctccttacatagagcttctttagtaagatctccatggaatgaggctcttttccatattggcgtcgcaaattctcagtaaattgcatcaaagtccacatgtctttcccagctgcgttttcggcttccttaataatttccaagggtttctccagataatttatgtaatcagaaggaagatgaggatttatgtttaaatcaacctgcaaacccattaaatcagctatttagatgagttatcagacccagttgtgacattaatacttatatgtacgccttttacactgtaattttcacaataatccatttcaaaagcaccactagtgtcttctttctgctatagttttgatcataaagatgttttctgggatagaaaggtttcattgaagaaaaaaaacaataaatgcttggagctaaagccattatgacttttgctcacgctcacggctaagtaacacgtaatagcaaagtggtaatcgttaggattataaaaaatacttaagttctcataaactcttgtgcaaggagaaaaacataccttcattgaccagtatggaacagaaactacacggtgttcatcaacctggtaatcaaaacaattacgaaagaaaaggacagaaagtcaataatcaaaagagcaacatttcaagcaattcatacagacaatcctatttgatgacagcagcgacatgtctgtgtttgtcattatacagttaaagcatgtacatttaaatatacaaaacaaacaagagaacccactttgcaatgaataatgttaactagtgtaatatgcacaatctcaaattagaaatatgttttttaagtggatgataatttacaagaaaaaatagaaacaagagactacagctgataaaaaagaaaaagaaacactcaatccgcagatcataccttcgacaagctctcaaagagcatttcaaagaagagatcaattccaacatttccaacatctccagtctgctgctcaccgaaaatgttaccaaaacctcttatacccatatctctctccgcaagttgaaagccttgcccaagttcacggcattcctcaagggcttcgagtctctcctaaggaatggccacaatagtcaatttactgaaaacccaaattgtaaacacttgtagttgtatctagaagacagaccatatagacaattgtaaagttactaggaatggagaaatggaaacttttaacgatctggaaacatgtataatggtataaatataatgtccctaaaactaaaagcatttagaaagcataccagagcttgatcagttaagagtgatttgtctggataaaataagtgtgcatgagcttccttatctgctcgtcccactcttccacgcaactataaacaattaaaaaagcaaaggcataaaaattattacacagaactcatgtatatgtgaggtgggttgagaagctcaggaactatcccataaatgatagtagtagatcatatatttcagaaaaacaataagcacatgttgtagctgaccttgaaactagaaatgtgttacttgtgcatcaggaataaataaaataaataaagaagaagctgacttggacatgagtaatgcaactagcatgtatgcactgctttgaaaaatctccaactattgtaaactcgaaaaaagttcctaagtgactaataagttattataatctgccatagtaggtttccagaatataggtttaagaatcaatctttgtctcttccaaatacgtcactcattagtctcatttgtaaaaactgaaagatggaaatcaaaaaggaacctggtacaactgtgctagaccaaattgttgaacatcctgaactatgatggtgttggcattttggatatcgagaccgctttctactatattggtgcaaatgagaattttgatatccccttgtgcaaatttctccatagtttcctccagctgctttgagtattgctgcaagatcaataataaatccacttaaaaaaaatataaatatattataggcactaaatcttatgacagttaatgcttaaaagatagtacctttccatgtgcaatagctatttcaacatcgggaaatgactgttcgagaaactccatcacttcctcaagccctgaacgtaagaaagacattgaaatacaaatcaagaaaaataaaaacaaggagataattgatgtacactactgaacttttttccattaagagggcgtttcttttgcttctctgaattttaacaaattaatctacagccagaaagaaaaaagataacaataaagttttatctttcacaatagcaaccacatggaatttaacaagtatctaaggactaatataactccaatgaaatgacacaaaactgaaactatggatgtaaggttcaatgaataacataagactgtatatgagtaataaaagggttacctttaatacggggcaaaacgtaaaacacttgcccacctcgatccagttcatacttaattgctgagattactttctctttactgtgtgctgaaagatgggtttttattggaactctttcagggggcggagttgagatcaaactgaaacgaggtgaaatgcataactacaacttttagcactaattaccttcaagttttgagattccaaaatttagtcagtcctaaaaccaaaattacaacacttgttcccatacagaggcaaaataaggaagcgttcataaacaatgatattcacatggtataaagattgtattccgaacaactaacttaattatgtgcatttggatcgatcaaagataaaacctacaactattattgtttctcaaatttgcaaatataacaaattctaatgaactgctggatccagaattcatatcttaattcacttaattaccatgataagttaattacctagcatcacgaaacccagtcaaggctaagtaaagcgttcgcggtataggtgttgcagacaaagtaagaacatcaattgaagttttgaacgaagcaattttctccttctgttttacgccaaacctctgtataccagaaataaagtagagcacggattccttaagtcaacatggacatgattccttaatgataaggcaaatagatttaaaagtacaaacctgttcttcatcaactacaagaaggcctagattgctatacacaactcggcttccaagaagtgagtgagtcccaacaataatgtcaaggtgcccatttttaatcatttcaagatgttcatctttctctgattttgtctgcatgaaggaacataattacttacatttgactctgttaatcatctcaaatcatcaagactcctcaactattaaatgaactagttatcattttcaaaatagcaatacctgaaatctgctaagaagtccaaccctgacatttgagtacatagaaaacctttctgaaatgacatggtagtgttgtttggctaagacaattgttggagctaaaaccatagtttgcttccctgctgatactacacagaagatggcacgtaaagcaacttcagtcttaccaaacccgacatccccacaaattaaacggtccattggggtttctctctcagtcaaatccttgtcaacatctatgaaagccttagttaagaggaagacaccaaacaagggtattttctcagcaaagaattctataaccgaaaaacaaagcaaacacatttccaaattagtagcagaaagtacctgcttttgatctggtgtaggttgataaggaaactgagctgtgaattgagccatggcagaggtcttagggtagggagggcgtctttgcttgagcctatgtagatacaactccatcaaatcaacaaccattttctgaactgcaagctttccctttgtttttcttttctcccaaacagtcgtatcattcaatttgctcaaagttcgaggctttttcgtttcattaggactgtaataagagataaaaatcaaccatttcatttaacagtagcaatataagtcatgacacaataatacaactcaaaaatggcacaaaattagcggatttgagttcagcatactggtcaaaataagttaaacccgattaaatttcaaattaaacacaagttaacctactaaaatcgaaaacgccatgtttaacacaattaattgcatattataaataaattataaatatgctactgctgacataaaattagtcaatgtattaatctattaaggaaattatatgatacatgtttaaaatgacaaatttgaaccca

SEQ ID NO: 185904 - DNA, 4521 bp, Cannabis indica
agaaaaaacaacaaaaaattaaaaaaaaaaaattacaaaaatgcagttataaataattttaaacatgtttatagtttttaagattctatttacaaaaatatgatcttttaatgtattttttatattatatttttattattttattagtatattattttttattttattttaatgttatttagatgttatttttatgtatttttttttttcataaaatacgacataaaaaaaataagtaaaaattttactttatttaaatttccaaaaaagaaatatttgtattttaaaataatttttttgggctcctggtctgggcttggcccattagcccaggaaggcccatatgttactttggccactcttcacaaaaccagttcttatttgtaaaataaacgaagaagcaatgagttcaagcagagcactcggaggcattttcttccacagattctgcaatggggtttctccaagatacccaaattccataatcttccatagtataatactgtataatcttcttctccaattgcaaattcacttctattgtttttcttttaaatcttactttgattcacttcttcagggaatggctttctgggcaagaacttaccggtattatctccatcttcgtcttcatgggcacgggtttttcataatggatgtagcagtatagtactagggttaggaccatatggactgtatctcctctctgtatggggagacgttctagcaaaatagctggaagaaaggtttgattttgattgttgtatttgttaatattgcttgttctgattcattgttgttttggttatgttttactgactctgttttgggaactattaaagctcaattaatattttcagtgttttgtgcataccaactgtttgatgaaaatcccaagttgtgtatatcaaagcatttgtctttcatcattggggttcttcattatttagtgtttttgggctaaaagcatagtgtgctgaaattagttttttatctcttatgtttgtgcatgttatttttagtttcttttatagttttaccaccttgaggaaggtgattttgaagagtgggaaagtgttacactatgaaatagtgtaagggcttactagtaatctgtaaagggtgtgatagactataaatatgtaattgtgtagctattgttggatcgggaatgagaaaatataattttagtttaattgagtgattggcactgtctcgaagagtacattcatttggagatttgtcctgtctcgaagaggattattatctatcagaaattctgttattgtcattctcttttacaatctggagtctcaatgtgcttggtttcacaataataagtgtgtattgtgcattatggggtatgacaattctgatgggatagttgaattgcagatgaatttctttgctttaatatgtgtagtttacttgtatcgttttgcttttattctaatttggcttgagttatgaatgtgaacagtatgaaatgtttataataaagaggtaggtgtaatttttattaaaaattatgatataatgctatggtgatatcagctcaattcctctaaatctttctcttgtttcttttgtttagtcttattcatttgtttttcggttggttgttcttgttgttttccaagagttactcctttgtttcttgcacttgtctaaatttcattcacttctctatgtatattttgctcatgcatgtcatgcatttcctagcaaattttaaatttggatcagccttttgtatgaaaatttctgaccgagctgtgttaagacaagtatagatctaatttgacgacatgttatgaagcttgaggagtatgaagtctttaatgaccaaagaggtacggggcacaggaaaaataaagatgaatttgatgtgctcccggtcagtcacctgagcacaaataacccacaaagcaatggaacaataaaagaattcacactattatggtgtgaattattgactggaaattaagagcagaaattgaaagcaaatagagaaaagataatggtcctttcggaccaatgagtcaaagaatgttctctattctcgcatgaccccaaaaagcaaaaactaacaacaatatatcccccttttccaacaaactcagtaaagttcaaactactccttacaacatagtatacaaggcttatcagaattataaataattgaggtttggaggaattttcttccataatattctagctaccactgaaagctatctcacgtggttgggtgggtgattgtgtattagtggtctaagtttaaatctccattaatgtttgataaaaagacaaattctatatctatctttattagtcatgtatgagagaggtaatgacatctttcattaaggcatctgcttagttttctgtcaattcattttgttgcaggggattcaagatgccaagaaggcaaagctgtatgccaggattggaaaggaagtagtttctgcgtaagttagtagctcttaatagctgatacattagtaattgtaaacattacaattacgattttgttagtgcatgtttcattactttcaaatattcattgagctacctactttgtccttttcatgttgataccaaaatatcgattttgttttcatttgtaatgcattactttcatgggcacaaaatttatttctcagtaatgcagcgtgaaaaaaggtggtacaagtcctgtatcaaactcaaccctggctgctatacttgagaaagccaaggagctcgatgtcccgaaggatattttggaaagaaacattaagagagcttctgagaagggacaagaatcttacattgaaaaaatctacgaggtaagtttaacttggactacagtttctgtttttatgtaatgaagtctggtattatctgtctggtttgagaaatctattacatcatgtaggggatttagttggttaagcgaaatgctacttttaactaccaggtatatggttttgccggggtcagtattgttgttgaggttctgacagacaagataactcgatcggtggcagcggttagagaggtagtgaaggactgtggtggaaagatggctgacccaggatctgtgatgtttaagttcagacgtgctcgagttgtaaacataaaagcctcggacgttgacaaggatcaactccttgatattgcattagatgctggtgctgaggatgttattgaacctccagtatatgaagatgatgatattgatgatgatacttcggaaaggtaatatagcattgtaaaaattacacttctgatgatatttattatctcaaaattctgattaagttgttgctctctgttagctactataaaatcgtaagctcctcagaaaactactctgcaatactgtcgaaactacgcgaggaaggaataagtttcgagactgataatggttctgaattaattccaattaccactattgaggtttgtttatgatttcagtctctgcttgtttgaagattgttagcactaattttgtcttaagcataaacaaatattttctgttgaaacaatgtcaatgtaaaccaatcactttcaggtagatgatgaggctatggaattgaacaaggagcttatgtccaaattacttgatctagacgatgtcgacgctgtttatacagatcagaagtgatcgaaaccgtctaatgttagtcataattaaaccccttaattagtttcggcattgagtggtatttataagcttttttttgcttaatttattcttgtaaacttatcttccatatagtttgaatgataatttaaaggggattgtttattgttgtatagctcatctttatctgaatggtttatcaaaatcccttttaagtaataagatttttctttttaagtattactattacatgagttgtttggtactagacattcttgtattctaatcacacattgtctaatcaaatccaattttctctcgttatgttcttcaaaaaaatccgattcgtgcagattaaagtgtttacagcaactttagcagtttttccaaccatatattttttaaaaacatagaattgtattagtttaatgagtgtttatatatcaatgtgtgcatattttgtgttaataagagttagtctcgaattacttttgcaagtgtatgtcttgctttctttttttagccaaatgttgatgttccagttcatatacacgagtgtgtataataataaccttgcaatactcaatagggtcactacttccaaggaatgtcagggtcgggtctatgatactttttggcccgatccggtttggcccgaacactctcttcagcctggtgggttaggcttgacttgagataaacgggtggcccgactcgccccgatacttttttggcccaattcggcccagccgaaacactctcttcagcctggcgtgtcaggcccgacctgagataaaggggtggcatttgtcctgttgggtcgagccccgacctacgaaaaatgcccattttgtcatctctattacttttatctctatcggtagaaaagtagg

SEQ ID NO: 185905 - DNA, 2918 bp, Cannabis indica
ataaatatatcaaaatgtaaacataaaatctgagaatgaaatcataagaaatttatatctccaaaggctacaatatgtttaagatgcatgcatcatgcatcacctaagtgcttcttaaagaattcagatacaaaatgtaaatgaatatcccaatgaaatgtttgcaagacatttggaaatatatgatatctttcttctttcctttttctttctgagaagaaactgaacttgtgttaataaaggagaacttctattaataaactgttcttgtctggtttcatctcttttttcttaaaaaaaattattctaaagcacgatatatttcttgtctggtttcttctattaataaactgttctttcctttttctttctaggaagaaactgaactgttaataaaggagaacttctattaataaactgttcttgtctggtttcatctcttttataacatttctttttcttagaaaaaatgttcaattaatttttttctaaactacgatatcaacctaaccctacaagacttgggggcaatgaaactatagcaattgctatgaagaaaagtctgactttatcactgtagaaatgtacaacaggaatctccaatctctagctaaatcaacatataacattcctttgaacttgttgatgctgtataacaaaatagccacccaatatcgacctttatcctatggacttccagaactatcctcgaaatcttaaaaaattatattgctctgtgctctctaaccagatcaccccaaacagccatagcaattatagccacagacgtagtacaccatttggaatacaaatgaattcttgataaaactacaagaaaaattcatcagtggaccaaaaaagattgggatatggaaacttactgttcctagtatatcactcacgtcaactgatgcaaattcacacgacagtgtaggaaagctacaacaaaattgaagcaatattagtaatgtagtgaagaaaatgaagacaaggagaagatataactattctaattaaagttactacatttataaacacatctagaagactgaggtcccagcataccaattgagaagcaactcttataaatacaccaccaccggtttatggtcgaggaagtacatttttctaaagatacttgtgcatgtgaaaaacaacataatcgaatacttacactgagcttcaaaattaaatcgagaccgaaccacattattaatcaacaactaaaactcacaatgtatctctaagagcttagtcaaaaaaactctctaaactatataaaaccaacctctaccaaggaaccatcaaaattcagtcactgagctataccttatatcaaaatcaatacgtaagtagtctccatcggtactcttgtcaacaatgacagaagtagaggtgctgatggttaaatagttattcagttcctgcaaaatacatcattcaagaaattgtgagaagaatcaagcaaatgagtagctaaacttcctagctttttagaagaaaaagaaaatcacaaataaaaactggtagacgaaatattagtcctaacaacagaacaaaaagatagtaaaaacaatcaaaatatatacataaatatataacagcgataggatcgtgtcagaaaaaacccgccaaacatgattccgagatttatgaagcaacaaagtcattttattccctagtctatctgttaaaacccaaaagaatcaacaaatgtgataagataacataccattccaaataaaaataccatggaaagagctgcaataatggataatcccgcaccggatagtgatgcctcagttaaatctcttgggatcttcctgtagacagggaacgtgataaatgaattaacaaaatatcagaatcagaagtttatatgacttcaaacaatccatgaccaaaccagagaacacaaagcataaaaaagaagtgaaaataaatcaacttaagaattcacagtttatgaaggtgacatgacagcatataatactcactgagattagatagaactgttctcaaaaagtatataactatggaaccgtggttcttaccctaatcacagggcattcatataatgccaccaaaagctcctttttttgtcattaagtaataataatgataattaaaaaacatcattcagagcatctcatatttgggttttacgcaattcctcctaaatcatcactgtgatatactctcattagtaattcaatgatttcaaacacccacccatctccgaattgtacaacagaacagcactacatccaccaaaacaatgccagaaatataatagtcaactcaaaacagttcaccaacatcaaaaataagaaaaatttattagttataaaacctcgttctaattatccatcctgaacacacagcaaggaatcaaatagttaacgtatgaaggaagagcatatgaataaacccaaaaccccaaatgcaatgaaccaaaatcgtcaaaccaagcattataagggttaaaatatggggcaaaaattccaatgtaaaaacaaaaacccattaatccccaacttttaaaaatccaagataataatcgaacataaagaagcacccccaaacaaaacaacaaatagaacaaacaggttaacgttacaatgactcaataacatatacgaatctaaacaaagagatttgatggtgccgattacgatttccaccatcattaaaaagataatgaaaggagctctggcactgctcagagtaaacgaactggagtatagtgaagagagagtgagagagaggggtcagagacctgtaaaagtcgaccgacttgagcttcccgggcgaaatcatggtggacagatttgttgttgatcagaagagagcgatgcgaattagctcacgtcccaataataaattcggtcattacagatctatatcatatttattga

SEQ ID NO: 185906 - DNA, 897 bp, Cannabis indica
tttcatgtcattttcacacaaaaatatctcgaaattatcaggctattaggaaattttcattcaagtaagataataagaggatataatgaataaataaaaatccacattatttattattattattattgaaaaggcatttattttattattttaggagataaattttgttactttgcgaaaaaaaaaatgatatattttgttagtaggaccaccaatatacttgttttcatttttcttatcttacctcttttttcctttaccaaacaatctaagttttgttcttttttcccttttctctcttaattttttttctttcattttgtcaacaactgaccatgaaaaatcacatccggtggataaaaataataataataataataagagagagagagaatagactattcttcttccatgtactaccattagagctcgttttgtttgtgtgtgctttagcccacaaattcatatacaaaacacaatagtattccaatttgagatttcacattgaatggtggaaaacagtaagaaagtgacaattgtgtctaaaggtcacgtattttttttatagttaatattggctttataaaaattgatcatacaattttttaattttttgctaaaagatcatacaatttcttgtgactatgtaggttctccacttctcacaactacaatttctgattaatgtcatgcactataatggacacttgtctttcgttccatctcttttaagttagtatgcatgtggacaaagcctgtaaagggacctataatcaaaggcaacttatctactctccttcatatgtatacttttggtatattagtagtacttagacctgacctgacctctcatgttactttggggtcaagtttaatattatttggattttaataaat

SEQ ID NO: 185907 - DNA, 1570 bp, Cannabis indica
agtatttccccacaaatcatatgtgacatatgctcatatgcaaggcataaatcttctgattgtaatttgtaataaaaagttttagagactatctcaaacaataacaacatctctaccattcaattttcacttcttttagggaaactaaaaacatagtcaaacaaggtgtattataaaaggcaaaatacatccctacttactacctaattattgtggaagattcttcctttcccttttgaattaacccatatggtcattttaccaattatgttctacccccaaaaaggaatgttatagaagttttcccacccaaaaaaaacatatacatatataattgaattaattcctactttaaaatattctcatgatctataaaaaactacctaacttgtctaatcaaaatctacctcaaacagtcaaactagttccttcctaaaccaaaccacttttaaaatcagaaacttaaacttgaaacaactgaacagaaaactcctgaactgatgacataatacaaaaatgaaatttaaatataagggttcacctttttatataaatatatatataaactatgtaactgaaagccaggtacttagtgacctgtgaatgttttggcaatgaatgtacagaaacaatctacatattatgtatacagagtgaaagggtagataataatattttaactttaaaattatgttaaatagcataattttgctaataaaataattaattaaacaaacggggtgggatgggttgccttgagccccattgacaagcctagagtagagtagaaatggaaagtcatttatagaatttaagacaacaaataaataaatcttctctcatcaaatctaaacttaaaaataaataataattgttcaatattaaatgtgttttggtatgtaatgattatgtactgtaaaataatagttgttctcagctctttgtgatcattattttagttatgaaaccacacaaaaccaaactgaaaacaacagcaaaattcagcagaacatagaaaccaatcaattaatagataaaacataaacaaaaaacacaattaatcaatgaattcaattcaaaagaacatctcacctctctcaatcaaagacatgtcaaaatgcacaaagaaaacagttgaattacccaaaagcaatatgaagctttcattacccagaaattaaaactaaaatcttgaatcaaaaacctcgaaaaaacaaaacaaagcaagagattcatttatcccattagactactttctaaagttcccaaatttatactgtttttgaacttagactaagttcaaaaaccatactcaatggttagatgtatgtagaaaatcacccaagccaccgacaactttaaaaaaatgataaataaagacgcacgtagaatagaatcatacctgaatagaaagaaaatgagagtggaagaagctaatgtgggtgttgagcagatctaagaagaagaaggagagtgaaagagatccagcattgaagcatggatgatgatggtgatggtgatggtggtggtgagaggcaaagaggaagaaagagaagaaaagctgaaactc

SEQ ID NO: 185908 - DNA, 3914 bp, Cannabis indica
gtggttctttggtctctgctttggctcaaccgtggcttaatggccaagatcacccttttgttatctcttcacattcagtgaagttgagcataacagtctaacatttgatggcacccgaaaatcgagtgtgggacgatgaaattcttttgatatctttaatgaacgtgataggtggctcattcattctattgttattatatacttttgtggagaatgatactcggtattggtgtcatgaaactttgggctcatactctattagaaatgcttacaagcttctctaagtcattaatggtcactggaccgatgtaaataattttggtattttgacgaaactttaaaacttgaagattccagcgaaggtgccgaatttgttttggagagcttgtcgtgattgtttacatactagagccaaattagtaaagaaacatgttgatgttccctagtactatcccttttgtcaaaatgagagtgaaactgtatcccatgttcttgatgactgcacgtttgctagattgtactgggctcagttcttttgttgactaatttttttctctttctgcaatgacttcctccacccttagtcatgttgctatgatatgttggaccttatggagggcaagaaatgatgttgtgtggaatggtaaacatcctattataaatattgttgtgtcgttactgttagcttattttaatcaatagaaaagtgtgaattctcaatcttttgcaagcacctcattcactgatgttgttgctgaagcgcacttgatgctttcttgtgataacacgattaaaatcaaagtagatgcttctatttttagcttggacagatccgttgaggttgattggcttgtccgtgatcgtaaaggggagtttgatttatgcttatgcaacttctagagtgtggatctagcaatagtgggagaagtcggattgaaggaagttttaaattggttgaaagataaaggttttccaagtattattattaaatgagactgctaggtgttaataaatgctaattgtaataaggtcaaatgtattctccttttgtttacttgtatctcattataaagtacttcttaatattttgttttgagcaatgtgtctcttattcttgaacgatatgcgaacaatatcgctaattatttagttcaggctgcttgtttatactcaagttgtagttatagtaggaggtttgtctctgatttccaagttaatcttatagttgatttgcgaaggatactttttattaggggtgtttgcggtgcggatggtgagggttataacctttttttcaaaccaaaccgcatatgcagtttttgaaatttctcaaactgcaactgcaccgcgagattttaaaaccgcaaaaatacatcgcgaaaatgcggtgtgatgtggtgcgatacagtttgagcggtttacactatcatcattatcgaacattataataaaaatttaaaaatcaatcaacaatacaaaaaaaaaaattcttattaaattttaacatcataacatagatactattcatcaaatcgttatattgaattgtctctaaaaaataatgtaatatatacatatattacatatatttgtttttatatgtaaaaataataaaaactatattgtaaaaattggtaactttgtaaaatatagtacggtgcagttttaactgcaattattaaatttaaaactacaaaccgcactgcactgcgcggtttggaaaaaatacaaacgcaactgcaccgcaaaagattttaaacaaaattttttatgcagggcgtacaatttgtacagtataaactatttgatgaacactcttactttttattaaaaaaataatatttttttttgttaaaaaaggaagttttgaagaaaaaaaatagctaggtaacatgagaaaatgacaaatcacacataaatgtttctctctctctctctcttcttaaaatttaaaattttccacatattttactcgtcagataaaagggtacttctctccattccaattcgaatgatgataataaaaattactaaaaaaaaggaaaaactaataataataatatcagcttccatattttcataccctatttttctctctctattctgaaaagtttttttctttatatttgcttagaaaattaaaaaaaataaaagataaagaagaagaagaaaaactgatagtgagtatgtattctgaggaagattcctttgtctactcttattaattcttaaataaataaataaaaaagagagagaatgaaaaataattagtagagagattctttgctttgcccatagaaatctcactccttttctccacttctcaattctccaatttccctttttattatattcatctctctctctctctgcaatttctgattttgttccatttcattgttctttctctatatctgagctgaccattgagttagacacctgaaattcagagtcttcaatttctataacctttgagaaaaacccacttcgatcctccctttattatctaagttcaaagaaaattcccatatttataatattttaaaaattttattttacatatatatatatatttataaaaattatataaaagatggaaaaatatgagcttgtgaaagacataggatctgggaatttcggggttgctaggcttatgagaaacaaagagaccaaagagctcgttgccatgaaatatatcgagcgcggccacaaggtattttgttttcttttttagttcatatgcatggatgatatatgttatgtgtgtaattgtgggtgtatttttaatttgaggttttgtaaagactgaatttgatttacccagaaagttgatgagataatatatcctgtttatgtataaatacaaaaatcaaatttcaaatttttttatatattaaaaaaaaatagaattaaattacgggtttgggcacaaaagtagtagaaatgtctgatttttgagttttctttttattactgtagccctcgaaaagtttctgtggttttgtatctttgtacacatgcttgtatgaatacattttagtaatggttgtgattaaaacaaattatttggtttgtagattgatgaaaatgtggcaagagaaatcataaaccatagatcccttcgccatccaaacataatccggttcaaggaggtatgtgcaagtgtttaatgtgggtttgttatgtttccactgaagagtatagattatttttgcaaatgcagtactctcacttgtgtgccggagttgcaggtcgtcttgactcctactcatctcgctattgtcatggagtatgctgcaggtggagagctcttcgagcgaatctgcaccgctggaagattcagcgaagatgaggtctgatgttgatctttgttgacagtgactctactcatgttatgctagatcattatagaaaatttaccatgtgaatccattatggctagctgctttttctttctcgtaaaaaatagggtcttgatttgaccattgtttttttttttggctctgttttgttaatcaccagagacaggaaatttgttttgaagtttagaaaattttactatcctttttggtgttttcaggcaagatattttttccagcagcttatctcaggagttaattattgtcattctatggtaagaaaatttaaatcaatgctgtttcataatctgtgaaaatcaatccatcctttttttacttgctgttgctgataattttttttttggatcatcttgatatgctgtagcaaatatgccatcgagatctgaagttggaaaatactttgctggatggaagccctgctcctcgactgaaaatttgtgactttggttattctaaggttaattatggtcaacttagtgtggaagcattgtattttaatgttaatccagaaatggtttcaaagcgaagagttgg

SEQ ID NO: 185909 - DNA, 3360 bp, Cannabis indica
ttttaaaaaatatttttacctttttgatttaaaaaacaaagaactattaaaaaaatcttaccaaaggcatatatataaaatttaaaaaaatttacatatgtagcttttagccctcacataatataattaaggagagtaaattaatgtacaattaaaattagaaagagaaatgagagcttttattaattaaccaaagctaaaaaatgaaacggaaaggtaacacacgaggtcatatactattactacccttatcatcacattatcacaatgggctagcatttagtatcaatccaaccaaaaaaaaaaaaaggactaaatgctctcccaaatttggctctcatcaataaattgtaattaatttgagaaacaacctacaaacaccatttctcttctttaacataatttaatttaatcatcaataagatgttcatgatcagccaaaattcccctcacatcacttacaaatttggttagttacacaagggtagtatagtcttttcactttatacaatacaatggcgccaaaagaatacaatgtaatatatcccagcgttgccaccaaaatgataattttacaaaattttatccatttattagaaaaagagagaagattaaataatatttgtggcaaaacataacgaacgcactaatctctccctaattgtttctacttttgggcaatgtaggaagctcaggagttacattggtgagaattctcaaccgttggattggaactaagatggacggctattaatccatttggcttattaccaggcttggtataagctcccttctccaacgcccactcttgtaaattattactatggagttttttttctctctttcagcctaaaaataaaactcgaaattctcccaccaaaaaattcagtccaaaattaatctagcttataaattattaaccagtactgaagtcctctttggattttggtcaaatcccactcttgaaggcttcatcccatggagaataacaaagaagaatttggacgtggtactgctggtgctggtgctggtttttcctctggtgattttacttggtataattatagaagttacaagccttattataataatagtattcatcaccaaccttctaacttttcatataagccagctcttccaccattgacaaccatagaaagtttcttaagtagtcaaagccttcctttgactaataatactcctaccaacgttgtttcatcatccttatctacaaatgggttgtgggatttttcttccagcagtagtaatactactactgctactagtatggttgatcataataattattatggtgcaattacgtctggggttcatttttcttggccgatgattagtagtttagcctgtgctgatcatgatcccgatcatcatcataatcaacaagatcatcaaccaaggttctttgaagggctatttgttcatgaggacgaggattatgatgatgatgtggtggaaggtgttatgaacattgatacgtgttcaaagcgagaagttgcggagatgatgatgatcaataatagctgtaaagagatattgggaaagagatcagctcataaaaaagcttcttctgcggctttaataaaaggacaatggacagacgaggaagacaggtaacaatatagattgtcttgtttttatttcattttacttttttctttcccttaaattctttttgtccatatgttatatatagggactactgtaatttatattagggtttctctctttcttatttatttatttttttctgtgtgtgaaggaaactgattcgactggtgaagcaatatggagtaagaaaatgggctcagatagctgaaaaaatgattgggagagctgggaaacagtgccgagagaggtggcataatcatttgcgccctgatatcaaggtgtttttttttttttttctatttcttattactaaatctttctataaatccttgatttaatttgatcattttcatgttaccatctaagaactaaaactactgtgtttgtctaataatatttatagatctcagacttaactagcatatataattggaatcttatacaccataaaatgaaatagatcatctggtatacaatataagatttatatctgatcaacacaaaatgtagataacaggtagatcagattctaaattatcggtatactgatttgttgtttccttttattaatatgacatattaatttgctttattttttaatttcctttttgagtttaattataaatgaacagtgcccccacttaccaaataaacctagggtttctaaacaaaagcatttactacaaatatatagattctagttagtaaattgatgttaaaatttggatttgtcagaaagatgggtggagcgaagaggaagaaaaaatactagttgaagctcatgcagaggtgggaaaccggtgggcggagattgcgaaacgaatttcggggagaacggagaatgcgatcaagaaccactggaatgctactaaaaggaggcaaaattcaaggaggaagaacactcataataataataataatatgcagataagtactgaatcacacaaaagtaataacgataataataataacaaggctcaatcttcaatacttcaaaattacattaggagcaagagtctcatgctcatgctcaacaacaataataatggtattgagaatagtaatgctcctgaatcaacaacaactagtagtagcattactactactactacagctcatgatcattctggtgtggaatcttctttagtacttgcatctgatcagatttacgacgatgaagtgcttttcatgcagaatctctttagtgataaccccacaactactattgattattgttcatcgaacaaaaccaatagtggggatcatgataatcatcaacaaaagctcatgcataatagtagcactgctactccaagttctactcacctttactctgacctctacttatctcatctactgaatggagcatcgacggatacttctttgtcttcaatctttaatgttaatcgtaatgatgatttctatgctcagatgagtaagatgaagatggtggaggatgctgatgatcatcgttcgtgtggtgacatggaaaccttttcgaatgacaagaaagagatggatttgatagagatggtcacttcttctgtcttcaccaaagattaattagctaataaactttgaagaactatcccagttctctctatttctctattatatttattccataacgttgttgtgtgggcttttctgttatgcgtttctttggtttagttatgtaaagcattggactttcctgaacaattcaaacgatgttcttttgttttttttttt

SEQ ID NO: 185910 - DNA, 1551 bp, Cannabis indica
taagataggcgaggacggttaagaatgagctagatccttctacaattttgcatccttggtttgaatgtcagacgagacctctgtgattgtagagctggtcaagatagcaacctcagagatcaaaagagcaaagtcatccacgttctcgcctataggaatggtagttctaggattgaccgcttctgtcttctgagttgcttccttagctttatcaacctcctctagtgccaagatcttaggcatgagatcatccctatcttcagcatcaaagagatctattagagatttatcttgttgccagatggtgtacaccgagtagacaaatgcatgttgtaaagccttggtgtgctggacttcttactcttgtttctccaagattacctgctgaagacgtccctttaaattaaagttttcacccctatctcggttgtaatgttcgcatgattagattatatattaataaaggcaatcagtgttaattattgacattttatgattttatatttattgtgggccccattttcataaatgggcattggagttgtaatttctcaattcaagagattttatcaaactctaagtatattatttagattatatgtaacatttataatttttatgatttttgctcggtgaagatggaaaatgtgacgaaaggccaaattagtcacatgggttagttagaaccttttcttctggcgagatattcataagagatattcataagagatttcagcaaggaatttgtgaagctcaagttgtggtaagaaccctagattcttttcccacaagttttgtagatttctctaagtttcaagtatgctaatgttgtaattcagctctgtccaaaccctagaagctaggggatgttttctattgttgattgaggttgtgttaggtttattctagttagaattaaggactggtttggtttttgagcaagtttgagttcttgaactcaaacttgcctcaacaatggtggtttttgcatttttgtgctatacctagttctattgtttggatttgctttatattgatgttcataggtgttctggagagttttggaagatttcgggttgttttggttcgaatcggggaacttttgtttttctgctgtgaaaaatggcaagccgtttttgcataaacgacttgccatttttactgtgcagacttagaaaaatgcctgccattttttggaaaacagcctactgtttttctggcaagtttcccattttgttgttttcttgtgtttctcgatacctagggcattcccttactttttatagatagagaaacttttggttttgagtttagaacacaaagaaggtgctagaaggttatttactcgaatttttgaatgtgacatagggcctccattcagtgcaagattttctattcaggttgaccagcacatttgaatttggaaatgaggtaagattagcatagaatatatatgtatatgtgtatgtatgttatgtgcatgatgttatatgattcatatgctaccaacactagtatgagatggtactgagtgcatgtggcacaacactt

SEQ ID NO: 185911 - DNA, 4374 bp, Cannabis indica
gctaccctcatgtggttaaataagtcacaaagtttgaaagtgttaaagtaaatagtttccatacttgttgctttatttttctctgttcagtgtatatactctttgattagaaggtaaccaaaacatacataaatatatagttttttggctgagaaaaggtaaccaaaacattgaaaatctaaaaagctgcacacattcaaatataatatttagattaattgtttctcacgttattcaaactatggatcaaatccgttccaaaaaaaaaaaaaaacctatggatcaaactttgataggatatgaaactggcacaacacaaacatagtcggataaaaaaaataatatgtttagacacaatacaaaaaaaaactaatgagtttaggcttaaaataatacaataaactcaaaaatacaacatctaaacataaataaattaattcgaaatcatcacacattaaaaaacataataatttaattataataacaataataaataattatttatcaattaaaataatagtaatatttaaattacaataattataattatatttcatatacttatgtattatgtgtaattattattaaaaaagatattgaagtaatcaaaattataaatatacataaattgtaatatttaactcatcaattataataaaaatacaaacatataaaacatgaatttgagcctatataacaaaataagttagtctatctaagaaaaacatactaatccaaataaagtacgttacaaatttgagcatgacatgaaattactgaacttacaggccatatcgagcctactctgtaatattattctacacactacgatccgtatttttttataacatgacacgacgtgacctaattatttttttatgatctagcatgacaaaacattggaaaaatataaatcgggctagtacgatacacacttatttacattcaaatcaaaattaaattttcttctaaattagaaagaacctattttatccttattttcaacaatataatggtaacaaaatttgcattgataaacaaaagagagaacacattacacttttttaatcataatcaaagatgaaaatacattcctaaccaaaagtattgttactttttgaaaataaaaaagaaaaaagtattgaaacttttgggttttgttgtttatatggcttattattaattaagaaataagaaataaaataacgtgtgagatctagtcccgtaagacgtgtctgttttccaattaagaaaaaagggaaaatcacaagcaaaatagattcattattattattattatttaaaatagattcattaatgacacaatattgaccttgctcattttttagtaagcaaaatttgaccagttaattattaatattattccttaaaaaattattaaatccccttttaaaaaaaaaatattaatccaatattatttgctggaatgttttttctttatttaagtaactaaaaggtcatttcttctgtttactactttttttttggttggcttcgttgtcattaattaattcaaacataaaataaataaaatcctagcccaagttgtaattacatttggtaattacaattttaatatatctgtaattaaatgttcaatctttaatttttttttccactatttttcaaaaaacttaattaataagaaaaattaaaaatagtatattataaattaagtaaataacattaattaactaaaataatgtaaataaatagcatcattatcacatgtaagaaggtaggaaagaaaatattaaagaaaaagacaaacccaaaaggaccttcatcatcatcatcatcaatggtagttgcgtttaaatatcgaatatctagtcaaaacctcatataatgctttccgcgtaaaatcgatctcttaaaattctcaaattccacgaactttctttcttaaaaattcgatcttttttttttttccttcctatataacccactaacaaaccctctatttcttttcatttcgaaaatttcaagaaccgaacttgaaaccgttttcgataaccaaccacttcatacaccttttgggtcgtcattttttcatctcaatcttcattcccaactttttttctcatctgggtctctctcaaaaaccatggttcgttgtagcaacaacttgatcggaatcctcaacatcgccacattccttcttgcaattccgatcataatcggtggagtatggctgagaaaccaaggggatagcgagtgtgagaagtttcttgatacccctgtaattgttcttggggtttttctcatgcttgtttctcttgctggaattattggggctttttgcagagtttcatggcttctttggatttacctacttgttatgtttctactcattgttattctcttctctttcactatttttgcctttgttgttactaacaaaggggctggaagagttgtctctgaaaggggttataaggagtataggcttggtgattactctaactggttgcagaagagggtcaacagtcccaagaactggaacaaaatcaagagttgtcttattgatggaaaagtctgttcttctttctctcagaaacatctcaatgatactgtcacagagttttataaagagaatttgaatgctcttcaggtatacaaagctttcaacttttctgggtttttaagatctggcttcttttcatctttttgatgtttatttaaatcattgggatatatgtttttcttgtggtgaagttttgttagtttagatctccatctctgcaagtttttcttttcagtgatctttgaatttctgttggtgttttgtttaattttttcatgttgcatgattgagttgatgaacttctttatctaatttctttttcctttaaaagattctctcttttcttgaagttttcatttttttaattcataaagtgaagttagttgagagacaccttttttgtgttgaagttaaagtaaagggttcttaatcatgacatctataagttaaaagaaggaaaaaaaaaccccactttatataatcttttgtagatttgagccccaatctcacattactttttctccatggaaaatgtttgttatgtcttattaccaactttaacatttcattgtttgttgttgttatgtattagttctttgatttagaacatggtttttgacttgaggatgattaaaaggcttttatctttttaaaaagcttttctattttttatttcaacccctttgcagtattagttttgctatgtcatttgacaatgctttttcttttaacatctaatgaactttgttttgttgtcccttttatttctttttgagtactaatgaaagtgatcaaatttgttgtcccttaaagtgctttgatgggttggttgcaaaatgtgaggtggtgtggtttagatttcaattttgtgctctctaaccaaataataataaaagtagaattttcaattttgcatggatattattctctaagttggttactttgtttagaatttactttttgaaccaatgttctgattagttttccaattgttcaaacacttgaaaccatattcaaagatgataacatggttcctaaactatgtttttttctttatctgcagtctggttgctgtaagccagccgatgaatgtggctttacctatgtgagccctacacaatggacaacaaccgcaactataaactcgaccaaccccgactgctctgcgtggggcaacgacccgaatactctgtgctttaattgccagtcatgcaaggctggactgcttgacaaccttaggagtgattggaagaaggtggctgtggtcaacattgtgttcctcatattcctcatcattgtttactcggttggctgctgcgcgttcaggaacaacaggaatgacaatgcttactggaagcgataagcggcgagcgggcatggctgctgctgctgctttagctagtaggatgtagtatgcttaggcaaaaacttcactggttgggtgaattctatgcttaagtaaccattttgttggttctcctgtaaagctttgtacttactatgctttcatttttactttcagaccatatttttctttcttgtattaaaatttgttatgtgatcagtggagtttattgtatgttgatatttcatttcttggttccatcatttaattgatactattttagttactgaattctgtgtttgggtatgtcttatgttgataactactgtcttgtatgtttgattttactatgttgtcctctgttatgtcttatgtagttggaattaattgttctgaagatattttcctttttgacttttccttttgctctactttgtggtctgtaatgcctttcacatttttttttttcttgatttctttt

SEQ ID NO: 185912 - DNA, 8314 bp, Cannabis indica
ttgttgttgttgttgttgtgtaaagaagagaaatatccattgatctctgtaatgttaatatcttctcttcttcataaccatctttgatttcatccgatcttcattctccagcttcagatttcgaatatggatctcaaccaggtgagttgactcggttctatcagctctgcaaccttcaattccagctcttttactggatacatatatcatcaagggtttaatgatttctctatggtatatgaattgatatctaggtttttccgtattatggtttaaacgatttgttcctagagttttaagtgagaatggatctgggttttagaatttaattttggttgtccaattgagcttggcgaatttgtttgtctgatgggaaaattagggttgaaagagggattgacttaattcttcgtttaattgtaggaaaagattactaacaatacaagaaagttagtgggagtttgaaacttcgctaatgctgtgtgttcgcgtgtgttttcttaggtgcttgaatttgtgaaattcggtgttaatttgtcttaatttatgttttgaatgaataggaaatagttatttgtggatttcttttgagttgttgttcaagggttttgaagatgcaatgtgtttttaacaagaacttttgtataaaaaagttagaacttaatacatcagttagattttccaaagaattgatggcaaatatcttggagggtagctcaaatggttagggagggatgttgtttgcttccacagggtctgaggtttaagtcttcgttcggcacgtacttagcaattggtattgatttcttgtttcataatattagatagaagaagtaattgatgagaaacagaagaaaatagattgaaatgttttcaaaatgataatagattgattttgttattggagttttaaagattactgtggagctttggtaggtctaataattgatagatgaaaaagataaacaccattcacatgttagctagtggacatttcttttggtgtcttggaagagttagggaaagaaatcgatcgaactaccccttttttcgtcgcggaaaaaattctagttgatgttttgacaataacgaatgctggttttaacatgatttttcatgtgaactgatgattaatctttttgtgcagcctgcaggagagaactatgccaacccacaaatatgcttctttcatgttcttttcaaggtctcgtgcataaaattctggaacctgcatttttgtgtcttcaagattcttgtttacattgtcaatatagttttgctgatttattttctacctttttcaggcctcagctttgacgttttacatactttcttccctcttttttgatagctttgtgatcatttttgtggtgactgttcttcttgctgctcttgatttttgggtggttaaaaatgtgagtggtcgtattttagtcggattgaggtggtggaatgaaataaatgatcttggtgagagtgtatggaaatttgaatgccttgaccaagaggttagtgttacctaccgttccttaatatttgtaaactattctgctcaattatctaaaagcatgtattattggtttttatcatcatttgacttgtcggcttacttgttggtttgattttagtcattggcccggatgaacaaaaaagattcatggcttttctggtggacactataccttacggtaagccaatgtaatttcgataaaaggcagttgatcaatcattataccttacctctagtggtttaacacacaccaaatatgtgatacatatcaaatcaatatacattgttggaactaaagtagatttgtactgcataacattacgaaagtaaaacaaaccagatggctaatacatttgcttgcatgttggaagaaggacctggcttgtgagtcaattatattacttgctccatttgttgtaacatctcaagtttcttcctttgtgctttataggctgttctatggattttgcttggaatattctctcttataaggtttcaagctgattatcttctggtcgttggagtttgtttaaccctcagtattgcaaacattgtaggctttaccaaatgccgcaaaggtgtgctagcaagctagttcatttaattttgactataccaaagtgtatatatatatatatatgctttcatatacctgtttgtttttatcacactaacatggagatgatgccttcttctgtctcagatgcaaagaagcagatccaacaatttgccacccagaccatcgcttctcgcttttcgtctaccatacaatcagcatttactgttgtctgagcaactaccccaggtgctatgcaatgcaatgggtgcatgtactgtaaatgaaacactatattggcctgcattaacccgagcttcgttacagatacaagatggcatattatagagatttttgtacacgccttattgagttttctaattgtttgtttgataaacatgttgaagttcaattcaagctgcttgtacattttctcttcgcacaagcttattttatgaattttttttcttcttcttctataattgaatggacagagacctgtggcttcagcctggaaaaagtcacttaatctaaactcagctaggatatcactatcagttctaaaaaggataagaagataaagattacctagtaaacgacaatggccttcaaaccaatgtttaaattaagttttaatcattggtatattatatagggttttcttcaaaatgaatttgagatcaatggccctaattgaattaaaagtacagagtttgaaatagcaaactgtgtggggcattgttgtgatgtttaaaaaatttagattttgattgttcaaaaaaataaaaatggattggatgtaatggaatggaaaagagataagttttattttgttctttcatttggttacattttataatattttacttttaccatcttgatggaacgactattttattttgaaacgaaatgcaaaactattttaaatgtattatgagaaaaaatttaatgaatttttttaatgtaattttttatcaattttttttatgcattttaaattttattttattgttattcttatatttttattccttctaactaaatgttacctaaatgaataagaaatattaataagcatgccacttctgcttttacactcttgaatatgagagtttaattataagatcatgtaactatggacagaatctttttggagaaaaatgttattgagtacttggtgggcttctttgttttgtatcaaaatgtagaggtttgagttggaccaatattaatatttgttttctctgttttgtattagagggcggcgaaggtctcccaaaatagtggtattgttattcatattccttctaatcattgaaatttcactttttttttttctgtatatgagtattcttagcggactttgttgggttgatgattatatttagtctagtctatctagggtttattaaaatgttatgtgctatattatattagaaggtgtattttttgttttgtattagagggtagagattcgagtagaactaagattaacatacaatgtgtatgcgtgtctgtttacacaggtatttgttctctatagtagtgatgacgatctactaaaatagtgatatttatgttcctattcttttttattgttgaaattctatactttcctatactagtattattaccgaatgtgttgtgttggatattgtatttaatctaagactcaagttgtaattgatataattgaaaaaaaattggaataggaaataataaattcaagttgacaaaatgtattaatttaagaagggtaaatactattttggaccttgtgttttgcaaaagttatagattggactctctgttttgttaaatgacaaaatgaatcatgttttttcaaaatggtaaaaataggaccctaagcttaattttcaataactttcttttttaatataaccaacttgaagacaattcctaacatgaatagatacaaaaaaatgtaaatacttttgcataacatatttagacggattattattaaattttattttaataaaaaattagttcagggtcatattttgtacaattttagaaaatacataatctattttattatttaacaaaagaaaaatccaattaataacctttgcaaaactcaaggtggtccaaaatgatttaagaattagattaaagtgatacaactcatcttgaaattaaggacagaattgtggtactaatttaatcccaattaattgaatgctacaacgacatgtcgtttttgtagtaataagatcaattacaagataaaaatgaagaaaaatcactttctttgttttcttcttctctatccaaagcgatctgtccagagagacaagagtaaacaatgttgcaatgcatatttctactctcagattccgggttggtaacacatttttatcattttccaatgatcctaattgtttcgaactttccatttatttatttgctgaattacacatgaaattggtttttgtttgtattcattccaagcatttgatttgaattggtttgtcggagttggaggaagaagatgattgatcatgaatcgtatttgaatttgaatttgaatttcacagtgaggttatgcttgagaaacagctcaccggtcatcgtgtagaccgctccatatgtgattggttctggaaccacgctctttctcaaggcgattcctctaaggtaccactgctaattttgggtctgccaatgaaaatacagatatttaggagctcaacttcgaataattttatttctgggtctgtagcattcataagtttgtttcttggataattgaagttagaaataatcaactttcatattcactctcactactaagaacaataaatttatgatttttgattttgtactttaaaatattttatgtatgtgaaagaagattttaagagtttattataagtttatttaggaatgatgtgaagagagagaaatacatgaaaataatgatcctgagggtttgagaaaagagagggaatgaataaatacacataggatttgtttggatgaaaaccaaaagttaaacccaagaaaactagaaaacaaaaccaaacatggtcaaaaaagatcttctgcgtggaccgctggcgcccatatgtgcataagatcgtgggatcaaccgagtccacaggcaatgcaaaattggggctcatttgtttttatgtactttttagattttaaaatcttggtttctcatatttctgaattacaatagttgggtttggattagttggctgttgttagaatgagatcaatgaactttctgatatggagttattgtttctgttctagttgatatactcttgttgtgttcttggtatgtgtttctcttgtatgagatttgcttttgattgatagttacaaccagtaattgcttcaccaacacactatcttttccaaattcttcgtgaggggatcacatttttagcatgtacccaagttgaaatgccacctctgatggctattgaggtagggtttagccacatgtgttcgtcatttgtagtatggaaaaattcagcttcttgacattatactatttggtgtatagttcctttgcagggtagctgatgtcctttcagattacctcggaggcctcaatgaagatttgataaaggataacttcattattgtatatgaggtattttaactacacttatctgataattttgcttgtcattaggaatttgcagtttcactgaatcttagtgcggtttcttactagacggtgtgtgaaatgtgaacacaaaacagacctcatgtttatggttttatgcaaatatatcactaatattttcgtttactttttcacttttatatttctgttttgtgtataaaagttgtattggtaaacaaaccatagttgcttgttcattaacctccttggttttttgtacctctggaatgcgaatacttgaattagagaaaaaaagctagatggaaatctttgaattcaattttccccgactatgttaccaggttatggttggtggatcattttagtccccaactcctgttatgtgtttttcagtcacgcctgaattgaaaatgaccaccctgtttattgcaacatttagcttttggatgagatgatagacaacggcttccctctcactacagaacctaatatcctgagagagatgattgctccaccaaatattgttagcaagatgttgagtgttatgacgggtaacagttccaatatgagtgacacacttcctggtgcaacagcatcttgtgttccatggagaactacagacacaaaatatgctaataatgaagtttatgttgatcttgttgaagagatggatgcaactattaacaggtctctgtttaatgtttctttcaatatcttcacatttggaattgtggattactcatttcatatatacttttattgatttgaatcttcatatatgaaaataatcagtactatgagcggagtcccaaccattttagattacaaaagatatatactgatgtttagtgttcaggttcattctttttaccccttttgcaaaatatgctaataacaaaggggaattacttaacacgctgcatactattcttctccttcctctagttttgattttagtataatgagagaagttagcattttcttatatctttggaatctattttttgaattcatacacaaattttgcaatgcattgtcagtgatgagtaacaattgtcatatacaaattagcattttcttagcttgtatcttatattgcatagtattaactaacatttacccaaattctctgttcaaatgctgcagggatgggaatctggtgaaatgtgaaatatatggtgaagtccaagtaaatacccatctgtcaggtctcctgatctgaccctttctttgcaaacccttctattcttgatactgtaagatttcatccctgcgtccggtttcgcccatgggaatctgatcacattcttcgtttgtgcctcctgatggacaatttaagttaatgagttacaggtgtgtggtgtggagcagacaacggcacaatgaatacatttatctctaattttcttaagtaattacatcagcatgatgacatgtttatgcaatctgaatattcctttgcttttgcatcactacagggttagaaagctgaagagcactccattatatgtgaagccacagctgacttcagatgctgggacatgtcgtattagtgtgatggttggaatacgcaatgatccaggaaaaatgattgactccataactgtacaatttcaactacctccttgcattcggtctgctgatctttcctcaaatcatggaacagtcaacattcttgctaataaggtacccttagtgtggcttcgatcacaatttttcgttttgtatatttctatgcgtctttcctgtgatgggaaacaaacttagacatgtttgtttctcttggagcttgactagtataacgctgtcaacttgctaatgcagaaatgtgtttggtcaattgaacggattccaaaagataaaaccccttcaatgtctggaacattagttctcgagactggattagagcggctacatgtattccccacattcgaagttggttttaggattatgggaattgccctttctggtgttaaaatagataaactggatctaaagaatctacataccaaaccttacaaaggtttccgggctcttacgcgtgcaggggaatttcaagtccggtcatagtctaatgatgtactcgtttcattttccgaatgctgcatggaattggacatatttgtcttgtaaatggtgggatctgtagttttatacagatgtgatttttgtggtctgcatatttttttgttgctttgatttgattttatttcattttggggtcaaggagagaacataagaaagaaaaaagaggcaaatgtatttatagattgcagccaaaagaaggctagactcttgaatattatggtgtaaaatatcctcttggattgacaatttttctcatcaacacatttggaaatggtcgatcaactagaatagtattacattttccaatctaaatagagctataactggccaattagttttgagataaaatacgtgaatatttgtaattaaacttaattgctcgctccatctaggtatttattctttcctctacgctccatcatcttttgccattggaagagtgttaattacaacctcttattacaatctcttagttaacctccacgttcgaacatgccgaaatattttttttcacagcagtattcgacta

SEQ ID NO: 185913 - DNA, 1924 bp, Cannabis indica
aaaaaaaaaaaaaaaaaaataactccaatgtatatatttatatacattagaaaaactaacgagtgagtactgagttaagagggtcatcaaagaacagcagagagggaaacgaaaatgacatctccagtactagcgacagattctcccacaaaaaaaccaaaaatggggtcattatttggagacttattcaaatcattagccatatcaggtctactcatcttcctcttctacataattttgttcgacaatactacacacaactccctcatacagaaatggccaataccaattacaaacagcactaatcttatttcaagtactcctgatcctaataaccccatgataaaaaccaacctaagccacctcgttttcagcatagttggctccatgaacacgtggaagaacaaaaggcactactccgaagcctggtggagacccaacgtgactcgaggatatctttttctagacaaaccacccaaaaacgagttcctcccttggccatcttcggccccaccatttcgcgtgaacgaaaaggtcaaggcaatatacgaaagagcctcgaacccttctcaggttaggattgtgcggacgattcttgagatggttagagaaggtgacgagaatgttagatggtatgtgatgactgacgacgacaccgttctggcattggataacttggtagaagttttgagcaagtatgatcatactaagtaccattatattggtaccagttctgagtgtatcaggtccaactacgatttctcgttcgagatggcctttgggggagctggctatgcgttgagttatcctttggcttccttagtggcttccaagttggatggctgtcttaacagatatcccactttgagagtcagtgatttcatgctgtattcttgtttggctgatcttggtgttgccctcactcataacaatggctttcatcaggtgataaattttattatgtattattaattattttgaattttttaatgacgtgacatcataatcttaataacgttttaatggttatgatgattaagtaatttaacattcgtattaacactaggagcaagaattgtcaatcattttacactaatgattgtgattattaagagtcttaatggagcgggtcggatctgatccagttataatccgacctgatctggatcatgtaataattggccccgccccgctgcgccccgatagacttgttacccggatcagatccgacccgctttatacagagcggatctaatcaaacccaactttttttaaaaaaaaaaattaattttatatctaaatttataattttttttcctaaatttattttttctaagaactaataatacattattttttttatatatatttatattttatttgtcaaaattaataaaaaagaaagaaaatattaaattcttattacataaaaaataaatatgtaattttgctaaaaattaaaaaattagtatttttttttttttttgaacaaagattttttaggtatgtatgtgcaataaaaaattctagataaaaattaatatttttatgtatgtatgtataagcataaaaggaaaaaaaaaaaaattggtcttttttaattatttgatagattacgttattctaaacaaacaaaccatgcaaataggacaaacatccaaaaaaaaaaatatttgaaaaacactcaactaatatcaaatctcttacatgctttgcttatgtatgaaaaaatgatcattttgttggaatgtacaatacaaaatatttaatctcaaacgtaaactcaagtggaagaatcgattaaattaatatttgactttctaagtcttattagtttggcctaaacacattaagaattgtttctagttttttaggtaattatatttttgaatatgaacatttcttgtacttcttatcacaggta

SEQ ID NO: 185914 - DNA, 2689 bp, Cannabis indica
gcttcttgcttactcaaaatgtagtcgctgccaccatcatcatcattgtcgttttcattctcatcatcaaataatgtagtagaagtactattcatgataagactcagatcatcaccaccatcattattatcatcctgatcagcacattttttcacttgttcaagatcagcttcttgttgttgagcttgttcatcttgatctgtcgcttcttcctcaaaaacgacatcatgatcagctgaattagactccagtacctgatgttcttcaacgacaacggctgttgctgctgctgctgttgctgtttttgctgaattaactgtggtttggtctaaacaagaggagatgtaatcgcctgatgaaacagaggttttggcgagaaaaacaaggattccgttacaaataaggaacatgtactttctttcaagtgtgcgagtgaacaatgagaaaaggaaagttgagaagtagacactgaatgaatgagggaagaaagaaacgccatgggagtaacaatagaaaaaagacaaaatagtgactgatacaacaacctgcaaagtccttctcaacaaatattggtacttattataattattgttagactttgcaacaatggaataatgatgatcaccataaccatatgattggagcttctggtattcatgaatttcatccattaatatttcttatattactgcttttaattgaaagataaaataataaaaggcaaagctagctagggagaaggagaagaataagctagctaggagttattgctttatatgtgaaatgaaatttcttgattttagtttcttttgagtattgatgatcgatgtctctccttctctatttatatataggtactaacagtttcataattccatggggtatacttgccaaattaccaatgttgacctttgtgaattgtgattgtataagtaatgggcaaaatttggaactttcaattaattatggaaacaatttaagtactttttttagggtagactatttaagtacttgtaaaatcccttcattactgttatattttatttatttatatagattttgtcttaaaagatcagattcttttgaagtttctagttgtcaccactaccgtacgtgataatgtgagccttgttacagtgagaaaattggtctttttgttcacctcattcacatgatagaataaattagattaagaataattctttgctatattaattaaataattaaaggggtccacaagtaaccaccaaaactagtgactcaggtcgaaaaaatattaatttatttttgctcaattaataatttatttatttttctgtcaacggtgcaagtactctatttgttcgaaagtatattttatatgaaatgaatagtcaagtttcattgattgatttatggattaacgcttgttggcccaagttatttcctcttctaagaattgataaaaggaaagaaacaaaatcaagtcacagtagagtacgtaaggcaactaaattaaacattaaaaataatcaaaatgattaagtgaagttagctagcgcatgattcacatatatatctaccctagaaatttgaaaatatatatgtattttatgagaagtatagcacaagtaattattatgttaaatgacttattaagtatttaacccccgaaacttgattccgtatgaactaatcatcatgtaaactagtactttattttttcctaaaataaaaactaatactttattatatttgtatatatggacaaataatgtttctttgcatatatattgtgacgtaatattattatgaagaaggtttgctgattgtaaaagtcatctacgatcgagcaatatatagaaataaaaggaaactaatcaaagctaaacaaaacaaacaatgtctaaaaatcgccgagtaatatattgttaggatttataatatcatattattattattttattttatttttgagaaaatacatgggaattttgttagacactatatttttcaatttaaagttatatctttatgattttacagcttaaatccttacaaaaataaatgattttacagctttaatttatcaatcattatgaatttgtcgaccctacaatttaaatattactagtttttctaactaaattaaatacaatgaattatgttttttttaaaaaaaataaagaatctttcgctcgttaaaaattcaagattatgctaattaattattatttgtacattgaaaactaacaaaccttgcaaagtgggaaaatagttacgtactaaaaaatgcagaaaatggaataaactcaatctcaatatatacataacgtgatgaattaaccaaagaagcatactatcatttatcagacctctaactatggttagccacaaatttgacatcttatatgcttacgtatgtgtactatataataattttcggaaaaaaataatggtaatatatattgtcaaaaatatatatataggtgtacatttaagtgctcgtgagtcgtgagagaaagattgccagaagtttccagaaagtaactcaccaacaaaaaggtattcatgatctgccacacgattataccacatcgggaaaatacgataataaccctgacaataatagtgatcgatttgtcaatatatggacaaatctcatttcttgttcattaccctgtaaagaaagatgcaacctcgtaattac

SEQ ID NO: 185915 - DNA, 6925 bp, Cannabis indica
aacgagccctaatagtcttattctttagctacagattagttggtaaagagccaacacaagctctccacatcaggtctcaaaccaaatttgcaacttatatgctgatttctcagagtaaaatccattcatttccttactcaccatgatcactcaccatcaatcataagtgaatcaacatgacttttaattattttttaaaaaaatttctaaaaaaatttattaaaatagagtaatgagataggatatgagaacttttttcatagggtaaggtcgttaaataagcgtaccctaactatacccaacccgttcaaacctagtttatgagatttcataattggagatgtttgctatagtttatggtcttctttgaatgaattttttgactatttatcttatctaggtttgaaatattagtattcatcgccgtacagagagttgagtggattatacaactagtaatgatttggagataattgagcttggagtacaatctaatttcaatttattagtctgcttatattaatttgggaatcttataaatatgtcagtgatgtaaagtttcttacttctccagtttcattctgttctccaattcaaaagatttcaggttaaaataaaggagattgcaaaactaaaaaacttaccaattgaataagttgtaattagcactcataaatataagaccaattgtccaatcaaactcagcagctagctaatcttaatcttattctgaaacaagtaaatacacattataatttaattgtatatgatagaaatagcaaagtgagaccaaattataatcaatacatttaagtctgaagctaaataaaactatagtgataggagtgatcttatatccactagtttgtgtgtctcaacaaaatgaagcaactcatgatatccattgaattttaaagccaaaaaaagaaaaaagacgtgtagaataagtatgagcaaatttctgatataaatctcttagaatacgagtacttcatatctactttcttggcttattctaaagatcaacaatggattttccaatattagattaaatgcttctaatagataaagagaacaataatataacatatatggaaactcaaacacagattcaaaaacacaattaatggctcacaggccctctttccccatttgaaagtatcagaaaaaccaaagtacctaaaagtaaatacaacagagtctcttgaaatattttccatttttttttaaacttaaaactgttctcgtagaattctattgtcctctctaactacaaacaggctacaattcacagaaacataaccaactcaggcctactatatatgttattttgctcatcgtccagaactggataagctgctacaagggcatcttgagctccaatatacaacgagttataaatcttccagtaaacttctctgacctttcgagcaggatgaaagagaccctggagacagtagtttagcacaaccgcagctcccaaggccaccctcatgccttcaatggcttccatgacggcattaatgacgtgaggcgaggtctcgaatatgttcggccacacataattcagcaagtgaaccaacgcgtcctcgcaacccaaaccagccactcccaaagccatgtgcttgacagctgaagctgctgtctgccgatgaaccagatctctgtccatgagagcatcctccagcaatggagtaactgcgtatatgtagtcttttcccatttcgccaatgtactcaaacaggaaagatagcgatttcaggacaccattctgaacgttcagctcaggaacacggtactcgttcatcagagctggcaaaactgtgaaaggagaacaagtttctgcaactatggcgatagctacagtggtgcagacacggttttgacgttcctgaaccttcagattgttcaataaagttgccaggacatcctgtggaccgatggcttttgcaatgtagccaaatgtgttcacagtagctcgccggataccctttttgtgggccttgagcatctcaagaagttcaaaacaaatcctcatccactccctagctgggacaaactctgcaccacggtcagcaattcgacctacaaggtcaatacagttttcttggactttctcgtgcctgttcttcaaaattggagtcaatctaggaagcaaatctttaataggaggtgtcatctttgtcataccaatgacattgacaattgctttcaatgctcccaagattgatccaagaacttcagggtattcttctcccaagtactcgtacagtacaacaccaagatggcccataagttgttcctcttggcactgcttcatgacaacagcaatccttgaaataagatccgcagcttgctgtctcacctttgcactcttgttattcaaacgccacttgatagtaccacaaatctgaggcaaatagggttggactctctgtccaagagaatttaccactgctccaaacccattaagcataacattagcatcatcactggtctgctcttggaaagcataaagaattccatcgattaaaagctcctccaatcgagggtcgatatcagatgcacccagatttgcaactaccttttcaattgtctccataaccattcgtctatatggttcactctcatcttttagatcctcaacaattcgtccgacaatatcagcaacaccaactttgtttgccatctctacagttgtttccactagttgcctataatttctcctatctaatgccattctcctaacccaaaagtttttaaagaactccggaagaatatcatttctgatataatcagcctcaacaccctctgtactcacacactgcttcaccactttcagcactattttcttcatttcttcatcaggtgactggaactctcgaatcaatattaccatcacttccttggtatagtaactggcataaatggcatccatcaaaggaataataaaaccgatggccttcaaaaatgcagccaagaccttaccacgatgtgatctaatacccttccacaagggctttagaacagagtcaaagctctcaataccataaggagcggcagcctcagcaagtgcagcaagtgacaatgcagtaatagtcctcactttttgattctcgtcattgagcccgtgctcaataatttcaacaagagacctcaaatgtggaagaacagcacaaccaatcaagatagcaatctgctgcacaatcttaattccagtatgtcgagcttgccacgatttcttactctgacaaacagctttcaagaaaggtaacagagcaggaataccaagggcagaagcaacaacactaaaagctctagcagttgtatttctaacatattcatcaatgttgtcaatatctggacgcatggcagcaatcatagtagccagtccagctgctttactaaggttggagataatctctctcccttccacacgagcatagtagtcttcatcaatcaacaaaggctcaatgacgacaagaattttgtgcacgtagggtctcaccaattcgtccaatttatacagcactctatcaataaccttgaccaaaagatgtctctcttggtcttccaaagtgggttgcataagcaatggcagaatgcggttaaacaatggaccggcaccaaactctcgagctttatcagtaagctgtctcaatgctgtcttcctctgtggaggtgtaccattcttaaccttgagcagaagcttcataattttacgctccttctgttcatcaggagacaattcttcctcatcatcctcattcaacaaagccccaaaatactggtaatcctctggcttcataaatggcaagccacctgcagattcctttggaacatcaaattgctgcccacgattctcttctgggatggaataaagaggagttgccatcggtgttggggtagcaagaagctttctcgcaggtgtcctaataggcacgtatgaagctggggggtccaaaatcttgtatccctcttgtggaaacatagaatcaagctcttcatcggttaagggacggttcctttcctcgatatctttctcccatctcaacaagttatactgttctggagtaattgaaccccgcaaattaatagcccctggcgttggcgtagcaagttcagctgctcccaccggggtcacaccgggtgtataagcagctgctggtgtagctccaggtgtggcacttcccattgttgctggtgtctcatcccacctagacctctgcttcttaggagttggcgtggctagccctccaagcttaggggttgaatcccaagacatcccagaaggtgtagcaccaggggtgacagcaccagccggagtggcatctgaatccaccaaccgcccaggcgtgggagtttcatcccaccgattcctcctcccagcaccagcacccaggagtcgcatccccaagtctccctggagttggagttgtgtcccaccggtttggtgtcgtatcaggcaaatcccaatcggaagtcttgggcttctttgcagaaccatcatcctgagaaaggtcccacctatttctcctcttctggggagcaccagcagccacaggggcagtctcacccctctcagccgctgccttagcggcctcttcttgatccttcttcttctccgaaataagcctaagagtctcctgctccttcttctttaaggccaattccttcatgacatcagcataggtcctcaccgaggggtccggtgtcatctcccccgatgcaaaaggatcatttcgatcaggcgaaatcacctggttcaacctcctctgacgatatgcatcctctcgttgcaaaatcgaattgggtttcttaggccccaaaccagcatcatcgtctcctcccctggggacatcatttatgagcgacttaggagcagtgtaagaagctaacttgcgcacaacctcattgtccatagggtcgttgttctcatcatcgtcggtgacaggaatggatgagacataagcatccctatcatttccaccatagagatccgtatcgaaagtaacagagttaagcgaagcaagctgctgctccatcttcctgcgttcttcctgagtcttcgctatctctgggtctgtggacgccattgtcgccttactagaagatatcaaaagccctaaaaaaatataaaatataaaaaaccctaaaattattaacctaaaagcaaaataaagatttagaaaatgttgagaactgatgagaataccagtcagtcagagtggagccgtggacgttggatcttgagaaaggaagaagaagaaaatgaagaagatgaagatgggttttagatacgatagagagacgagagagagtgcgaatggtctgtacatctcatagggtttctctctctctttttttattttttaatttatattataaaaaaaacaaaaatattattattttataattatttgaatttatatacatattaattttgtaacaaatttattaaaattaaaaaaatatgcacagtttatattaatactaataatactcttctctcttcttcttttttttttaaattcactcatctatactccctattcccatcctattaacaaaacttttcttaatttggttcaatagtttttgagatttcatagttagagatgtttgctagagtttatgctcttctttgaatgaattttctgaccttttatcttctccaagtttgaaactagagactagagagttaagtggattagattgggctcgaagtttgacattgttagaaatttatttaattaaggtcagaattgtatatataaaatatatgttgagttattatataaataagttaaatttatgtggtttattaaaataaagtttatgacttaaaagcatgattatcataattttaatatgtaaataccataagaacaatttctaatttaataaagggtcaaattaaaaatagtaaataaatgattaattattgtttttatagttattaataaataagtattggtcccattttgtattttattctaacatttcatatccttgaatctctatcatctattaaaacaaaggctccaaagaaaattttaatgtaaaattagaagatcatgctattctaaagtcgactctatagactcttgtacgtttttgctaatctttaattatacttgttaaatttctcataaattaattagaaataaattcagaataaaattttgcaacaaacattacctattatttttctagtaaagattttaagcttgttggagtataatctaatttcaatttattagtatacttttattaatttaggaacttggattgagaatagagtaataaggttaatttgtgaagaatgattctatttcaaacttaattatcattgagtaaagtaagcatgatcttataagtaaaatttcttacttctccaatttctatctgcttccaattcgaaagactttagattaaaaatgaaggaaattgcaaaactaaagaacgtaccttcaatatactatggaaagtgacaacacaacaaataaaaaaagtagaaaaaaaaaactagtaaaagaaacccttataaatttcgtgtaccaaaagaagagagtttttttttttttgtaacataccaaagaagagagtttaaaaattaaatgatagtctttgtaaagggttgttaactttgacattagagttatgaaggttagttggaatttgaacacacttggagcttttatcataatgaggagctagacaatctgtgtacaatttttgtgtcatagtacatgatgctacggtggctatatatcaagtacttatattaagaatattctatgtcattgtggccactcttgattctttcaatcacttgttactataatatatattttcctctcagttctatagagttttcatcggtttatatgtcctctattttttgaatattatctcatagcag

SEQ ID NO: 185916 - DNA, 1546 bp, Cannabis indica
ccataagtggaattcaataagcaaagcatgtatattaattcccagaaaagcaattccacataagctctgactgttatacacttatttcttgtaataactagctcagtgtcatggcagccttctccccttcaaaactaaagtagtacagctactacattttcttctatgcacaaaagacaagtgaaaaagtaacatatactaatataccaccagaaaatctcatagactgactttttgaaatattacaggctcgatcgctcgctaggcgctagctagtacaataaggcttcatacgattgaaccagagagaaatatatataaatactaatacacaaaacatgcaaatttgtttattatatctggaacgagagacagcatattatcccaaagacagtgcatgcgtcaatctagtactgatcaggccacaaaaatgctccttttgcatattcccttttctcataaagagtgcccttaaaattaagaccatattccatgagaagggtgtccaatctccactcgtccattttctcatagtctgccttggaataacgagggtaatgaagaggcatttggaaaccagaagggtaattagacgacagcccctccttagtaatagaattcacttgtaagctcttcacctgatcatgatgatccccattaacattggttggtgattagggtacccactgcagaggccatctgattagacggagtacagctgtttgtgtccttagtagtgtaccccaaaacgtggcacgccgagtgaacaacccacctcaaggctgccatctctctcttctatctctctatggacagaaagagacaataagattttggagctaaagaaagaaccaaatattttaaggtgtttttcttgaagcaaactctcaaagactagactcgtatttatagctaaaatgtaggacagactaatgaaactgaatgacgaaattaattttcttctttataaaataataacgccaatcgaaaatacatagcgtatattagaattgaataattaaacaaagaaacacagatgtgtatttttgtatggctttttgtagtgccagcatagcatataccgtatatgtaaattggctattctttctttattgtggtgattaatttgtcactttgttttctttaattaatatatttcctaaataattgaaagagttgcgtgtatgagaataggaggaggaggagccattactcatgtcgtcatagtcaataatgttcagtgactttcggatcaagatttaagagaattaacttatatggcttttgcgtctacatatattaatgcacagcttaattgtagagtggagccgaagaaaaaacctaaagggtgtaggacagaatacaagaggggcgttattaattataattagtaataagaaaacgaaatgtaactgatttaattgtcaaaagctgtacgtattgccttaacaaagaggtaacagtattgaaaaaaagcttggctgtgaactgagagcaagttcaagccacaatttttatacacaattagctgtagagcttgtccatt

SEQ ID NO: 185917 - DNA, 7317 bp, Cannabis indica
agtaatgagaattgtgtgttattgtcacagaagtgccacaagtataatttaaatttaagaaatttattttcttataatttttaagaaaatttaagattaatttatttttattcatataatttagggtaaatactattttggatcttgtattttgtaaaaagttactaattggactttctattttattaaatgataaaatggaccctatattttttgaaaaatgtacaaatagaaccctgaattgattttttgtcaaaataaaacttaataataatctaatctaaatatgttataacaaatctagttacattttttgtatctgtttgtgttagaaattatcttaaagttaattatattaaaaaataaaattgttaaaagagttcaggtcctattttaccattttagaaaatatagggtctattttgtcatttaacaaacatagggtccgaaatagtatttatcctataatttataggtaataagaaaatattttttaaaattttaaattaaatatgtgacactgacaataatatatcaaatacattgacatgttttagtagaaaattttttaaggggtatgatacgatcattgatcattgtaataattcaaggttataaaatttttaaatagcctaattttattattattttctaaaaagaaaaggtaaaattacaattttcttgaccttcatgtttggcccctccttgggtctttgtctagttccgccactgctcaagacgttctcatcacacaaatatagtactaacgacatctaagttcatattattagtatttagtccaaacgccaaaaccttactactatttaaggtaagatacttagctatagttatggttaaaccttttcccacacacattagaaaaaagaatatgttttgcttgtttaccaattaatcttctaataccctctttcctttctttctatctaatcttttaaacctttttctggtttctcatctctgttttcctttgcataaaatgccaagtacaacagatgaaaaacccgaaccatgaacaacatgaccgaactgaaagattaagtaacaaacatagctgcattcatggctaaatatgaaatcttgttataaacagaaagaaccttcctcgacggttttatacccgagctgttaaatgagtctgtacaaaaactttcagtatgcaatgcagcaaagaatattcatatcatatccagtttattaccgcctaggtctgcgttgtgcattattcaggaattccagtaaatgtaaagcactacattttactaacaactatataaattaagaacaaaaaatagatactaaattacaagcgaaaagctcgatgtcatctctacactttgcaagaaaagaatttctatatttacatgagaagttactatgttttgtgtctttctttctttctttctttcttctgatttaagcatatgagtagttagtgaacaaaatagatagtcaacctggtgtctgcccacaaaggatgaaagcatgaataaggcattgagcactagatatttgattaggagtacccgaaactgaaaccagcccttccgtggctccaggtttcatatcgtttaccaccacctgagcacctgagatctgaaatgccgatgtatacagttgaattaggcatcacaagattcacaacaaagtctaaccgaaaaaagcattatgtataaaacccacctggcggatctgtgttatattactgttgttatctccataaacatgggttaacaacttttgagggattgtgatctcaacagttgcgggagctaaatgctgtgcttgattttcactgttaaagagaaggatcggcgtgagataaacgaacaaaaattgtaacttaaagtcaaaaggagaaaaaatcaccttcccaaggaaccatttcttgcatggaagcttggactattatcaattcccctaggatttccacagttaacaccctgtaagaatcccgtgaaagaaacaaagaattaataacaaaatagaagatagagattacaattattcccgcagtgatgagagtatttgaatgcataagatacccacctgagaattccacattcttggagaagatggtctatcaaatggtcgaccttgtccatggcgttcacttccataatgatagggagctctgtccattggagatggagcattgtggtccatgccatgtaaaaatccatgctggtgatcatgtggttgggatggaacagaagaccgatcaattccatgaggaggcccaacaggagaaggacatggacctggggaagctgggttatgtctaggcctgaacattggaggtggcatttcagggtatggaggcatgtatggtgggccatcaaaatttggatgcagtggcttcaaaggaataattgtttcccgtagtctacttgtaatgtgaaacaaggcatcctgtacacactgaaagcttccaataacctgccaaagaatataatgcaacaagctttcaatatccgtacctatttaaaaactggagacaaaacccgctgttagaaaaaaaaaaggatgataagaaatcatgctataatattaattcattggatccaacacatagaacaaacaatacaaatacagataatctagacaaagttcaaaaggcaatgttctgttcctatgttcttctggctcgtagagtggaagaagcaagtaattatcttcatgcataaaacaggtacagctggatatcgagtacataaaaaggctatagaaaatgactccaagtaacccaagcaacaaaaagccgcaatcataattacctgcacaacttcatcattgtgtgaggcacatttcgggacttggtcctttgtaaatatgcgaatgctagcaccagtagctcttctcatttcagaaataatgaaacctcctttacccaataaacaacctatctgttgagaatgtacaagaagcctagcaactactgcagcaccgggttcaaatccaatctctgcaattcgagaatgcacacgaataacagcgtcctgtgaaggggaatgtttttgctctgaattctgtaacatagagaattacaccgcaaaataagaaatttatgataagaaacaatgataatgatttcagttgataatgtcttagcaatgtctgatgtagtagtcagaaaattagttccagagcatttatgggtgagttataatcactgttactgttcatgatggcatggtggtataacatggcataacttacttttccacttcaattaagtaaagatggtccataatctaggataactactcaaatagttaatcattactcactgtatgagccttttacatgggagaccttagaagaaccaaaactgaataattgatttccagtcctcatcctctgcacaggatctacaagtcaccgaatagtaacaaatgaaagacgtctcatgtccataataccacctatggacagcttcaaactaataaatagcggtataataagaaatgtgcgcggtaagattcttgaggtaccaaaaaggatcagaataactttatctaaattctctcttaaagtcatgtcaaaaaggttatgtgaaactaagaaaaatgtcttcaatataaaggtgctctagaaaaggtaaaagtgcattgaagcttggactattatcaattcccctaggattaaaaaagaataatcatagttaatatttcatacctcccgtgcagatatcataacaactcgctcatctgaatcaggtggagcatcagctatcttgatgtatgcgccagtatcattttgcaaatgtcgaattacagagccacctttccctatcaaactaccaaccttatcaacttggcataacagcttaaacaccacctcctcttctataaacattctattatgacccgaccccatattttcaggccctgaaacagaacaataactccgattataagcaaaattaagaaagccagatgcgaaagtctgttgaaaatactattatcaatgtgctgccataccatttccatgatgcattctccctgaaactttactgccaccatagttggttgcattctccctaggcttatcctgaagacaacctgaaacagatagaagtgctttctttacagctgaaatgttccctgttatctgcatattcaatgcacccaagtatatagctttaaaaaaaaatataatatatatctcataaaagaacaagtcaaactcaaagaatccaatcactcaatccacctaatgccattccatactctcatctcaattcctatccaacacaaaatattacaccattacatacaatgaaaattaacagattatggacccaaaagaagttccaagcaaaattgataacatgcacattagttcaaataaaagttccataattgactgactttaattcatcatttaaacccactatgctaaaattagttctataattactatctaacacaaaatattacaccattacatgcaataaagattaacaaattgcaaacccaaaaagaagttccaagcaacattgatagcatgcacattagttcgaaatcaaagtttcataattgaaaagaaccttcattaatcattacaaccccatatgctaaaaatcgctctattaacatagaaaaatcactcttttaaaaaaaaattcaaaaaatttaattccaagcaaattgatggcatgaaagtgaaacaacagcacataagttccaaataatagtttcataatagtcattttgattcatcaatgaaaaaaaaaaaaaaaagttctttataacatagaaaaatcactcttttaaattaaagcataaattcagaaaatttaattccaagcaaattgataccatgaaagtgaaacaacagcataaaagttccaaataaaagtttcataattatcatttttgattcatcacatgcaaaaaaccgtgttcataacatagaaaaatcaactcttgtaaagcacaaaattgagaaaaaaaatttacttgaattaactcatctccaggtgaagcacaagccggaatctgatctttaggcaaaactctaacctgagcaccactctcctgccttatcttctcgacaatcttcccaccacgtccaagcacacacccaacctgactaccagcagccaacaatctacacgccacaaacccatccccactatcattctccttctcattctcattctcatccgccataaccatcttctccaacacctttaaaagcgccaactgagccgccgagggcgagctttctccatcgctagggctagagctattactccgcttgttgttgttatccaagtgatcgaatttcgacctgggcggagtggagtcggaggtgatgagtataactcgttcgtcggaggaggaggaatgggtgtcgtcgatacgaattctggcaccggttgtgtcgcggatatggcggatgactgaaccgccttttccgatgagtgctccggtcttggatgccggacagaggaggcggaagagggtgtccggcgttggggacttgaaggggagaggttccattggggattgggaagagagagagagagaggcggcgctacagaagtgagtggttgtgggtttgactcaatagtgaatttgggtttaaagtttaaacccaaaaggaatattattgagtcaaacatactagattgacttttattttaatttatattgtttattaataattaattaattaattaattaattaaaacgagttaacacaattcgaaattcgcacgagaggtagtcagtttaggttttctttaaatgggtttagattgtgttcgggttgacacggctaatacgaaagtgtcctattaatgacccatttaaaattagagaaatgttagaaggcaccagtgatacttaacacccttctatatattattatcgctattggtttatttaagtatcgaacctcatatagtttaatgtaataacttttagagagtatcgctagtcaatcataaagcgagatgtctagaggtactagacaccactcgtaccaaaaaataatgcttctaaaattattttagttctttaacttatcataagtgtggtgaatatatcataaatgtattattagttgatatttttagccaaaactttaattttatttaagtagtgtaatattaatttaatgttatttataattaaattaaaaaataatatcaaattctaataaaaaaaaaaagttcattctaagtaagaacttaatttttaatatatagtataaacaatactataattttttaaaaaaattaatgagctcctgcaaatgtcccaagcaaatgagtatatatttgggtctttctaatactatgggtcaaaataaaatggttgttttggatttcttaagaaaatggaaaaaacttcaagattgggactcgaaggtattatcatgagctggtaaagaactgttgattaagtcagtagcacaagctatgttatgaatgtgttcttaattcctatggagagtagtaaagacattgagagcactatggccagattttggtacaaaagtttttcgagtgaaaataagagaatctcatggatgtcttgggagcgtatgtgtcacgataaaaataatgagagcttgagttttcgtaaccttcgtgattttaatttaactttataaggaaagcaaggttggcgttttcttacaagacttgagtcaatcgtttattgagtttttaaaactcgacatttccctacaggaagctatctttcagcctatcttggaaataatccaagcttttgtgtggcgtagagtttggaaaactcaatctcttgtttgtgtaggtgttcgttggagtgttggaaatggttctacaattagtgttatgggggagccatggttgccagatcaagaccaggccttcgtgacttcgtctcgtcctgccctccaacaagctacggtgtgtaatctaatgagtattgacaaaagttcatgggatacaaaatttttagatgatttgtttgaagaaagggataagaggttgattatgcatattcctctttgttccaaccagtcctgtgatgttttgaactagtttagagaaccgattggagtgtgttctgtgagaagtacctatcacttacttcaatatttgaaaggattgtgcaatgaggtggcagcgtcagaattttagaggaccttgtggtctttgaatctgccactaaatgttaaaaatttgatgtggcaggcatattttaactatctcctaacattagcttagttagctactaagcgagtaactgttaaccctcgttgcccactaagcgagtaactatctcctaacattagctt

SEQ ID NO: 185918 - DNA, 4754 bp, Cannabis indica
agagagagagagaaagcgagggcaacacacagcaaaatcaaaaaaagaaataacgttcaaacatcattttgtgtcgtcatcgtcatcgtcactggacttgtcaaaataagagaaagtctccatgagatcctcatcctttttcgaactctatgtacctctgcaaaaacttgtccacgtcctaggaggctgattttgccttctttgatttcagagtatagctcgtagacagactcataactcttactgaggaatgttttcttcacttgcttagtcaggaccttactctctttgactaaagagcttttttcatcaactaaagcattctttgcttgcttcgccgtcttctcagcttcgaaaaactttccctttaaagaatagacttcagacttcatcgtttcgctagccaagactaggttactgtgctcctgaggtaaagtatctttctttatctttagctattcatgacccaatttgagctcagcatactcagcctcaagggaggcaaccttttcagtaagagcctttttctctgagtctaggaccagtcgagcaaggttccagttcttcttctcgaaatcaagaccattgactttaattttcaataactcgttatcaacctccaaagtgctaacttttgaattaacagtgttcttcccagcaatggtagcttcataattcttcttaaagcaagcacaattcttcaccaggttatctttctccttatccgttcgcggggcaaatttcatggcatgggcgcaccttaaggctttctataacaaagaaaaatccatcacttaaaatcaaacagtataaacattcatagaaatgagaaagaaacaataaccataaactagaaacactaataccttgatcccagaaaccgcaatatccatcaaaatagagtcctgtcctttggagatatagaagtcgtcgtctggttacctgatagcttcaagtaaagagttataagaaatttagccaactcctcaaagagaatgtccttttaaattcgaaaggcaggaatctcatcccactcaactaaaaccctcagcgaatgggtggccaggaacagagaacctcagctagtgggatgagtcaaaggacagaccacataaggagacaaagtaagttgggaagtctgggaagtcttaacatgaagggtggagatatgagcaagcgaagataaaagaaaacctagggatgcatccaaatgtgcggtcaagggatctatattttagggaacgcactcaagggtgctcgacttggttggcaccaaaataagggcatcatccctagaagccccaggaaccgagacggagtcctgaggagaaccgagtagccccccaatagagtcatctaccaccgagtcatgttgagatgattggccaacatctcactggttagcctcgtcaagcctcgccgccttactcctcttgcctttgccttttctctcaggtgactttgccttgagcctcttccgatgggtggaagtttgagccttaagttcctcgatggataactcatatagtttcattttaggaagatgatgagggtaagtttctgcatagcgggaagggtccttagaaaattcgatcaaaattggcttggccgtttgttttaaatgctcaaaggcacattttatgaaataaagccaaatgaaataagaaggataaggagtggggatacctagggggatcctgagctcgctagactagacagatgatccaatcaaggcttcgtccgatagaagatatttaatagaccaaaactttggtttgagagcagtcaccttacaaactttactggtgaaaacttccttaatcacgacttctttgcaatccatagaaggtgtatatttttttaaaaaaatcagagatcagaattgcaataggaagatataattataggtacgatgaataaattgcatttaagaacacccaaataaaacaaaggaaatagcatactaataatactaaaaaaaatgggaggctacaagaagttaaaataccaggagctcccgagctccggttgataaaagtggcagtgggatcaccaagtacaaatttgataggccctttgatgaaaaagaactaattcttccaccctctatgagaagtctctagggtcagtgataatagcacagttcttcctaggtcagagatgatagcgaccttgctcactctccattagggaataaaaatgaagaacatccgacacttcccatttaattccagccttatctccaaaaagtattaaacctagaagggtagcccacacattaggaagtaattgagcaagagcaagggaataatgcaaaaggaattcctttatcaactgaaggatgggaaatcttaatttaatttttgactcaaactagttagaatatatgcacaaccactcaacttgaggggtgtcagccctctcgtgagccttaggaagcctaaattctactacaaataaaaagccattagaggacaccaaggaatcaagctctgaccgagttaaaaccgacaaactattcaatttatggtccaaatgagagcgccccaaagtaagctgcttacgcttcaatttcttttgaggaggcgtagcaaaggttaccccctttgaggaaacagtttgccttctcacacctgcaccatccccagaacgagaatgggggacgatcgaaacactacccaaacactcaatttctgggtcggcaggtataacaccttccttatcctccattgaaggagaatttgaaactaacaaagaattggcaaactcatgagcagtacttgaagagagggaatcagaaactggggaagaagcgcctagacgatccacatttgaaattataaatctaataaggaggaataaaggggaaatatacttggaactcgggactaagcaaagaaaccaaaaattcagaagcctaattaagaattcaactgttcccctttccaaaaacagtaatgacgcaactaaaaaaatattattttaggaaaatatagaaactaaaaatgatggaaatgaaacacagaaacaaacattgtgcgcaaatagagaggggtaagataaaatttcttttaaaaaaaaggagacataagtgagggaaggaaaataaaaagaaagagagagaagaagaagaagaaagaaaaagggggaaaaggaaaaataataaaaataaaagaaaactaaaaaataaaagattatagagtaccaaaattaatatatgcctggaagagatatgattaagagtacagaagttgaagtgaacatcagagaggaagcacacacaagatttttgaaattggagatcttatacacaggggtgcgccgtcaaaaattcaaaagaagataagaaatttagcaatacatttcatagaaaaaatagttctcgatgtgccatgatcaaataacataaacaaccattttacaaaaatttataaatttgaaattaaagtagaaaaaaactgacacaataacgtacaataatgatcttaaaaataatgataataataatactaacaaaaataaaataaacctgataatttattgcagttcttgattatgcacaagcataaacgaaactggggaaaaaaaaggaaaaagattaaaaaaatgaaagaccaatcaaatatattccccaaaagagccccaatagaccgccactaccataaaatagcccgcaaagagataaaataattaaaatatatataagccaataaattagcaaaaagacaatgccgacaaaatatatgacaaacccaagaaatgatcaaaacgaggacccgccatccaaagtaatagtaattcaagccttaactcatcaaactaggctaacgatgacacacccgaaagcataataaagagccaaagtctgagatagaccaaagccataagctaggcgagataaacaaaaacaactctccaacagacaaaatgtaaccagaaccgaaaagcatttggaagaatattttaaaaagcaaaaccacttaaacttagatagaataagatgagattcccatcaggaaaaactaaaaaaactcaacgaatcgaagctaatgtcacttcggaatctcggaccaagacaaaatatctcgttagaaagaaattattcttaaatagactataacattagaagtcctatagtaggacactgataaataaaataggaacaaagtttaaggaaataaaacctatctccactaaataagacacgtagtagatgaagttaaaaagaaataaaagtcacccgtttgccaaacaccaaaataaagacaaatgaggcatgcatacgaaagaatgtaggacataaataggaagggtttacgtagaaaaagcacgcattatgaactggaaaaaaaggaacacatatacaaaaaaatacactgactgttttctttgacaaaaagcatctacactttttggtcaaaacaccttctattaataattttcaagcttttggaatgtttttgattctcatgttagtttgtaatctctttggtatattgatcctcatgacagttttcgaatgtacaatgtgtgactttttcattgaaaagattcaatttcggccttcgttgtgattctagactcattgagtcataaggaatatgaggcacatattagagtttcgaaagaaaaacaaacattgagattcaaaattaccttggctggccttggaggtcttgcatgaaacctggctggccctagggcttaatcatgggagttcgccaactctaagattttaccctataaagctagca

SEQ ID NO: 185919 - DNA, 4966 bp, Cannabis indica
attaagctttattttcttcttatgtatttttgttgccagatgactactgccattgccattgaggacgtgagaagggaagtcaagatattaaaagctctaaatggacacagaaatcttgtacaattttatgatgcacatgaagatcatgataatgtctacatagtaatggagtaagcccgaaacccggaacgcagaatttcgttttagtttatgctgttctagtgattttgacatttagtgtaaaaaatgtttgattgtcttgtctttcaggttatgtgaaggtggagagcttttagataggatattgtcaaggtaatattaccttcttttaaatgttgttggagttaataaaagtagattttacaaaagtaaaggatcgtgtagcaaatgggcatcctctgaattatattctttttacattgttatgcaggggagggaagtactcagaagatgacgcaaagaaagtcatgacacaaatattaaacgttgttgcattttgccaccttcagggtgtggttcatcgggatcttaaacctgaggtgtgatatattctctgtttttctttgttttaatggagctgaagctagtttgaaatcacccatggggttggatagcagggtggcgaagatgcacccttttcatatctgtttaaaattattataaacattaaaccatgaccatcttcctgcattatctgcataactgctgcatcgttcgagggatgtttgaaactgtagtatgatatttcaatgtagtatactcttctaagtgtagttaattgctgcttcagaatttcttatttacgtcgaaggatgaagattcagaattgaaggccatagactttggcttatcagattttgtcaaaccaggtttgtgaacacttcattaccatgttaatgtagcatgtgcttattttatcttatgagtgagtgacttacagttaacatgacacattttccttttcagatgaaaggctcaatgatattgttggtagtgcatactatgtagctcctgaagttctacatagagcctacagcacagaggctgatgtttggagtgtaggtgtgattgcatacattctcttatgtggtagcaggccattttgggcccgaacagaatccggaatatttcgtactgttctaaaagctgacccaggttttgatgaagagccttggccctctctatctactgagggaaaagactttgtcaagcgcctgctgattaaggatccacgaaaaagaatgagtgccgctcaagcactatgtgagttccttgtccatagttaataatgtgatttcattttcatgtttgtttgatcaccggtgctcacaaattctttttgcaggtcacccatggctgaaaaatgagagtgatgtcaaagttcctttggatatactcattttcaaactcatgaagatttacttgcgttcttcatcgctccgaaaagctgctttaagggtgtgtacatgatatatttacagataagaagttctagcacattacatgtgttcgtcatgctctaacagcttttgttttccttgcaggccctgtccaaaacattgactgtggatgagctccactttatgaaagagcaatacgctttattggaaccaaacaaaaatggcacaataagcttggagaatattaaagtggttggttccctgcagaatgcctctttttatatagagcttgagttttggtcttatccatatttttaacttctaaaatttgtcaggccttaatgaaaagtgcaactgatgccatgaaggattcacatgttcttgatgttctagcatcggtaggtatttttattggtgttggcgcctagcgcccttttaaattattgtatatcatttatatttgaataaattgttctgtctacacttattgcccatcttttttgacagttcaatgcgctgcaatacagaaggatggactttgaggagttttgtgcggctacagtaaatgttcatcagcttgaggttcttgaccggtgggagcaacatgctcgatgtgcttatgaactatttgaaaaagaaggaaacagggctattgtgatcgatgagcttgcttcggtatgtgtgtgctatttgtttatttgacattcatactcatttgatatttcagtcaacatgcttttgaatctacttttattactaagccctttaattttcatggtttgctatcatttcttttcattcctttacacgttgttctttcacaacttaaatctcaagtatatatgatgaagtttcaacaaacattgaagaacactaagatgaatcacttttgtataaatgctcacaggaactcggtcttggcccagccgttccagtacatgccgttcttcatgattggatcaggcatacagatggaaagctaagcttccttggtttcgttaaattattacacggggtatctatcagaactctggcgaaagcaactcattgacaaattccatggggattttgacatttaaaaattactgatgagaagagtttgaaacggaaatttctgaagtctttccagccgtgacgaagactctataggtgcctaccttttttatctgtaatatccagtacaaattggggttgggagctacaacattgtgctccaggggtgcaaaaagcccaggcgagtatttgtgtttatcctctgtaaagctgtagtttagtagtatttttagttgaaagtgagagttatatagttttttctaactactttataattagactcttattgcacttgctgtgattcagaccaactgctcagatgtctccaccattatgctgtaacttgtatcatctctctctctctctctcgtgattatttttctttcttttctcccttcttacttctctgttatatacggcaatcattattctattttttattaactataaatatatttcaagttggtcatatcagtctggattagccttgtaagaacttgagtcatttacttcattaagctataaacccatctcccacaattctttggaagacatattgaaggtttattgacattgttgggtagtggcatagtgaggttcccattcttatgcaaataatatttgtttactagtggaacatggttaagacatggaatatagagactgtttaatgccaatgtcccctgggcttgagttgcatcaaattctccgggggcataaccgggatgggaagacgcgaataagcatagaacagttgcattgaagccttggcgaaaggggtgccaaatgcattgggaccgccaagagaacgtaggtgttgcagccaggctcgaatatttcctgggttagggaaggtgcatacaacacatccacatagtacagtaggcgtggactaatcttttagccttaaaaggaaatgtattagagattattctttttgcactagtaggaaaggtggtttgtaaagtaaaataaacatggcagcttgttctgcaccaattatatccgccttactaccagtcatatatcagtttacctaccactcaagtgggctagccctctagagttaaagtgtattttctatcaaaatacttgtaaacaccttattagataacattaagcatagtgaattgcttattgggctcaagtaattttgctcaaatatatgacttttccctttaaagttatactcccattgtaaaagggatttcaaattttagttgttcatctaaaatacttgtgttttctgaggaaaatagataaaacctataattgtgactattcaagcaacaagaacattcacaaggagaactgtgagtattcacttaaatgtaaataaaagtaaaatagcgattgataaagtaaaaaaacgattgatagaacataaataataaatatgtaaaagacacaaaaattatgatggtttagacagagtttagaagatagattatcatcttcttactgaccactcttttatataaaaggtaagtgatcattccattacataatcgaccatataggtttgttacaacattaattatacttaattaaaatgaaaaatatttgcgaaataagtgtaaaaacaagttcaatcgttctcagggtgcgactactctaatcgtacatctgccgtttatattcttgataacatgtgaactcgatgattaactcatgttaccacatgtgcgtgcacgcataaatctctcgagagcttttatagatccgtgaacctatcgaatttttgtattatagaatgtttgtgattatatcgatcgcgtattaagtactcatgtattgacaacaaaggactcgtgggtccatgacgagttgtcgcgtacagtagtcatttgaaccaattgcttaaagatgtgatctttacatagagcgcatgggagaaatatcaggtcatcgtatatattcgatatacgttttgactgtgcttacttctctctatgtcccgtgtttattctatctactatgcaacacatagtgtgtgactagaccctgtctcggtcacaccttctcgtatatttttgtcatgcaaggaaaatttataagagtttatacccttgacgtacccgaaattgggcctacatgtcaattaaatacaagactactcattattttagataaaaaaaatttgatcttataacatcttggaaaatattattgttataactctcactactttaatatattggctcgcgaaataaaattattttaaatttccaactacataaaactcttattaatattcaatcatttttctaatctctataatcatttgaaaatcttaattgccgaaaaattctatcaacaaaccataattaaaatttgggaactttgtttctttaatcaattgtacaaattaccctattaaaaatgcaaatttgagatgtattggtattgttaaaagctacttatatcacatatggctaaagaaagggagatatacagaatcaactatttattattattgttatttaaattaggggtatccgattcaatctaac

SEQ ID NO: 185920 - DNA, 1560 bp, Cannabis indica
aaaaaaaaaaaaaaaactccattgatagtcttagttggttgtttgattttagccacaagtgattgagccgaaggtgaattgatgtgacgggaaaaatatgtggtcttaaactatacaaaagaggccccaaaaagttggataactccactccaccaagctaccgaggacttctttttacatgtataaataatgatgatgcgacccaacacaatcatatggatataaagggggtccaaatctcatctaatatgattattgttgacatcgttttttgcattaattattattgttctttcaatattagtttaaaaataaattgaattggatataccttttaaattgagtgttttggtaaattcaatattagtttatttattttgaagatttttttaatttaatttttttatgactatgtatgttataattatttaggattacttataaattttttaaaagttttgagtagtctacaatgccaaaaaataaaatttatatattttattgtacgtgcaactggtttttgttatacgcttggtaagtaactactttaacttattgtaaaatatttataattttctaaaattttacaagtagtcaaaataagtacgcgaccataaaaaaattacactaagacactattttagatgccaaaacatatagaaaatctactagaacgatcctttaagagagtctacttaaaatgttatctcgaaccttgatttttgaagagttttgtcctctaattatttcttttattgttacgaatatttctcttaaactataaaaattattgcaaatattcccactcagttttataaataagttgttaatgcaacactaacgtataagactgagcatccagcgggttaactggattttagattcatgggttttgggctaaaaaaagaacacctgtacctgccagtgtagtgaccacaccaccaccaccacaacaatgctccatgactaaattaacaatcttcaaacattatggacccaaagagaaaattaaaattcaggtactaacattgaaatgaatggcttggcttgtatgacttttctggttgagttgctttgaatctaaattaataatgactatgctctaaattaacaatggttttgtggctccgccttttcccgtctggttcttgcaactgagaaatggggaaatggtcaactgggtttggttatggtttagttcatcggtgagtggaaggatgagacatgcggagtttgaggtttggttcgtcgcttaactgctgttttccttttttttttttggagttcgaattctacccttgaagagaagatgaaggtgacgattggaatgagtgaatcattttagatataagtttttctttttaatttaattcattaaaactaatttaggcatattaattttaaattactagagttatattacgaatgataagttcaagtttttatttttacttaatatttaaaaaaaataggaatttaatcagagccttacacatgtatattttttcaaacagaatcgtagtaatagaaatgggtaaaacacaacatttgatatttaat

SEQ ID NO: 185921 - DNA, 3459 bp, Cannabis indica
ttaattaaaattattttttggacttataaaaaattgactcgtggcatttgatttgggtttaacggatcagttaacttggggaccaacggacttacaaaaaatgtgaccttatagggaagattactgccaattttcgaggttggagttaatttgcatcaaccttaaatttttgaggacttttgtcacaattaacttaattttccagttgttggggacttttgccaattttcgagatggagactaatctgcatcaacttaattttcctttcgattaattccatttcgtttatttttatacatagtttcctagtgtaaaactaatctaaagcttatgcactgtaatttaagagcctaaatgaaaaataattgcataattaaatagtactctcacgatgaaatcttgaactggtttatctctatataaagagtccctctcatgtacattgtattaatccagtttagcaataataaaagagttcaatacagagtattttctctgtttcttcttcactttcatctgttttccactcataatttttaagttaatttttgaaaatttaaagttattatacttgattttaattagtttatattaattaattaaatagatactcgaattgtaattataagcgtgacttgcggctatatcaataaattatctaaaaaaaattaagcaaaatgcaatcaaagggagacaatttgtaattattttcatatcttgaggaatatttaataataataataataattcaagagttaaactcctacaaagtatcatagttcaaggtaaaaattctatttaaactaataatacaacaaaataatttcttttatagataaataatgtatatctagtcaattttgtgaccatgcattacgcataatgtatggattgaattacaaatttactaaagtaacacattaataatgtttgaaaatttaataccatatatataagatatatatgttactgattaattttgagatgaaaccctatatatcttattatacacacatttatcctaaaatctaacataatactataggtctatagcaaaataaaattctaacgaatatccgatccaaatttaataatcaatccaaaaagatgaggtaaaagaattgtttgtaatttggggatagtgagtcaaaaagagtcactgtgatcagtctaaaaaaaagagctaaaatagctgcttgtgattcaatgagccaaatgtgccaccatcttgagaagggatgtatattgtaaagtcccacattgatcataatatgtgagaacttaattaatatcatatataaaatgtataagttacttccaccaattaagtttggaataaattaattgtgtatatcttaccatgtacacacatttatctaaaattctaaattatataattttaaaatttatattaaacaatatgagcttaatataccaatagtttaaataattgaatccatcattatttgtcaagattaaaaagttagggtgttggttaattgtttgttaggacaattaatttctattacaactgactaatcctttttctttgggataatgtcgatttgcctcttaatacatttactttttaattaataaaaagcataacaaagaaataacagagtagtcaaactctgcttctctttcctctttccccttcttctttaatctttctgtatctcatattattggttaatcaaacatgtaaattcgatcaaattcgaagttctatgaattttttataaaattttttgtagttttatttttttattatcgttatagcacaatttcttataattagactcgaataggtgcgaacaaattgtcagaataacttgccctaatcacaaaattctttaaaattttagagtgacacgttactttttgtagtgacataaaattccttttcttggcaaaattttcagaccataatagtttgaaccatatatataaatctaagataaactgcataattatatcacacacttatcagttatatatataaacaatgataacagtcaccttttatcaaaattaatttcttcctttcatactttgacaacttttgaaaattaaattcttattggttgactttgggggagataatgcgaaaattccaaccaagtgagcttaaattccaacaattagtgtgtgagagagtactactggctcatgatggttatggttgtgttgaaatggtaagaagagggattcaaactcacttaaggatatttgggacatagtattgtacatacgagtcgtatttttagatacagtttgaaaatgacacgtgtttagtgagcctgagcctgagcatgagcatgagcatgactaggtatagaaaaatataaatttttgcataatacaatacaatatacatgctataaattgacacgacacgaaaatatgaacttaaatatacgacataacacaactatgcaagcacaattttgataatagtaataatattttgagttattaataaatatttaaattttaataattttaacgattttgctgtataaatttttgtaaaatattattaaaaaattatataaaaataattgaagctttaaaaaaaaaaaattaatttaatagtttggtaattatcttattaattataaaaataaaatatgaaaaagaagaataaaaatttgagtctatataaaaatcggatcagcatgagtaaagtacgacacaacacaattcatatatttttatatggcacagtacatataggatccacatttttaataagatcacgaacatatcttaaaaagtacaaaagaaagaatcctactatttatcctaagatcccgaccgctccgatccacgtagcggatgtgggttggtcgataagtctgaggtctgactacaaacttgtcgaccaatccacatccgccacgtagatcgggtggtcaggattcttccgctttcatgttcttataaattattaaattaatgttttaataagttttattttttggtccgtacgtgtgtatgctagatgattatgcattgttgactaatgatataattgaaagaattttcaaaagtaatgtataattgcaatcttcagaattgttagtatttgacctcatgccccttaattaatatatatatatatatttttgattgtgtgaatatggtagattttgttgttgttgttgactaatgatataagaaattttagagaaatatgtcaaaatgaaatgtcttaattgttaagatgtttatttaagaagcaaaaatggttgaactaagccatttgattatgcaaattaacttttttattgatctcccaagtcaaatgatttgattcaacttaaattggtaacctatatgttaaagtgaaatttaaagcaacaataattgacatcttgttagagtaaaacataagaaaattgtcgaatttagtagttggaaagtgaaaaataataatatttacattttttttt

SEQ ID NO: 185922 - DNA, 2658 bp, Cannabis indica
ttagaggattctcattagcttctcaattttatcctctaaaatacataactaaaattccattttttttcatttatattaaattacattccacaatacaatttttaaaatacatcactattctttttttaaaaaaattttaatatattttatttatttcacatatataatattaatattaacaaatatctctatataaaaaaataaaattaaaacctcaaaaattaataaaatatgtttagagtaataaataatattctataaatataaaacaaatagagtgctcttactgtttatgccttttaaggtgcaatttgacattttcttaaaggtttaaatccatgatttctacttaaaaatttgttacctttccttacccaaaaaccattggtaagcagtaaaaaaagaaaaaagaaatcatgagatcaatctatacaagtacaccttcaatattttattacctccttcccggtactctttctattatttcagctttcatctatgtaaaagaataaacgaaccaagtacaagctcatatatattcattcagtgaaactggtaacaccaaatttcttaagcaactgccctgtcctgttgatattcttgaaaccattcagcaggccaccattctggccttgtagcctcaacttttacatcctcctgtccttgtatggttaattcacttgatcttttgaaggcttcctccagacgcaggacacccagccctcgacatccaatcacagtcgttatagcaccgacttttttgcctgtctcggtatcaactacttctgagccaggagagattttctgctccaattctgaatagaccacagagaatagaacagcaaagttaagattgttatagggcaactcatgaagtaaaatcaaatgggaagtagtagatgagatgattgccttctccacggctattaacaaatcttaaaggaagcaagcgcttgcgaatgaccccacgatggtgggtccgtgctacaaactcttggccaacataacatcctttgtcaaagcttattgcgtttagtcccaccaggttgtattcaagaggaattgcctcacctgtatatgacaagaactttctttgagaaaagtaattgatagaatcagattttgctcttttttaaactaggctctctgtctaaccatattaagaaccagtacactgtagcaaaattactatgccggtgctacattgtgagaacaaagtacgagcatgaacattttgagctacccgtactcggtcatttttcttatttcatatgtacaacatcataaaccacttgaattgtaatgtaagaactgatttaacatgtcaaacacaaatcacgcttttcagtttgtaagtaaagattaggtaatacgaaagccaaagaaaaagatattagatatgcaccttttggaatctcaattgagccttctgcaactccattttctactctccataaaatgtaattcttttcatcagtttctttatcagcttcaaccagaggtgctgtagcaggacaaagtaaattatagcttaacaacacattgaaacttctgtaatggtctaaagctagcacagataggaaaaacacctcaggctcagaatctcacgtgttgtattagatgggaagattcccctaaaaccaaggcagtccaatctaggatccttgtaccactgtgttccatgtttgttcccatgggaagctgactccccagaccgatcaacgccggaaccccagccaacgctagcagcctctggctcttctacatctgaggaagttttagtaaggcttcccccataacgctgccagcaagagaagtcttccccaacgttctcaatctcaaccttggacctcaaacgatacctggtaataaacaaagggagctaaatacagcaaagcacacatttccaaacaaggaagaaacaatatatgagactgaaataagcctacatataaagtttgtactaattactatttttattgttacaagctatgcacgttcattattcaatcaagcattaagtattcgtaattcattaatgtctccaacaacaaccaagggcgcagacaatgcagaagccatgtttaaattgtcaattctcaaacaagcacatggtattcataccaaagccatttctccaccatcaactacggggcttgtacaatacacaatgccaaagcccttgcccaaattgtcgattccaaaccaatcaactaatgcttattcatcaacctacgcgtacatagagtagtatagttctcacaaatttaagagcttaacaatttttaaacaataaagatcaaagatgtgaacttctcatcagcactacatacatacacactcatacatacagagaaagaagcagcatcagcatattgtattaaaacctaagccatgtatatctccactctccagcatcagctagggagcatatccaaaacacaacgccaaaaacttgcccaaatagttaattccaacctaatcagctcatgtttattcattacaccaagcctagaatgagtagtatagttctcacaaatatgcaaacttaaacagtacattactaattactaacataaagatgaacaatatcaagtactatacatgcacctaaacgtataaatgagcagcctaaaacaatgactttctcgaagaaga

SEQ ID NO: 185923 - DNA, 2976 bp, Cannabis indica
gatgcttctttcaatttgtatttctgatttgatagcttcgttatctgttgttcttacaaatttaggatcataattataagcctcaaattattatataattatatataaatatgaattctacacatattgatatttccttctgattttgtttttcactttaatttgttcttctgcaattaaccaagtaaccttaatatgataattctgtttatgttttgactgaacattgtagactattctaatttgctgcatttaaattttctaattttcagcattagatatggatgttgatatagatcactataccattcttgggctaccaactggtgaggatggtgctaagcttacagagaaagagatatcgaaggcgtataaagtacaggctttagttttgcatccagacaagaatcgagatgatccgaaagcacatgacaagttccagaggctaaagtcctcatatgagatattgaaggatgagaaggccaggaaattgtttgatgatcttttgaaggttaagcaagagcagcaacggcgtcattctgaacgcgattccaagagaaggaagatggtttctgatcttgaggaaagagaaagagctgcttttgctgttgatcctgctgcagagaagcgagagaaagaggagagaattcttaaggaacttaaagagcaggttgcaaggatacgtgaaatgcatgcaaataagggaaaagcttcagtgtcgaagactgacacgagaggagttagtgaagagactgccaatactggcggcgtgctgctggataagaagaggatacttaaggtttcgtgggagaaattcggtgagggttacacggccgagaggttgagagaattgttctcaagatttggtgatgttgaagatgttgtcatgaagaagaaaagaggctctgcacttgttatgatggctagtgaagatgcagctgtaagtaactaagagtatactattgcatcataatttattagggttaatagttcttgaacagcttatttggctatattgtaatttgtaaatgctcattttatgtgttattttttataggttgctgccacaggcacagtgagtggagatatctctaacccgttgctagttttaccctatcaaccagctaccccggcgaagattccaactcttcaaaaacccgccgaaactgaaagattgaatcatctctttggagctggcttccaagattttgagaattctgttttggagaaacttcggaaggtttgacttcgtttttcaatcatctgtgattataatgtctgaattgcactctgaatgagaattttaattacaagtttagctttccacttcatttgactataatgctgtaattccaataaataaatgcacaaggaaaatacttttcctaagcatgctttctgtttttatgttattcgttcaatattcatgttctgtttcttaacttgtgatctcttttgttgaataggctgcagaaaagcagaaaaatcagaagtagaaacattgtttcgggaggaggttttagaatcattcaacgacacgagtttcctgaattcagattcgggtaaatgttccttactaacgcttatttatgtgactttcaatctcgatcatatattcgttttccttctaggcaagtgctcatattgttgtactcagaaagagcatcatacaatgcttaattgttatctcaaatacagactgaaatcatctataaatcacattggtttttatatttgtttccatctttttttctttctcagaatctattacgttacaggttcgttgtgcatgtgatggtgttgggagcatcattactctaaaccgtgtttgggggattaaagcatttttgcatggaaagtccaattggggatttgaaaatattggtgtcaccctaatgattttggcgtgattattaagcttaagagtttcagattagcaacacccgcatgctccgttagtggtgccctagtctttctattgggattctcaaaatgaaaatttgcacttatgtggttatttacctttagagtttttacggccaaaccctctcaattatcattttatttgcacttaaccgtttaagttcaaattttgatggcaaaattattcaaactacagaactattagtaaatttaaagtgtcatctatttatgtataagtacgtttatattgataaaaccggatgacactttaaacttactaatagtttagtagtttgaatggttttattgctaaaatttaaatttggaaagttaactgcaagtaaaattatagttaagagaatttagctgttaaaaacttatcacccttatgaacttgctttgtctcatcttgaaaaaagggttcgattacttaggcatggctttctcaactttattttaaggctagcgtgcaaatcatgtacatttacaatataaaagggcatgtttggctttgcccaagaaatagtacataagaagagagagaaaatactagtattgatatggtcaataatcatatattattatctttagtaataacaaaaagggttttgaagagaacataagtttgaactttgatcgaataattgcaatgttcataactttatatacgtgtttcatgttttgtaaatagctgtcatccaccaagaaatttgtgatctatatttggtattttatattccaaggaaggaaatgatgggttagatttagaaagatgaatatgaagacacaacataaagaaacaagcttagggaatattttagggtacaaaaagggaaaccattgaaatgaatacctaataacaaaacctatgatctcatatcaatgtcttcttcttattgtatgagatgaagttgaacatcctattttaaaatatataaactaaaatgattagatgacacttgtagatctagtaacaatgaacactcttatcattttctctattctattctttaaaatatatttcattaaaattatattttttttttaattttt

SEQ ID NO: 185924 - DNA, 2040 bp, Cannabis indica
ttttataaaacaaatcgttcaaataattatactattttaattattaattcaaataaaaaactaaaatattaaataaaactaacactacgtggcttggcacgtaacaatcacctagtatatttatatatatgagaaagtacacaaacaattttttttccttcaatcaaattatatatataaatatttatttaattaaacatatcagtcctttgtaaatttccatatatatcctgaaattttctttgcccccactaaaaaaatattcatatccaagtatagactgtctaagtgaggagattgccttagagattccactaatataattatttcaaagttgattaattaagttggtagagaggataattgcaaggtcagatcaagaaggtcaaatgcattatatataatatatggtccactacatcatttaattaaaagatgaaaaaaaacaattatataagactatatactttacctaacttataccaatatataacactttcttcatcaaaataaaatggatgtactagctagtactataatattatttttataagaagggttgtacatgagaaataaacatcgtacagtgaacaccacatgcttttctttccactcatatgccattattaaagtagaaattaatgccaagaaatatatatatatatatgtacaattaattatattatgatctgtgaacaatattatttttttaataagtaattctagagactactttaatcataaattttacaccaaatcttgagtattatatattccgagttgaattttatcttgccttaaatgaaagtaaggttattctgagaacagtactcttaacaattttctttttcttttgtctttcaaaatacataaccaaatctttttatataagtattctatcttttaatatattttatttattttatatataatatatacactacacatatataataaataataaatgtaataaaataaatgtatagcagtgaatagtaatgtttcacatgtagagttgtactgtttatagtgtataagaaaagaatctgttgtatgatatagtttggataaattttgacagaactataaattcctccttcaacctaaaaaaaaactgttttaaactttttgagaatcctaggtgaaactttaaataataataataataataataataataataataataataataaagtatgtgggtggaattacttcttggggattttgtaaattaaattagaaagaataaagagcaagttgtgatgagatattccctctattgggttatcctatcaatacaccaataaaatatatgatatgatatgatttgatatgaaccgtttagatgattgaataggttggttatttaattatattataagatgaaaattgaaatgatttgattgattgattatagaaatctccctttttttgattccctctattattagaaaaagtcagttcttttcctaaaaatgggatacaagtgtatccaagtaggagcaaaatcacatatattttattattttaattacttaatagcttttatcctttaacgtaataattttgtaacttaatatttagctaaagcctatatttaaatgaagatggatattatatatatatatggtatgaatacagacacaattaatttttttttcttattgaatcatatctaaagttacaagagagatgaaagaagatagataaaaaaatagttttcactatatgaacaactatttaatcaatttaagagttctttatatgatacgaccagtattttagaactagctagtaatctaatctcatctgacaattttttttttttttttgacagattcttgtttaggaagtttattgcctaaatttttgatgtatccttaatttatgaatttattttgtatacatttagagtgaataatgatgaatttgtatgattcacaaaaaagataaataaataaataaaaactcagagaaaagaaatctacagtatataaacataacacatcccatcaataacaaaaccaaatttcataa

SEQ ID NO: 185925 - DNA, 4625 bp, Cannabis indica
catacaccctcaagtgggaccgacgttgtggaaggggcgacctgcggctaggcccagagtaggctactgtagagtgggctgccgtggacgtcggctccaaagggggatgtaatgttaaaatcccacattgaccaagtatgggattggttagtagtatataaactacttgggcaccctcctctcttaggctagtttttgggagtgagttctacctaagtggttgtatcattcttgcaacttgaaacttaatttattctttattatctctctcatcatcgtaaagtctctatattgtctctcttcatttgtagtgtttgagctgaactatgcagactgatttattagaccagtttttctattatttgcagttatgtttgtacgtacataattttattttttcccttccagattttggtatgatgggcgaatttagagaagaactccgtgatggcttcattgaagcttgtttgcacctcgtaaaccgtgactttgaagcattggctaaggacttcgtcacactagggtatcaagtctactcatcttcctaccgtaaccaaatattattcattgatcttgattttaatatggtttgatacaaaattttcagccttattccaccaactgcagacagagtggctgtaacaaaggctttaacaggtatctctttgaataacctacgaattcatacgcaaattttcggtatatcacagttttggctttcttttataaagactttctgataattggtatataacgccttcactaattatatgcaggtgttttccaaaatgctgttgcgaaaggagtgagcaatattagtttcagcgacctttcaggaaacttaggagtcactatgtaaggtgttctcgttttattataagcaaaatatgcatcttatgcacagacaatatagtactttgcaaaaaaagaaaacgcacaaacaatatagttaaccacatgatcaaactttgttagtttcttatgcaaatttactctaggaatgtgattgctaaaatgtgcagacagagacttatggaacaatgcttcactcacaacttgttgggcactttggttagaaaagtttaatataatttctaaagatacattgatgtatttcatacaaattcggaagaaaaattatgggcaacttcatggggttcaatacagaagattttaacatttatcctttttccgatatacctgaagaatggcctctatttttgttgtaatcaagatgatactgcattaaaaaaatattttatatgtatcttatttggtgctaaatttctttaatattttatttgacagagtgttctctctcaccctttcacttgcataataaagtttggtccttctcgattgatatatttcttttaatgtttcatttgactgtattttttctcaccttttttattcttcaggtataagttcaaattcagaattccttcatacttttctcttgtcattcgaaggtacctaatttttttctgaaaaaaatgtctaggggacttagttatttacttttttgatctcaaagaaaatctgtattaatcgacaaacaagaataatggaccttgttattgttaccttatcagctaatgaaattgcttgtaatgtttgttgtctctacttttctagtgtattagtagtttttaaatgtgaactcttttgtttttctcttggattttagtcttgctgtattggagggaattgccatcagttccaatcctgattataaagttttaggcagtacatacccctggattgctagaaaggtactaactgacagctcacccaagctgcagtcatctttgcgatcgctcctttataaggtgaacccaaaaccattgatttctctttgcttttcgtaaattgatttcttaattgtgtaaatctagtacactttttctctttatttaccaatgtacatattcatatatcttgtcgtatgcctaattctttgatggttttggcaggaaggtgtttttagaattgatcgattggagtctcttctatccgaggtgaattttattctctcgtccaacgtcaatctttgacttgtttaacatcattcaatcaatttttggcaatgtccacttttatagattgtagaacttttggaacttttttctcatatattacgtaattaagcataaccgatttattgatcacttgatgtacctcagtaattttgcctttctcaattctgtttagtattttcctgctccattccaattcgttagattaacattttaaagtcaccgtttcccccaatcatagtcacttcgtgccagagcaggaaaggccttggttcagaatcaagaaggtggtgagtccagggtggttatcaagcaagtcctttcctttatgctaactgaaaggttagtgttgtatgcggtattgtattatttactgttaatacacaagatcaaaaatttaatatctaatgtgtgaatgttctgataatgacaatttttagggttcttttgtgagagatatacttcttcaagaattggcaaaggtacacaaacaactgaactttttatgcttactgaaaagctcaatcatacccatgttggtctgtttctcttttaccttatttgtacatattttgcttctttcttaatcacttttcatttgttacagtgttacattaatcatttatctatggctctattcgacgtgtatgttaaaatttttacttggttaaatccatagggtggcctataagtagctgatgtagaattctgaatcaagcttagttcttaaatttgttccgttattaatatattgtcttccatgattgattacagggattagatgcacttgggctagctttatcttctgcagcaactgcaaggctcccttttggtattactttttcaatatccagaatgactgatgaagataaaattaacttgacaaccttgtatcgccttttgctactgatggcgagcgttcaagaaacaggcaactcgagaaggtaagaggaaagggacaggaaaaataataaatcatttgaccaattccattttctcactcctaatgtagattatcttataatattatatgatatataactgtcataggtagttggagttggccaacaaaagaatcaagaaataaacttggaggatgtctcatcagtgttgaatcaacttgcttctatcgatgaagttctacctattctttctattattcccgaggtaaaactaaacaacttatttaatttattattcccaataaccgaagagggtagctgaaatggtcagacattaggtttgaggttcgagttcctcctaggtacctacataggaaatatgattgtagggttaagcggagatctagtttcaaatattgtagtttcgtataacatgtgtactctcatctcactcatctcgtaataatacattggcagcttccacctgaatcacaacagcagttgctaaatcttccagtggatctttcgggtcggttaatttctcgggttgctgcaaggactatcagaagagtttttgtatagatatacaagtgtttttgtacaacttcttcattaactttctagtttctataatacaaaacatcatttcggcttacagtcgataacccaatactgtagatagtctacgttttcatatgagccaactttctttccctattgttctgcaaatttttagagaatttttggggatagtcattcctattggttcaaaatattaaatctttttgagaatatcagagttgtctttatattagagctctggttcatcatgttaaataagtcttgatgaattgatgttagatataataaattatcgaaatattaaattagttgaattgaatttccaaaggcattattataatgaggattgttagtgttaatttcctattataatctctcagttaaatttcgtatttagaaatacatgctagaatatttttttttattattttttcatgatgttatttgttatgcttacaatatcattcttgtaaatttttgaaaaatttcaataatttacactgtcgaaaatatatttgaaatttctaagaattttgttttcggtacattgtaaattatttgaattttttgaaaaatttataaggtgatacgaatacagctatgaaaaaaaaaattaaataaaaaatatttcactatatgatttcgggcgtaaaaattgactaaagattgtaattagcacacctttattatatattaacaagacaagaattggttgggtcaagttcatgatacactgatcccacacatatcttgaggtagaagacaaccaaatcaattaaatccaattcttaatttaaaaatcaaatatgctatataaattaaggtagacttaaaacattaaaaaggaaaattaattcaaactaccttaaattagcagaaatcaagtataatagcgttaaacatataatcgttaattctaaaaatagatacttattcttagaattacactgcatcaacaaactgttttaagcaaaataaatcaaatgtcatcaaatggaacattgtaataaaatgtatattaatgctagtaactaatggtaagagtttatttgtatataaaaatcatatataactctgatatatgtatatgcacttatatatg

SEQ ID NO: 185926 - DNA, 790 bp, Cannabis indica
  modified_base (735)..(735): a, c, t, g, unknown or other
  modified_base (737)..(737): a, c, t, g, unknown or other
ttttcctcctcactatcacccaacctgccacaactgcggcccgctactcgcaaccaccaaaattagaaatagaccacattaccacaaattagatctgactcgttcaaacatccaccataaattctaaacattaaaaccacacacaaaacctaaacctaatattacaaacaaaatcagaacccaacaaaccaaaaaaaaaaaaaaaatactaaacccaatatcacaaccaaaatcaaaatccaaaaccacaagaaaaacttaaccctgatatcatagccaaatcaaaacgaagaatcgaagaggaaaacaacgtatacttgagtgatggtggactccgcttgagttgctaccatcgtcgatatatggatctacgcctgagagagagagagagcagtgaggccgacagggagaaggtttgttggggggtctcagattgtagggctctggggtatcgacgacggacggaactaatctcgggggtttggggtatcgatggcagactaatcttagatccgtctaggagagagagaaagtacaatgagggcaagaggagagaagtagtatggcgagagaggagggaggtagaagaagaaggagaagaagaaggaaccaaaatgagggtttgcttgtttgtgttgataatggcagaaaggagatgaagaagaagaaatgaacgggttggatcatttcagaaaagagaaaagagagaaaaaaaaaaagaaaaaaagaaaaaananatatatatatatatatatatatatatatatatatatatatatatatatatata

SEQ ID NO: 185927 - DNA, 4114 bp, Cannabis indica
catttctctgttctagctcacaagttccgaacttgtgtacaacatacaatttccaaatttgtgtataacatacgtgcttcatgtatctatccttttgattttatgccagttttgattctttatttttcttagtgtttgataattttgaatttaataaagtagatgcgaaaagggaggaatctgtgggcatctgggtgggagcaatgaggactggagacacttctaaaatgggtcgaacaacaataaaagtggttagcaatgagaggaaaattaaaatgtgctaaaaagataagcaggaaaacaaaagttgctactacacctaacttcttcttatttgtattagaaaaatgattcattcatatggctcatgttgttgacaggtgacaaacaatgattgagctgaagatgattatagagggaggataatttcagttgggatatgccaggtccctatttgctgaagtttttcttttgactttggaattgaccaacttacaaagcccacgacgtattaatgaaaatctcaaaatctagtttgttcattaaattacctttgaaagtatgcacactccactactcttcaatttcatcccatttcaatctccgggctttgttcaataactacgttgataaaaccaatgtccactcatggaactccatcattgccgacttggctcggagtggggactcagtcgaagcacttggagcattctcatccatgcgaaagctgtctctcactcccaacaggtccaccttcccttgcgtcatcaaatcatcttcggctttgttcgatcttcgctcgggcaaacaagcccaccaacaagctatggtctttggtttggactttgatctctttgtgtcctctgctcttgttgacatgtactctaaatgtggtgaattgagggacgcacgagtgctttttgattgtatacctcacagaaatgtagtgtcttggacgtctatgattactgggtatgttcaaaatggagactcccattcatcattgtcgctttttaaggagttcttgatcgaagaaggtgaaaatgtggatgtttctatagatccagttgttgtggttgcggttctctcagcttgttctcgtgtttcagaaaaggaagttactgaaggcattcatgggtttgtggtgaaaagaggctttgatggagatttaggggttgcaaacactttgatggatgcatatgccaagtgcagtgagctgcgtctgtctagaaagttgtttgatggaatgtttctaaaagatgtagtttcttggaactcaatgattgcggtgtatgcccagagtggattctcagcagacgctttggaagttttctacgagatgaaaaaggctggaaatatgaactataatgcggttaccttgtctgttttgctattagccactgctcattcaggcactctgcggactgggaagtgcatacacaatcaggtgtccacattccttctaatttgcatttgcattgcttttttttaaatgcaacactgaattgtgtattttattatcttcttcatatattgtttgcccattgttattcagatcattcgatgtgcttttacaggttctgaaaaagtgtttggaagagaatgttgtggtgggcactgctctgattgatatgtattgcaaatgtgggaaagcggagatggcaaggaagactcttgattgcatgaaggtgaagaatgttaaatcatggacagccatgattaatggttatggtatgcatggacgtgcaagagaagctttggaagtcttttacaagatgattaagaatggagccaaaccaaattacataacctttgtatcagttctagctgcttgtagccatgctggtctagtagaagaaggctggcgttggtttcattcaatgaagcatgaattcagcatagaacctggggttgagcactatggttgcatggttgatcttcttgggcgagctggctatctcaagaaggcttatgatttgataaatgagatgaaagtaaggcctgattttgtagtctggggttcccttcttggatcttgtagaatacacaagaatgttgagcttggggagatttctgctagaaaattgtttgagttagatccaaataattgcgggtactatgttttgctgtcaaatatatatgctgatgctggtaggtgggaagatgttgagaggatgagagtactaatgaagaatcagggacttgttaaaccacctggattcagtttggttgaactgaaaggaagagttcatgtatttttggttggagatagagagcatcctcaacaccagcagatttatgagtattgggaagaactgattgtgaagctgcaagaagctggctacaaacccaatatcgcatcagttgttcacgatgttgatgaggaagagaaggaaatgaccttaaaaatccatagtgagaagttggctgttgtctttggaatcatgaattctattcctgggacaacaatccagatcataaagaatttgagggtctgcggggactgtcacaccgtacttaagttgatatccaaagttgttgatcgagaaatagttgtcagagatttaaagcgattccatcattttagtggtggtctctgttcttgtggagattattggtgattttgcagcttcaagaatcaaaatgttctttctacacaattgagtagatttctcaaataaaaaggaaaattctcattaattaagtatactaacaaacaaatgaacaaagacaacacatgaaactctcttgcatctgtaacttaaagaatatgcacagaaagattatatcctcttatatatatttatatatatagaataaagttctcaacacagattagcatgatcaacatttggaaagcgaaacttaagaccagcctaatgagatgcccaaaacgtgagagaaggaacccccaagtggtttgacttcgacgattatattcaatgaatgaatctaaggagactaattggtctatgtaactgaagtactttaaattctatttttcatttttaaacctggagcgttgcgcttgggttgaatggtatgtatgtataatggctggatagtaatgcagaagaataaaaatgattgtgattacagttcacctttctcacgtcttcatcatctatcttctgattctttctcattttattctctttttctcttgtttcctattactgtatcagttgttttgtagtattatcttgcaggtgcatacaaaacaagagatgaattccgatttcattgcgaaaggctcgtaccattcatcgaataaaagaatctccctaccactcattcacaccataatcacaattcaaattaaactgaagtacatataccaagttatataatttgatacaaagaagtcaatcagttgataatcgtcgtttaacatgatatatattattaacagttgtgagtgattatgaagtttttaagtctgtcaccaaaaatcttggtcccaatgttttgtcttacacggtcaggcaccaagcctttctcaatcatttctttactaaacttgagagcaatatctgttttttcactcttcatatagccttcgaccaaggtgcaataagaatcaaaatctggcagaacaccttttgaaaccatttgttgaaatatctcttcggccttgtctacttctcctagcaaacaatatcctttaatcattgtattataaatcatggtatcaggctcttccccatgttgaatgatttcctcaaatatattttgagccttgtccatcattcctctttttgagtaagcctctacgagtatagtgaaagttataatattgggatagatattctctctcaccatgttctcatacaccctagcaatttcttcatagtcacctgaatgactcaacccacaaagtaaagaactgtaagtgataatatttggtctaacttcccactgagtcattagatcaagcacgttgaaagcatccttcatctttttatttctgcaaaaagcatctatgagaatattgaatgtcacaagatcaggtgaaaccttttgttccttcatttgagctaacaacatgaaaacttccccccattcacctgaatgacacaacccatacaataaagaactgtaattaaagacatta

SEQ ID NO: 185928 - DNA, 2770 bp, Cannabis indica
ctttgggcttggggactttattgatcaaaatcaacttggtttaactgtaaaagtattatttgattaaaactatgaaaagaaaaagcaagaaactcttatatcttttataaatcgaaagagagagaaaaagcaaattatacccagcgttaagaactaaaaaattaatcatcaataaatctaataatgttagaaataaaaagcagtcaaccatcccataatcttttattcatgttgaattggttcttcaactcgaagatgttcttgaggttggttgatgttgtggtactctctcatcaagacttcctcctttggtgagtcactaaagaacattttgtttataggtttccgtgaatatcccaaaacaaattttgtttagctggttttctacacaaaggtagcttttgatattgattaagttataaataaataaattgatgaacattcaaattttttgttcctttaccaataataaaaaatattattaaattagctaaaaattaataattgaaatgatggtgaaaaataatttttatcaagtttgctaagttagtaattactaaacacatcttaaacaaagatataagaggttatgtttccaagttggtttgatattatccatttgggactaagccctagtagatttgcttttagactccacccaaaaaatgtcatacctatgattttctcaatttctagtcagattttagttgcacattcaatattatcaatcaaatttgagattaattttgatgtagtttatactctaatataatgtgacgaaccaaataaattaaactcaattttattttattatattattatacttaggggtgataattcattttgacatgttatgttcgtattgtgtagaaacttatttattatacagatatataattgactagaacacgacctatttaataattgtgtcaaaataatgaattcaaatacgacctatttataaatagattcatacgacacaaaccatgtaataaatatatcttatataaatatgttagtctgttaatttattaataatctgtgtttacgatatattcaacatatttataataattatagccctaaattaattttaaataagccattaatggatcaacccgaatacgatccacttactcagacaagttaacttaaaaatgaccttattatttaaggtaaatctaaattcactaactttcatttaaatttcaagttgtgttattatgtctgtctcattttattgcccttatacttttatggagagatagtgctatatataagaacaaaatctcaagtgaggctctttaaatctaaataagactaaaaatttgacttggtctacatgcaatgcatgaaatagttaagtatgcaatggattgctttctatttttcccaagtctctgttcccactattcttagtctctaaatcctactaatgtaaaaagaaatgaaaacaaagaaagaaagcaatattttcagcgccacttatgtacaaaagagtagccgttacatttaagtctgcaaatacataatttaaaaatctcaagaccaagtgaaaattaataagtagatcttgagattttctaagtcaaagttaggtgaaagtgtggctcttatcgatacaccttggtagatatcaaaacaccattaaagctcactattattattataattattcaactaatgaaaaagattcatctaaaaaaagaaaactaatataaaaagatggtagtttttgattatgactaatgacccgttaagagacacgggtctttattttatctttatttttgattttgcacataaaagtattaccacgtgagcttttaacaaagtgtgcattagaggacacttcatgtacaccatacatacagcctatagctatttttaattttattaattaaggagttgagcttgaataatcgtaattgagttgattgataattaattatctagaactaaaatacatcaaattacgtttagggctgtcggactttgggcctaagtatttgtttttagggcaccttctcgaaaaggatcatcttgtctttcttcaaacaattttaaaattaagcctttacaaatttgtttttggttatttttttttaaaaaaaatcatactaatatagatattgtttattcttttctactcattcgtttttatttttaatcaaagtgcgattttagttttagttgtatatccaacaaaatcaaagtatacataaaaaaaaaaatgacttttcaaagagaatggaatgtatttttatattatatatggacaaaatccattaggggtccatgagagtattaatagtaaagtggtagtggttcaattttgagttgctctttaataatgaagaggaattacatccttaaaacactcggatctctttctaatattattgctactaataatttgatattagtaatcagacaactaactaaccgtgggtttggttaaattatttgttgtcttaaattgtcatttagtgacattatactattatagagaggttaccaaaaagtgatcaattatgggccatatgtcattgtgatgctatcatgactacatccctactactactactattactattattattattattattattattaactccacccataaggaaaggaagctacacattattagtatacatatatgttaatgttatgggcctttattatcacctctttaaaacaaatgaaaataatttttgttattatatgtggacacttacaaaaaatcaaagcaacatacgcactt

SEQ ID NO: 185929 - DNA, 7782 bp, Cannabis indica
ttttttcataccatccgctacttcctgttccagaatctacaccataagcgccactagaactccctttatgaatcttctgcgaaggtccaccaacagataattccgtaactggctgcacttcagacgaacaatagagttcgatgaactccggaaagtcactttcaagtgaggaagaggtttgactactctcaaatcccacaacaggcactgactcatcaaaatgcaaaccatgagacaaaaattcaggaccatcaatacaggtgcccagttctccaataaggttctcatccactgaaacatatatttttgattcagaagaatcatactgggaaatttgattgtcatctatttgaaatgcatcatcacatatctcattcattaacccaaccaaaccaggttcactttttacagcctgacttgaagaattcatttcagaagtcaatggtaaagaatcccgtgtacagaatccagcagcacgcgtcaaatcttccccatcttgttcttgctgaactctattccacctattctgcaagtgcacgactgactcctccatgtctggggcaaatagtttttgaagttgagcagccaaactaattaaactggaagtagtgtcattgcaagtttccatgaaaacatgagatttagaacattctacctcccaaagaaggccactcttacagttagttcgcagaattgcttcaaaaagtgcctcccgagctactttaacatagccagtcttctgaagccattctgcattgtaattgccactaacattctcaggctccaatactacatgaataagtagtccaatatcatgaacactaattttaaattccttttcaatcgaatcagccaaagtcaaatttgaaatgttcaaggatgatgcagccaacaagcaagcaacattttctgcacttatctcttgttttgcatttgaagaacgagaatctggatccaaaactttacttttgacaaccaaattcattacatatggctcataacttaatccgatgtcaacaaagctaagaataaaagaggatccactagacacatccagttttcccttttgcatacaatcattagctgggttttcattgttggcagatggaacactgaaaaatgaggaaattgcatccaaccaatctaaacgaccccctactgcaataagtgtggcacacctgagagatatagatgtaaaatcatgaaaactttcaggatcccataggtgtataatatcagaaccagccaacctagatgacaatgcatttgagcctccaccatcaccacgtttcattgttgagttattacataaaatcaaaagaaactcttgattgggaacacctgttatggatccccacaattttccttcagcatgtcctagccagaaaaatttggcacctctaatgcctcctatatttgagacagaaagcaattcaaacttccgaatttttaatttcaaatgatgccatgatccaggaagttcactctgaattgagcctctaatattctcctttacttctgggctaatcaaaatttctaaagcactgcagtcaagaaaaatagatgtctgagagaccgaagatacatccttaacactgaattcatcagaagccaggcccaacccatttacaatctgatccacaagaccaactaaggcttcatattgaaatcttcccaactttattgtaacagcagaaagatgaacgtgcaggaaaaatgtagaactcaatatcatctcctctcgagtttgaacatttaaatcttccagatctttcgcagtagaaaaagaagcaaattcattattttctcgaacagaattataacttctctttgagtcctcaaaagtggccatgactttggccttctttgctatccaaggtccagttacattactatcctgcaaaatcatactaattgtagaaaaacaacctggtctgttggcaacagacaaaatgttctgtccaaaaaatttctgctggtgtatgctaccagggctattcacactagcaccatccttacttacaggagtgaccaggaaaatgtcaagactgctgattttcaaatgtatagaatgagtggcagttgaagaatagcttttctgtttagctgcatctgaagttggaccactttctcgaactaatccaccaccgccgcttgatggtagatgaaaatcaagagcaacaaattgatcccaggaagcaaaacttctaacatctttatcactcttgaaaggaaaacacaggatcacccttgcactagtcatcaatatattaccagccaaactttgggttgaggacaaagtcttaacacatgagctactacctcttttaacttctccaagagtcaatccatcattcctatgaaaagctttcgaagaaaattcatctcctttctcaacagattctaaaatttccgtcaccagttctgataacatatttatcaaggagaagtccacccagaaaacaaacggagccaactccacttcaaaggatgctactggtctttctcgatttccatcttgtgaacttaatttcgtagtaaattgacaatgagtgacacctgcagttgtaagcaatggaattttgaccacattgtgttcctttccaaatggaaaatttttagccgtagaactggttagctcatgtgagtcctcagccaatggggcaagcagtggaagagcaccttgaacatttgcttgcaactgctgaatataaagattttggctgctaatattttcaatgggacctttcgttcctatttctaagttgtcacctttatgactcaagtaattagcaatctctattgacttcatgaatccttcatatcttatttcttgaggagatacctgttcaccttatcaaatattttaagttagtgtagtgggatatcaggcagaacaaataagttattagatgatgtcaaaagtaaatgagaggtaacaataacttccctgtcaatcattacctgcatactgagaaggatgtctctgcactctgcacccaagtaaggaatatatgaaccagaatttatttgataacccttgaacataaatttcttgtcctcatcttggaaggacaagaaaactgaaactccagcaaaatttgccttgacattggtttcaatatgctgttgttctgtatataaaaaaaataaaaaactgtgtttcagtggaaaaagtttctttcatagaaaaacaactcaatggtttcagcatacaagattccagtgcatgtaataaagcatcagtagatcattttttaaagagaaaaactctcaaagttacctacattctaggtcaaacctaacaaaattatatcggcaaaacaaagttagacacgtgaaagatgattacaatttaattacctccctattcagcagggtcggcagttgtttactttatattgtgattttctttttcttttttttttttccttctgtcttttcatagggaaaagtagttgaaatttcaatgtaaaacatccagcatttaagaatgaagcaaaaaaaattaattactcaattgtaagattctaaacagtcctaagattttttccctaaactttgaaagctgaatgttcaaaggtgcagtttatagagctattctgacattcaaatgcaaataccagatgggatatgcaaggatccagaagcaaggcttgaggcagcagtaatagcactgaagacagaacaagtccagttccacatcccactgttccctaatgctgactgagaacttctcatcccgtcaaagcactcaaaaaattggtccacactgcacaaagaccagaagagttgctcactcttgaaacataagatagaaatatagatacaatataatattagcttagtagcacctaaaacttatttacatgtgttaagctatcagctcctaaaggtggcagactgaaacccttacaataacaacaaaccaattctaaaagaaagaaagacgtgaatcatttagaactgcatcttttctttttcccctttttcttttatttaatggcttggggttggggcccagaatgcagagctttaatagtaatttaataaattttatagctgttaaagtatttgcgaagagttaataatttctatagatattaaagtattcgtgaagggtttcgctaggatgtctccaggctgcaacattgatctaaagataaacaggtgacaacacaaaacaatacccaccttgccccaaaatcaagctcttcctcaataccaacatttttattatgaatggtcgacagaggtacccaatctgatataagatgtggcccagtttgcaaagtgtcatcacacaaatcttgcactgtcaaagaagataatttattggaggaaccaccacaaactggaattgtcttgcttgttaaaattgcaactgaagcagattgaggtgagatactgtaaggagcagaagtatggtgacaagactctgctgccttgtgaagcatacaatcacttctgtccttctccaaattcctaaaagcttcaaccgagtgtaataaccacttaattgtgctgggctgaaactgcaattctatagggtcaaatgaaacatctgagtccaccctgcggatatctaatgacccatttttccaaggaatacttagttttaagttccctgaaaatccacctcctttccctgtcatgattggtgttctgatactctgtgacggcaaacatggaaaggatgattctttatcaccatcatctaattgaagaagctcaagtattgctccttgaaacttcacatagttagtcaaacgactcatcccaaagaaactctcactttctgcttcgcctttactattagcatcatctgaaagatgagttccacattctatacttgaaatccgcagtaccaaagttctatgagaacctaaactatttccatccttctcaagacatggatcaaatgctactatcaacttgtttatctttacattgaaacttgtaaggaacaatttaacaaactttgcaatggccttaacaccttcatgtacatctccaatggtagactttgaagcattgtccatcatgtcctgatcaagctttcccaagtcttgatgaagttgttcatcctgaccggagtgatgagtttcagctacagcaggtgtgtaatactctttaccaggaacaagcacaagctcaagttcatccacctcaacagtgaaaccttcgccactccaaggcatttttaccaataaagatccgattgatccttctttaattattaatgatgctactgcaccaagctgaaaaaacagagacagagagattacaataaatactgatagtgattgagattgtggtgtcaaacaatgaataaaaaggcaaatttgaactagccctcgtgcttaagctttccccaaggtaattcttcaccagttaagctcatgaaaaggaattcaacacagagaaagaaaatcaatacgaatatgaagtataccaaaattcatattatccataatacaaaacaaatgaaaccacgtacactactctacactcaagcatatacccattcggccaattaaacatgtagaacacgaaaaacagatttaacaacacaatactcagcatttaacttcttcccttacttaattctgaaccaaattgcagctaagctaattccaacattctttcactcaaatacacagtataactatacatatagtgtggggtaccttctcattgagataatcgacattaagagcgagatcattaagctgaattgtgccccttgtaagctgaacatcgagttggtcgatatcaatgtcgcccaacaaaaactgacccaatttcttcttcaaaacaaacttgcaaacccttctaacggcccaccgcgagaacatcgcctcggccgacttcgcgatgctccacggaaacatggccgcccgatcgtcgttcaatcaaaatctcaattgcccaaaatgtaaaaacaccaaatttagggttttgggcaatcagaagaagaagaagttatggtgataacagagacgataagtttggaagagaggttgaacaacctccatcaacaacaaagtaacagagaaaattataaacgaatttcaagaaagagagagatgacagaattgggatttgagattcgatgaatcaaatattgaaaatcctttttctcttgcttttctggttttttgggttggcgtgtttgtccctccctccaaactttttttttcttttttatattttgcgaaaaataataattcaattatttaataataataattatgattagtgagaatgtaggcatagttgacttgataaaaaacccaaacataacagtacaaaaaattggatatggcaaagaggaaattaataaaaaaaattcattaatttcttcacaaaaaaaaaatattctttttattctaattgttttaactattagtaaattttctatgtataattgtttggataagcttctaattttttaaataatgtttctttattttttattaaattatacaaaaatataaatagttgttggttgttttgtaaaagtgttttgtccattttttctaaattaagtttttaataagagtgatgtttctattgaattaaaatcttatttattaattgatttagtaaattaataaaattctcagtattcaaaaaaatatataaaatcacactaaataagtatttatttaattatcaaaactctatgaagaaatttattaataacaaagataaagataaagaataaaaactaaattttgggattttaatagattaataatatgattaatttatttaaaataacgaaatggttataattagtatagtttagtgaattttattttattttaaaatggatatttgcaaaaaaaaaaaaaaaatcttatttattttacaaaattatacttaactcctaatagaaaaaaataatggcaaaatctctaatcttacctttttgttgcaacttgtgtaaagatgagtttttttatagccattgagtatgtgtaaagatgtggagatgatgtgtaaattttggaggcaaacaaattcttctagtgccaagggaatctattgggcaagttgagagaggatgagtacatgtacaagtaaaggagtaatgggtttagaaatcttagagattataatcttgctcttttaggtaagtaagggtggcttttattggagagggaagattcatttgttggtcgtttgtttaaagctcgttatttttccaaatgttttgttaattttatttttgatatctttaatttaacaaaaaaatatatatatatattttgaatattaatttcggttgaggtgtttatttggttttaatattttgtatttattgaattatatatgaaagaaattatgtctagttttttgtttatggaaaataaggcataaagggtaagtttgatgactcatcctttttctatctatccagatgtgtatatctaatcatttctgaatttcctaaaatgttagatcagatttttttgtgaagaaaaacaaagcaagaaaagtcttacttactgattatgattttgtaggtacaaaaataggaattcctaagttgattgaagatctattttaaggatttatctagtgagatgtgatcctgttcagaccgtgtatgaattgtcaatgaggtgtatattaattataaatatatcttatagcagctagatcatgtatctctttcatacacttcgaattattcatatcttaagaaaatctttattttgtagagaagagagtatttgtatcttactcagtttatatgtattttgtattatc

SEQ ID NO: 185930 - DNA, 1429 bp, Cannabis indica
agagagagaaaatgagctcaatggtgtctggttacaaacaaatggtgattacaggttcagaatccacaagcacaggcaacacaacaaccaaaggagccctccagctcgaggttgaatgcgtaaaatgctactcttgtggcttcacagaagagtgtactcccgcgtacatctcacgcgtccgagaacggtaccagggccgttggatatgcggactttgcgttgaggcggtcaaagacgaagtcctcaggtcagataggctcatcacaacagaagaagctctcaatcgccacataactttctgtaagaagtttcgttcatcgaatcctcatcacaaagaaacagagcacccaatcttcgccatcggaaagattctgcgccggagtttggattccccaagagcgcttcgttccaattcaagtagctctctcgaaactgtcaaaagggtttcgaccccttcactggttcgttccggtagttgcttttcttctctatctagctgaagaatcctcaccaatctacagattcattcaactcatattatcaaacaggggaactctgtttttcttgttcttttttttctttctctttgttagattaatactaagtttatctgatgaacttcgcattgtaaataatatcttttattataataaaattatcatacgttgaagtgctccatttcaatggtatttttctttaaaatcagttttgtactgtatattaattcaaaattttattcattcaaattgtcctgttctagttttagtgtgtcactactcactatttcaaatggtcaaattgtttttattattataaataatagtgtacaaatacaagtaagcaaattaatgattcgggctggcccttcaagtaatttaatactaataattatcgttttttatttaaggaaagcatatacagatacgaataaagaatagaataaaagaatattaagtgcgttattttctctcactcacaattgttatggtataattaggtggttttgaggtgtttcaggaaatggactgtaatgagaaatagccatttggtaaatagattttgaagaaagatattttgaagctgcaataaataaaccaaagatggtgacacagaatgaaattgctgagaacattctcagaaatattgttgggtttttttcaccataggaaaaaaataaaattacggtgaaaagcaaaggtatggagatggagacaatttgattagccgcactatttgcttgtgcatcttagacagaagtttctggatatatctagccaaaaaaaaaaaaacgctcgagcttacggaaacatgacaaaacaaaattttattattcatttatgcttttttttaatgtggggcaactaacatgaaacaacattgagatttgagattattatcgaaatcaagaccagggtccaaaggttttctt

SEQ ID NO: 185931 - DNA, 3194 bp, Cannabis indica
ggggggggggggcatacgagcctatagtgtgtgggggactcacatgcgagcccatgtacatgcatgtgtgtgttgtgagtgtgtgtggaggctcacatgcaagcccgtgagagcctatggtgtgaacaaggtgaactaagggaaaaatttaaatacgtagtgaagagaatgtcgttaaagaaagaatcaaaagacaagacgtgtaaggaaaaaacgtaccaccacgccttttgtaagctctgaaagcaaggaggtacgagtagtggaggcaccgcacctacaaggtctgaggactcgactaaggatacgttgcagccaccacctctctgacctgggaccacctgacacgagacaagagtgcaaggtacaagatcatctcctgcacctgtggtttgcaacctgaaatcgataacttgtctatttgggaccactatgtaactcaggctattagaatgactatttcattttgaaatggaatgaaagaccattccaatacaagatttgaaaaaatttaataattttttttattaatttttttgtgtattttaaattttattccattatattcctattccaatttccattctcattcctattcttatatttttattcttcccaacaaaacgccacctaagtttattatggagtttgtttttaatcatcacaattttcttctttaattacactttagattttttttagggaactacacattagatttaaaaacatattgcttaacaaacttaacactattaaaccacctaaatgggtggggtgttacacttggtagttggtaaatatcaaatacatcagttgatttacctcgtatataaaatttaataattacacaataccatgtctagaacacattaagtgaacaatctctgatccatatcacgaaagcaaaccacactgcatcataatgcacaaacaagaaaatcaccagtatgcatttcacaatatttttgtaggttgagtttgatgttagcacacttggtttatcagatgccccttatgattttcatgtacctgcaaacagatagtaatagtcgtggttcttgtttctgtgaataacttatttcattcaggcttttcaaattaaggaaggtaccattagcaaagtctctgctcatgtattttgtataagattgcaaacttttgttcttgcaatctttgcagggagattacagattagacgcgcagaatgatatcagcatctgagagaacaaaattggtagcaacatattggatatattttactaaccacacagctacataagagctgaaaagtatatggcgacaaagaaacttggtgcctatattcataatagcagtactctacaactgcagaatcttaaacagttgatatcaccaccgtcgaactaatgatgtgagcagctgcaacaaccaagagaaaatgcaaacattattgggagctgattccaatctaaggggtaagaaagaatgaagaatatatatgatgttggtatggaactaagtttggtcattaaaaatctactacactttgacacataatcgataatctctcccaacaactggacaagaacttaagggtttattggtctggagccattataaaagtgtcccaagttatgaagcttttatatcatggagacgcctaacatgctttgaaatagtacaatgtacaggaaactctatcaattttgaatttgggaacttcttgcttaaatcgaaataacaccaagcaaacagggagaatttttacctcaaacaattcaaatgggctaccacttcggtaatcgtcagtcttcttgattttatcattgggaagaaggctgtatagtattgctctccatccagtaagtaaaacagcagtgcttcccatggtaaccaatataaacggatatgctggaaaatgacctgacgtcactgctcttatagctatccccagctgccagagtgaggaaaaggatatcaatagaagcattaaattaattattggtaaactgagcaaaattcttgaaatcagtaaaagcaaaacccagctctcctctaatggtaagaatacatgtacatatcaatgacatccagtgaagcattaccacatataaatagatcaaaactgcaaaaacattctacatcttatgcaattacattaaaagatacagttataatttgaaattaaaattcccaaatccaaactttttagtaggaatcattataagaaaagcttgtttagccataaagattatattaagttcaaacttactgggattcccacagcccatgattttactgtagcagtaacacctttggacagaccattcattcctcgtccatcttccccataacctccaaggaaataagcactcaaaaaccaccctgtttaaccacaattattattattaattttcctgaaaaaatattcaatacaaagttggtaattgaaatttcaaaagtaagaaaaacaaacgaaccagcaataaaagggtcggccgtgcgaagagtttcagcatcaaacaccgagaacccatggctgaatcgtccaattgcagcgaacacaatcaatgccaaaacatccccgccagcaaacagagccacgcgtctgaacccaaatccagaaatcgaaattacaactcaagaaaagaaaaattgacagaaattagtaattaaaaaaataaaaagtttacccccattttttgaaacgagaagaggtgtcgggtttatcgaactggataacaccttccaagggagcactatcctcacccacgaaaaccctttgctcattgtcgaaagcgggagaggaagagaaagactgcttggtggtggtggaggaggagggggtcgaatccacaccttgttctgcttttgccagagagataggaaatcgtttgtcgggaaatctggtggagatgaacttggatttgccattagagaaaagtggagaatttggagtcgttaatgccggagaagacctcaaagagcaacttctggctgagagagctccgccaggagcttgcgataggaccaacatttttcctcgacttctaacgtaaggcctaaccaatcctctaccaagttaacttactaacgccgctaactgttcttttttttttttttttttttgaaagcataactgtattcgtaaaagcttgtgaattgtgtgtttttccatcatttctttttagtgtataataataattgatttaatg

SEQ ID NO: 185932 - DNA, 5167 bp, Cannabis indica
tccttttgtcaacaaatcagcaacttcttattattacttgctgagtccttttgtcatcgaagctttcttttgatagtccttttgtcaacaaatcagcaacttattgttaatacttttcttgttgagtccttgtgactcgcgggtgctatgtggtgcaggtaaaagtaaagaaaagctagatcaaccatgaggtgacaatcttctccacaatgtacatattgatcccaccggcctgtgtgccgagttgccaagaattgttttggcctagctgtatctgctgtgtattttgattttgtgttttgaattgttgtcgtatatagtcttttgtaaaccttttataacaaggatctctggaacacgtttttaatgctgttatgatacccgtttttagtgtttcattttagtaaagtttttaatgtcatcactgtttttaataattaattaatctatcagtattaaactagtttataaaatcacacacgtgactatagattatggtgttacataaaccccgaaagcagtgcaaatggttagcttaggcagaatattggtacaacacatccttccactcggctaccaaatgcaccccctttaaggctttgtatgatcgagactctccccctttgctccgttacacttccaatgcaacaactatgtctttcatggaccagttactagaagaccgaaaagctattttggatgacttgcaaatgcaactgctccaagccaacaacagataaaacggtacgctgatgctaagcgccaccatgaagagtacaacatcggagactcaatcaatctcaagttatgaccttatctgcagcaaacccttgctagaaaacgttttgagaagctggcccacattggcaaagtggcttacaagctccgattgccacctacaactggcaggcatacattcagtttttcatgtgttacaactcaagcatgctcatggaccaaactcgacttctctatccattcccaagacgacttggagatgaccatggaaccagcattatgattggatgtgcgtcaaaaagccccagacagcaaccaagttaaggttcatatcaaatggactaccttactagattttgaagcaacttgggaagattttgacacaattagcaaccaatttccagagtttcaccttgaggacaaggtgaatatttggcattggggtaatgttaggcctacaattcaatttacttatgttaggagaccaaggataacttagtcctaagatgtaactgtatgggctgggcttagtgtgtattttacattttaatgagctatcattatcttagtcctagctgtcatgttgagtcttacactaaacctgtaactactaaatcttattcatttgaaaaatatgaaatttttatgtgaagattgagtcaagtattctagggagaccccaagcatctcgaatagccattattcttctatccacctgttctatatcaatatagaaactatttttagattcattcaagaactgagtttggattattggctatgagagagttaccatggtgcactacaggtttggcacctggatctttcaaaaatactattgcgggtgcactttccacttcaaacctgtcacgttgtcattgtcaaaacttcccaaagttagacactgaagttattatccattctagaacaagaaaaaagtttatagcaatccactctaactaaaacagaaagtagatccactcacgcattgaaccaaacagaagattcctcttctcgccatagcacaaatgcaaaagaggcatgagaccaatactttttagcagcttgacgtacaacaggaactgctcgctcccctgttcttgagaagataatgacttttacctacaagtcaagagcatcaataccatcaagggttacaaagtttcataagtgtctccctacgtactgtaggagcgtttcaggtttgtaaatgagaaatttaccttatgaggactaacttttgccaggaaattttgtcccttgggaaatgaaaaaaagaaaaacaaaaatcccacgggataatttcaattaatgattacatgtttcataaaagaacaaaagaataggaaagaatagaggccaacatgagttgtgagagacgtaaactatagtaagtgctatttaacataacaatcgataaaaagttagatcagttcatgattttaatttgatacgacataagcatgcttcagatgaatcttcctttagaaagttgtaaataaatgaaaattaaataaacttaaaatattaccagcgtctcttttgagtagtaaaaaatccgaggtaaaccgactatagttgttgtgaaccactctgtaactgcatcaacggacagctccccatcatacctgataaaatggacccagtgacaaaatcaatatcatatttactaacagaaatgtgaattgtcacgtcactaaaaaaatccacaacataaaagtaaataaaaggctcacctactaagacaataagcagttctacacccttcgggaaaagcaacaagagaaggaaagcctacacacattactgtctaattagaggaagaaacagctagagtgcaccgaactaacaagatgaatgcatttatagacaaaatcaactacttggttcacttgaaaatctactggttcgcatatctattacattataaatatacatattttatatataaaagaagttactcagtaataccgataagaactataacatatatgaaaacagcacattttatattatcaacaaagaaacaaatcacaggttgggtctgaacctcaaattccttagcaacacacacttgcccaaccacttgagctagactcaagtagcagtacttctgaaacccctctgtgtcttacaagcaagcaggatggctgtaatggtcacatgtgaagtggctaaacataaaattgaacaagtaaaatcatttgaaaagcataggctagagaatgtatgatcctcttaattgcaaattacatcaaataaaatctacaaagcaacgagaaagaataaaaaaacttacaatatagttgcacaaaagaattttgccttctcaggttttgctttagtttaaaaagtagaatgtacgcaagtgtttatgatagataaggtaaagcaaagggcatgtatttcaaagagaagggcaatcataatcagcaaggatcttgtcacgcatgaaggaaaccatgatattttaattatattaaaacagaatcttttatataaatacaacagacattagaaccccttcccctcccatacacactcacacactgaactatcaagtggatattatataaaacataataacattgtcaaattattacacttttaggtgtgaagcgtgaaagcaatatccctatacttacatcatttgaacaatttttatacagatgaatgtccatggttattattttcagagacgttactactgagaagtaaagaatgcagctttgactaatatcagactaaaaagatggtaaccgcgtaccatttctaaaaaaaggccgtcctgttgctttcttttcagaaagatatgccacaagatgaaggttcccaagttccacagaagcagtagtagcaaccccatccagcaaaacagcttatatgagaaagtaaaaataatgacaaagtgagcgaagaagcaatcattactcatacaagaattctctcatactcaattcaaacaatgttccacaaagaagacagggaaaaaaaacagatgcagaaaccactataaaaaaggcgggatacttccaaaggggaaaagaaaaatataccaattcttttccaagcatcagaaaactgaaaagagctcttgcttccaaatgaaaacaactgaacaaaatttcagtcaacatatagtcaatagatataaaattggatcaaataaaaactctacaatagcaaattcaacaatgagagcataaggttttctttcaataggaatagatctttgaaaacaaaaggttcgtgaacagtggctcatacccaaataacaacatttaatttatattttagtgtttttacaaacatcaaacatgaggacctaacaggactaagactacagatttccaaacttcaaccagtaaaccatagatacttaatttaatgatgtaaataagtagcacattacaaaaaaaaattgtaatacttgtataatgaaatcattcttgtaaagcctacaaaacaaattacccatgtgtgttgtacatcactcaggaatgtcaccattattgcattagaaaaataagatattactcagccatttattatctaaataagattacacatgagttgatactatatgttatatcatcgtaagccataatgtgtgtacatgctgaaggatttcttatcatttatatatcatttccctccatccctaatttaagaggagcctttcttaaactgacatcctctaccaatcaaaaagctaaagaaggtgaatcaccaatctcttaaacatctttaaattagttagatgcttctaaaagccaaagaagcatacattctatccttggacaaatatcaaccactttttctaagactgattagtagattactaatcttctttttctttctgttatctctattaaatttcaaattttataaacaccaatagaaaagtaaagtgggatacataatgtagtatagattatagagagtatgttggtaactgtaatgaggggttgcgaatgagatgaaatagagtagtgtaaatatgagactatgagagtagaaagaatggatggtaattcagctttagctctagggagagttgaggtttctcaaatacctctagtgagagttgaggtgtctcgaatatctcgtggttttaaggtgatataattttttcgttcaatatcaaatatcagatcttcccaatcttttcaaatttccaattctctttatcattgcctattaacactgctattcgttgaagaacctagttgggggagtatatcaaaattcttctaaacactaccttaataaaagtaggcatagcttcaaagcttttacaccgaattgtgataaatcgactaacactccaagttctaataaatgtttgaagtcatgttatataaacaatttatataagcctgcttaagatcattgatcacctgattggggtaaatcacattttaaatga

SEQ ID NO: 185933 - DNA, 3928 bp, Cannabis indica
ggccgtggtaatgatcaatgtggaagatggaccctggatgtataaggtggaattggcaactgctggttctgcattagaagctgaaactaaagcaatttagctggctatcttttgggtcaagcaaagaacagaatcaagaattctggtgtgttcagattgtttgactgcaattcaggcattggaaaaaaaaaagaagtgtgtgcctaattggaagtttcttaatgtttctctttcgattttagatttactaaaagtttttcgattttagatttacttaaaagttttcgagtttgtagtttttattttgttaatcgtatggaattggtttttgttgatggattggctaaagtgttagaggtgccactctttctgctggtgtttaccaaggggagggcatttcccttgtaatgcccatcattttctctcagtaattaactcttagttccttaaaaaaaaaaaaaaaactgcaataaataaaactagattgggagttttacattatccctatttcttttttttttcccaataattggcacacttggtacttaatcaatgctctaagaacttcaaaatctagagatccaagattcgaacttggtctcccccgattcccaacccccaccactaaaccaacctagtggttcgagcataaaaaacagaactttcacaaatgattgaacctaagcatatggatctagtaaaacatattgcagttctgcaaaacgtaatatattatttgtttaagatataaaaaagcattcatacatcttttgaaaatgactaccagaacagataggtgggaatatgtggcattcatagttagaatctcatttgagaatgattagttaatgaacactaaataatgaaatcgagctttttgctaaatgtgtgaaaaaaatcacaagaattgtcaacgtggctctagtttaagcaaaagatacaattataatgcattaaaaagaatggaatacattttataaatctattaaaatgaaatggaatgcaacatatacataatttcttaaccggtgcttgagtaactcaacctaaaaatcttgatcaacatacattgctgtctccaactttccatgttatttgtgttgtgataaagtcttcagctttttacctcgcaatccattccaaaaggacgcagcatttactactttcttcccaggaagctgaacttccaatacctatatgagtagttgtaaaagaaaatgagctgcagggccgcacgaaaaagaaaaggggaaacaagccaaatatgtagtttgtatagaaactcatcactttgatgtaaacgaaagatatgagaattgtgatcttttttatcttagttgtggtcgagggagtaatagattcaggtttcaacataattggtgaaatacggtttctaagtagtaaaccttgaccaatttataatatacgacacaaaattattggaaaaaatatagatgcaatagcaaaatatttatgagatgttgtctctaacaggaaacaaaaagtagtaaaacatgaaaatattgatagagtaatagaagaattatgaaacgcacctcaagggatgtgcatcctccgcaaggaaatattaatccacctttgacaaaagtaatgtcatctgcttcattccgctcaaaattgctacggctgcagactcgtgttgtgataattttaagctctagttctttgcactgaccatctccttcatcaacaagaacaattttagctcgagttcctggccatcctgcaaatgcacgaacctaatagtgattgtatgtcatgactgtataattaaattcaaggaagaagaaaatatgtaccttgttatgcaggactacagcatcttggtcaaaggatagccaagactcttcaggcgcaatctgcaaaattactaccaacaaaattacaacaggtaacaaattttgcatttcattctaattccacattgatttagtacaaaattgaaaaggaaaaaaaaatgtcaaacagaaaaggatgacttttcatgtgaccaacaatccgacttagcatataattttttttttttttgcatgtgaatttcaaagcgaaataaacacgtggttttgtcacccacaaggtcaattcttctgcaacttgtaagtgatatctgtataaaatgcatgcatggaaacatgatttcacagttctgtatatatttttttttcttgatgtgcaatatgcttcaaacatattttgtttgcagcggcataagtccttttttgtcgatgttcttattttttccaaaaattcattattaatgaaaatttgaatagatataaaaaaaaaatataaaaaaaaataaaaacagatgaccccagaaaccaaaacccacaacaggaaatatcagtaaatatcctgatagccgatagtagtgaacaaacaatttgaacactttcctttctgtagatattttgttttgtaaaaacgaaatcttagaggaccttggagaattatacaaagatgtacagccataattttgtcagagtaaatattataatggtttctttcgagccaaaaagttaaattaggtcaaaaaaaagtaaatattttgaacaaggtctaccttaggagctaatgtaactttagaatcatcttggggccatgctttttccttggctgatccatcaagtaaagaaggaagctcccgaatcaaaagtttagctcctgaagaatgcagctatgtataagattcttaattgtaaatgttctctcaccactaggagttgaaagtttgttagcaactaagaaaaaaaagagtattacttaaaaccatttttaagcaatcattaaggctcaattattacttaaaaccacttttaagcaatcattaaggctcaattatcaatacgagggcaatcaacttcacattgacagaattacagtttatctttgtgacattcattccttttccgatgagttttaaaattaaaagctgactacgtcttctgaacaaatgtgatacaacatacaacaccttcagaaaatagcagtgcaagtaaatctggtgcctgcaagcaaaccagtgtgaccatgagtcagaaaatgctttccaaggacaagaagtgttgtaactttttatattaataaatacattataaatcttcgaagttagtcatcaatgcaacgtggtctaaacatgaaaattgttgtaggtaacaaataaaccacaaccttagtttcttcagacacgtgaaaatttccaaattggtaaccgaatcacaaccagtaacccaattccaaaattgaccaaaaaattccaaaactaaatactattcattaaataactcagatagacataaccaacctttatttgatcatcaacttccaatctttcacacgcaattacaggcccagcatcaagtgcacgtactgtgaatgctagggacactcctgtttctttgacaccatcctaatcattggactattgataagatttacaaatgaatttcttgcgcagaaactagaagaatgtgaatttaaaattattcctgataaaagtgataacaaaaaacatataatagaacctgcaatgcccgttgaacaggagcagcaccgcgatactgcggcaacaaacttgggtgtatattgacagttcctgggaaatagcattttcaatcaacaacttatgaagttgaaacaagtcaatgcattgtttccttttcgcttcaaatcatagacgaaaaccaagtaaaagaaaaaaaacaaatgtttgcagtcattaatctcttatttcaaggacagactaatccttcctttctcaataactgcaacatagacctagacatgacaaaagaaattgagggcttctagaacacgtgactggtatgaatcctgtatgtaacaagtctggggttcaaacagctggtaactatttacagtttcttataagaagaagaaagaaaaaaaa

SEQ ID NO: 185934 - DNA, 2273 bp, Cannabis indica
aaaaatttagtatttgaatctccggatttaagccaagaaactcgtgatctttgacgccaattttcttcctcttgagcaagaagatcatcaaaaatttgttctgaactttgaagagcagaaaagtgatctgaagtcgtagtggatgagttttgtaacacttcaacatgtttatgagcctttttaagttttttttctcatatgaccatacttgtgatgatgccatgactgtaagtgtgaagcacaagattgaatattacttaaagtttgggaaataggattcgaacaactgttatcccaatacttaaaaataatatccaaacaatcttgatcattaagccaaattttctcaaattggaatcgagacttgaaagtaggtttctgccaattgcacaccagccaaggagaccattgttttaagagccatgtggtccgaatgataatagtccagatgctgaagcaatggtttttgaaaaaagtcacaccaagcatcattgaaaaaaccataatcaagtcgttccttgacattaccctggccttgacttttgttggaccatgtgattaattctccttcaaatgcagcagcttccaaatgacagcagtcaacagccctttggaaagcttcaatttgtccattattacgcagaggaccaccaatcttatcagcttgggtgagaatttcattgaagtcacccaaaaccaaccatggaaagttaggagcaatgtcacaacacctttttagtaaagtccaagtgtgaatacgttcgctactttgtggatgaccataaaatccggtgaaatgaaaggaaggcagatcttgaaactcaatgaaacagtctatgtgattggaggaaaaattattaatggtaacctcagcttctaacttccaaagaagcattagaccacccccaagaccattacgaggaacttcaataccattgggaaaatgtaaactattgcgaaacttatcaacactaccagcttgtaactttgtctccataagaaacaaaacacagggggcttgctcggaaatgagcaagcgcaaaaatctgaatgcagtggggttccctaatccccttgcattccaacttaggagattcatggcgaatcgcagtggagcatagcatccaccgcagaagaaccaggctgttgcagggttgaatctgatgaaaaccagaaagaaccgaagcagaagagagatcagtagtggctggtggaactaactgaccattgttctgagaacgacatcttttaagaaatttacgaagggattctgactctattggtcgttttgatgcagagaattgtccaagagaagaaccatcaacagattgggatgcaatattgttagtgaaaaagccaatattatgagacatggtattagtaatatcagaaaaaggaattgaattagcaatggagtctgtcataatggctttttgtttcatagaagaggaatttatagtaggatgaggagagtaatgaaggttagtctgaggagggtatgtagcaaaagaaggaggagaatttgttgcagaggaagggagagagattggtaaataagaaggaaaaggaataactgaaggatcatgggaagtattatgtgatgaagcactagcactataggtagtgtaagatgattgatgagggggattcatagcaggaggagatgaagattcggtcacagtaagattatatggatgggggtttggtctgtcatcaagtcgaggaagtacagcagcaaaagatttttttgctagtctagtcataagaggccaagcattgcccttaaaaaaatcggttcgataccgatcataccccgatgaaggcaaaggagcacccatcatttcaggcccgtattccagagagggttcctgaccattatagagttgatccaggaatttaggacaatgttcaaatggatgcccaattattccacattcaaaacagaattcgggaagacgttcatatctgaattcaacccaaaattcatcccgagagtccctaattcttgccatttttcctcgtaaaagcggtttagaaatatccaacaatgcttaaaaacgaagatatggtccccaaccttcattaagagagtcttcatcaacatccaaataagagccaacaatgttcccagcccacatagcaatggctttggatttacttaaaaaaggtagtctatgtaattgaatccaaaatagggactggtgcagcgagtcttcagtgacttcttgcagagcacagggttcgcgaagaacaatatgatgattttgaaagtg

SEQ ID NO: 185935 - DNA, 3381 bp, Cannabis indica
cttatccatttattggtggagggtctctccctccatcaataatagacttcatgtcactactacaaaaattactagtcccgtcagtcctcaaatcgttattttttggaagatcatcgctaataaaattgcgtgtttaaaattgtcagctatagtggactattcctaacagttttaaacactcgttaaaaataggtgacagtttaaaacagttataaaattgtaatggtttcatttttaaaaaggaataggtgatgcttttacaatgtggccaattgtatagccgacagtttaaaacagttggctatacaattggcataaattcaccgcctattgtgagatattataaaacacaatatcagatctcatattccttacactctcggctctttctctctcgccaaacaaaaagaaaccatcattcggagtaggagtgtgcataaatcgatccaatccaatgagaaccaaccgatccaattacaaccgaccactaaacattggatatccaattgtgattggatcgaattggatgttatttttaaatatccaattggatcggatcggatggtggatgtggtgtctaaaaatccaatacatccaacatccaatcaaattaattagtattttcatttagtttggatgagtaattagattttatattgttttacgtaaaatctctatgtatatataaaaattaacattaaaattttactctttttttcttggattggatggatccagtctaatccagcacatattggacctaaaatattggatggatccgatctgatccaaaaaatactaggtttaaaatattgaataaacccaaattaaaccattaaatgtatataattggatcggatatggataggcctaaaaacattagatgcggtccaatgaacacccctaattcggagccctctttgtctctcactctctctctcagttcgttcaagctcctcaactggccacactttcctcttccatcagtccattcgagctccaccaccacggtcggcatctaccccgtggccgcccatcaatgattgtcgtcatcgactgctcctccatccatctctttcaaggttattttgttctttgattttatatttgattcaactatagaatgattagtagttctaatttcttgtattttgctatggatattatttactgagtttatgtattctatttttgggcttaaattagggtttacatttatagtttactgcatatcttgtattgacagaatttctactattacttggcagtttcccctttgctctcttgaacttttgttttgggttaaaaattgtttatatgtgaacgaaagctttgaattcactttgaatttgaataacttaatgttattagcagaacaatctattctccaccacaaatcttaggtatagatgatcatcaattcccgtgatagagaaagttgataaacataacttcgcagtgttcaactatgagagaaaaaagtcaccctatgttttaaaaatgtcgtctatactataggcaacagctttcaatcatagcctatagtataggcgagggttttccactgttgcctagtctaccaattttgtgacagtcaaataggcgacagtcatagagaccggcgacaatacattagccgactatttaaaactgtcgaaaaatccaattttttagtagtgtgttacataacaccttcccaacttgtacctctttcactgttatctcctctgaagcttcaaacacattgttagtttccactttagaaggagcttcaatgcttactttcttcctttaattgtttggaaaccttgttcatctactttcatattctcctcgtttgcattagtaaccaaagctttaggcgccaaagtttttttagattttctctttgtctttgtcctacaaacctccgttatgtgctctattcctttgcaagtttcacatttatttggtttccactcataagcaacatgtacaccaactttccttttttattctcaaagctaagattattatgaaagcctttggaaatgtccatttcaaccaagacccgagcgaattgaagcctatatagttcatagttgcttgatcttgctttagcattttgcctatcttactgactattttcaccatagtctgttctgccgaatacttcagttcaagttgtctcaattgaacccataaaggaaattttcacactttctctctagtgaactttgaatcagggtccaaagccttcataatcaaagattttctatcaacgaattgatatcctccattcagaatggcatctcttgccttaactatgtgaaatcgaaccagaaaaaccctcatgagttagcaaactcactctatctattccctatttctcccaaatatgtctgaagaaaccatccattacattaattggcagatttgaacccagaacatagcacacaataaaagagttctagtaatgtatttcatcaactatatcttcatcaaagatcttagcacatttgcctatttcacccaacctttctttttcaaaatgctgaacagagaattagggatgagactcacctcattttgatttcgcatgaccactcataacttcagagaaagtgactctcaactctaatttttggagcaattccatttcagatgatttaggaggacaaatcctaactccaacatctccaattattgattgcactacatcagtcattccatcaggaaaataatccccaattgcatcttcaaactcaaaatcagaacccccaacacttgatccatcaaattagtcttctatgcacgttcagaagaagttggtcatcttttctttcgaatctcatccccttttttctccttatgaattgaagaattagttgctaatcttgccctcttcattgtcgatttttgcttcttagtcgtctgagctttgactcggggcctccccaattacaagcacagtttttaatattaattcaaaaacataaaaataataaaaagctatatataaatatttatttaagtttaatactatataaatatatcatccttacaagtttaatacaaccaaaatttaaaataactaaaacaacaatatcaagttataaaatagaacaaatcatcatgaaaataaatacgcaaaacaactaagtattacaaattcaaaaaaaaactagtaaaaatgcaattaaaatatattttttattatatataaataactagtaatatatcttttaattaaattttaaaatttaacatctaataaccaattcatatctactttttaatttttactcttttttcattaccctttaatttatacatttaagtcatatctccactatatgcggctaattttgataagttatatcataaggttatatttgatac

SEQ ID NO: 185936 - DNA, 5396 bp, Cannabis indica
gatttcagatctaaagtatactccaacaagtgtaatctttgtgaagataccaagtatatcaaaatttcagtggcactcttttagtataacttcaagctcaagtgttgatgaccacacaatgtctcttcttataaaatgtcaaggctcatggacaagttctctttacaacttgataaatacagagctaaaatcaggttttaataagatgaaaaccataccaattgcagttgaaggcccttatggagcttcctcaacagatttccttaggttcttcacttgaatttttcatgtcaacaacatttgttctacacatagcctagtttaagattgttgtttttttgatcctttgcaggtatgacagtttgcttctgattgctggaggagttgggataactccatttctgagcatcatgcaagaaatcacttcagcttggcaaagtgggaaccagaatcagtaccccataagaatacaactcatattcatagctaaaaagtcccaagatatttgtttgttgagctcaatttcagaccttattctaaaccaatcagatgaacagtttcatctcaagttaaaggcatttgtgactcaagaaaacaatcagttacaacagtaaaagaactactaaatgagtttacacaaggcgaaacagtcgatttcggtacagatagttcaagctatgcaatacatggacttgaatcttttctttggatggctgccatagctggactttcctctattgtatttcttgcctttctcatatgtttcagccacatttttattcctaaccagaaaaccaaggcatcatcaaaagagaagagtccatcttgggttgctgatataatcatattatcttcttttgtcatagcaataatttgcagtactttagttgcacttgtattaagagggaaaaaacttagcaaagaaacaatccaaacttcagaaaaacatgtcaaatcatggcaaccaagttccagtgaagctgaattaggatttgctactgagaaacatgagattcattttacaggaaggcctaagtttcaaggtttctattttcttacccaacttttaattttatttcaactattttatatgaactgttcttacttatatggtgcagaaatattggaaaaattcccaactgagactggtggatctgatattggagtcctggtatgtggacctgagaaaatgaaagagtcagtggcagcattactatgtagccataactctcaatgtttcaagagtggtcctcagaagaaaacaagcttcagcttccactccctcaatttcactctctgattggcctggctatacatatacactaatatatatatatatatataaatatatgaagagcacaggtttgattggtagataaaaatctctataaactaagactaatataatatattgtttataagataagcttataaaatatgaatttaacatgtaataggtcaatgtcgtgtaatataataaaaataggctgttttttcttttcaaaaggtcagctctaaatctaattacagctaaagtttcaattaattatggatttgtgaccacaaaatctgggtgtacttatctaaactatttggaaagctgtagcagatggttaaggtttatttaaagacttactcagtttatctataacatgggctttgactattattcctggacgaaaaatctacatgggtactcatagatgcgtacacatgtcgaaatcatattatatatttttaggccacatcaacatcaaattacaatctttttctcttgttttcatattaggctgtttattatgttctctaatggctgccatagaaaagggatattgtttgataaaaataaaaataaattcttttaatataaaacattttttaaaataagttaggatttattgtttctaaaaaagatttttcaaaattattttttttttaaataatttctaatttacttatatttttttttttaaatgatatctaaatatatttttttaaaaaaattctaaatatttttaataaaaaaaatttatacaatagttgtaaaactatataaaagtttatacatttatcttataattttcaatatatttcttttgctattagggaagtatccaatgtctgctattaggtacaataacagtcaatgttacgagtattgctattgagtattaatggtgtctaatatgtaggttcgcaaaaaattaataagagtataatacaaaaatccattaaaagattatattttttataaatataatcataaaaatatttaatttttttattatttttggggatttatgaaataatcccaaacaaatataatgcaatttgcaaaccagtaacttgtagttacaaactcaaataataataaatagaaaaatagaaatttctatctttattttcagatgaaacactactttttcttaataacaattttcatcgtgaaatataactaacataaacaatgtgttaatgggaaagaaaaatgtaatgatatgagagaaacaaaagcagtaaagcaattcatttagaatttcatcaaagtggtatcctagaataacaaaaatataattatgaagctaaccattaaaatatacatgtaaagttaaaacttaaataaaatgaaatgagaccaataataataataataacctttcaaaaaaaaaaataataataataataataaattaataaaatatatatttacagaaccggtgaaggagatggagccaaagccacctccggcgattcattatcttcaccactatcaacgacagctctactatcatcacctccaaccaaaaacgacaacacttctaccggtgccgtcgttgtcgtttgctccccaacaagcacagccaccacctctttcatgcttgggcggcgctgaggatcagggtggcaacaagccaaaccaagcttcaaaatcacctccatctccgcctcttcatactctccactaaccctcttatccgccgcttcaacaaccttaccttccaagtacaaatccctcacccaatcgatcaacaccacctcctcctccgccgccgccccaaactcaatcggcttcctcccacaagaaacttcaagaacaaccacaccgaacccatatacgtcactcgccgaagtcggcgccgctactgtggccagctccggtgccaggtaacccaaagtcccaacgacccgagtcgtgtttgggacctcgccgtgttggtaaagcttcgctagcccaaaatcgccgagccggccacgcatctctgagtcgagcaatatgttgctcgacttaatgtctctgtgaaccacaacttgatcccaaccatggtggaggtagtttaggccctcggcaacatctgctaacacccgccgccgttgttcccagcccagaagcttctttggcttgtcgaaaatccattggttaaggctaccattgggcatgaaatcatatacgagcatgagttggttcccttttctacaccatcctcgcattttgactaagttcttgtgttgaagccttcccatgcttgaaatttcagccatgaattctctcaacccttgttttgaatcgtggttcacgcatttaactgcgatttgggtttcgtttggtaaagttcctttgtaaactttcccgaatccgcctgcgcccagaagttgattgtcggaaaagctttcggtggcttcgtcaagctcttcgtatgtgaatcggtgaggccaatactcgagttcccaatcttctatatcgtcatcttcttctttgtctttcagcttgctcttccgccaataccagaaaaccccgattgaacaaatcgatacaaaagcagcacaaccgattacaatcccagaaattttcccgggagaaagcgacgaagaagactccggtacaagaaagaccggcaaattcgtcgcgttaatctctctcaaaactcctgtgtcgctaaagctccaagctaaaatcctctgcgcttcgatccattgcgttatcgaagccgaaaacccataaacatttcatcggagatgaaattcgctatgttcctgtctctgtaagtgagtgtaggtttaaccggacgaggaactccaatgggagcaacagtgacgttgatttcgaaattggtgccatcgaattcgatccaagctctgatgtttctcccatctcgcattggaactgggacgaaggatccagttgagttgtaatatccggcggggttccacgtctctgattcaatactgttgagattgattccgatgtggttcccatccaggtcaccgaattccgggttccgacccgtatcgaacttaatggctaacaggggagctggtgttctcaccgtagcgttggtgaatagaccgaagtactgactggcgatggcgccgggaggtgaggtgtagttggtgaggacgaagcagagaccaaagccagggctggagcttataactggcaaaacagaaaagacaaaagaggtggagaaagaagaaacagaggaagagtttgagcttgagcttcttctcatggtgattttagatgggtagaaagctcggccgacggaaaactggtcgatgagggtttcattagttaaccgaatcaccgatgagtcgaagtgggcatcgttgactaaggtgacgttggtggagtttgaggtgccggcgaatgagttaaagaggaaattgagggcgaaagttggtgagagaatgaagaggatgatgatgatgatgatgatgaggaaggttgtcatctgaagggagtggcggagaatcattgtgttactctccagcggcgatgagtttggtcaaagctcaattctccattgtagaaggaagaggtttactaatgttttttctaatatggtttcgtttttatgacatttttggctcttttattttcatgttaataattacttttggtcgtcctcattaggtagaaataatagattattatcataaacaaaattgtttgttttaagaaaatgagaaaatatgacatttttttttctttctaataagtgaattatgaaagagacatttccattaagcctaaatactcattttctaaagtaaatttatacttgtactttgataagttagtaaatcaaaatttaagtactcaattatatttaacatactaacataggatagtttatacgagatcatttaggattcttccgggacgtcatattacattatatatagtatattattaaattatattttatataatatttttatgtactattaatttttataaataataatttaatataaattaaaatttaatataatattatataaaaatataatctataactcaatttaatataatataatataatttaatatgacttaaattctttttttgcttaataaaatacagaggatataatataaagaagagaatgtttgtt

SEQ ID NO: 185937 - DNA, 2472 bp, Cannabis indica
acaacaagaagattgtgagaaacaaacctcataaagtggctggccatcaacgactacccaaggcacatatctatgaggaggttgaagggcatctgtttcagctccatattgcaattcaagctgaataaagataatagaccaaattatttatttcagaaacaaaatccttaacattactattaggcagcacgcagcagagatagcttgaagaagaatatgaagaacacatacacacatggagcctagcattgtgtaattcagcagggaaaaaacatcttggtataatgattttcagtataatgtcatgacaaacgatccataaagaggtcaaacatggtgttccttagtgaccaaaccatggattttgccacatgttcttccaacaaataatcttatgaagaggatggtttttacaaggtaacaagaatacattatagaaaggattagaaaactaacctctttaccagcctcgctcttgtagcactcattgacatgttttggatccaagcccaatttctcataacaagtttcccactgaagatacttgcgctcttgcaccaaagcctcaatgcaatagataaaaggaaaatgcttgttctgcatagatgtaaaagattccaaataaaaaggttagcattcttgtttatgagctactacttcccattaaaccaatcaaaacaacatcaaaaaaaatgaagattctatagttgttttatcaacattgttgaattactaatatgatacttgtcttctcaactcaccaactcaggccaggcatcaattgcacatgcctccacggtgtttaataagcattcatagggaccatgctgcaacaataaaagaaccacttagtattactcacttaaaaaaacactctgaagtctaaaatattaatgcaattgcaaaagacatttatttacagcaccgtagctattttttgcaatgaaatgaaaactgagaatagtcatagagaagcagaggggtagaggtgaaacaactaatctttgaagatttctataacccagctgcagattaccataaatttttataactcaattataagcatttcttgtaaataatgagttttaatacaaaataggattaatggaaagaaaacataggggtgatcagacctgacaaacgacggtactgttgcctctaatcttggcgtttccccaaggaaagagtttaagatcaacgatagagagaaggtcatcttcaaagatcttgaccaggtaattcactatgaaatttgcactataaggacaaagagactcgtagtacaatcccaacgacactttctcagaatttgaaggcaaaactctagctttggaagccaaaatcgaagtgggttgaagcgaaacgaacaggaagaggtatagagagataagagacagaagagcaattgttcttcgagaaaacgccatggaagaaacccaaaaccaaaattaaaaattaaaggggtcggaaagtaatttgtcttctcttatgggtgaataatgaattgtaccctttattctgatcaaggtgaagaagaagctctgtggaccaaaaaaagcaacaaaaagaaaaatactgaatctttaaaagctacaagtcaagactatccatttatattaaaaaaaatatatgtatacatattatatggttgaattgaatagaataatatacctggcaagagatggtgtggttggatccaagtctggcgttaccgtaagggactaaattgagatgaaccagagagatgagtttggtgtggaaaagcttaaccagatgattgagtatgaaatctccgcagtcaggacaaagggtctcatagtataagtccactgacactaatttctcattatgattggaagaagctaatactgggatcaaacagcttgtgaataccaggatgatctttattaagactagtaagctagtcttagatttcgaatccatcgagttttgcttttattttattttatttggtgccaattaataaagtcgtggattatccttacaccactcaatttcccagtttgttattaattttcaagctaaaatgcacttgtccagaaaatttgccaagattcagagtaagctaacgtgtcaaaaccataaattcttgaacaatgcattgttacgtttgttgccaaaatgaaaaatatctctgtccatatcatcatcatcaaccacgtctgcaacaacaatttgctaaattaaaaggaggaaaatacttgtattaattgaatttactattattagtgattgactaatttgtaacaatcacatttaattagtacactaatttaattttacatgtacttcaaactaatgagatttttaaatttaaagatttttatttaattttattaaaaaaatcttagtaaatgaaaatttaaatataatttaatatatattaaaatttaaaaagcatgatttagtagatattaaagttcagataacataatttaatacataaacaat

SEQ ID NO: 185938 - DNA, 3512 bp, Cannabis indica
cccccactcctacttcactctcttcccccacaaaacacactacactacactctacaaccccacaaccccgcacacaagcagtacactctacatatatacacatatatatatatatatgtacacatgtatatgtatatgtactgctacaactactacaactgctatgctcctccaacacacttgacatcatactcttaactcttaagccctcccatatcttcctcaactttaaaattgtatttatatgtatattataataataagtatgatatttttcttttaggcattgttgtagagttttatacacacatattattccctctgagaatgtaggtagtaagccactatttatctatgtatttttaaattgctaaattgacatcatattagtattatactaaaaaaaaaaatgtaactgaaagaggaaatttatgatggttttataatttaggaggattatttaaaatctaaaaaaaaaaaatagggaacaatttgttgaggtatcaactcaagtcccacattagaagaatatgcaagaattgttttagatataagtgttttacttattctattagtatgaagccttttgagaaggtgcctaaaaataaaaccgtgagagcttacttaaagcgaacaatatcatactaatatgagagtcaaagtgaggtagcggcctgacaagatggaagaacgggactcaacaagtagtatcagaaccaaaggtttaggagcgttgtgatagtgagctccatttgtgatgtgtgggagaagctatcaaagtgatgaccttgcgatggaagatctatatagtgccttgtatcgaaagtttatatgataatgacgtagtcaggtggcctgtctcattaatgattacggcggtacaagatggagattagtgttaggacctatgtcaaagtcttcttgcatgacaaaggtgattgtcaggggcgagttcccttggtgatagtggcggcataagatagtttcgctggaagggagagaccacgagtatgtggtccttggtttgaggggagaattattggggtatcaacccaagtcccacattggaagaataggcaagagttatcttagatgttctatctactctattagtatgataccttttgggaaggtacctaaaaataaaaccgtgagagcttaggccaacgtagacaatatcatattaatgtgggagttaaaataaaatagcagcccgacaaaatgaaataacgggacccaacacaattttatacaagttaatgtgcctgcgaaacatatttatgcttatataaagattgagaaatattaaataacacatatgttggtggccaatatcttatatatttttgtgactacaaaatgttactttattatagtcaaaacataaacttagttacttgttaattatattaaaaggtataatatttacacattttactaattaatttagtttaagtcacgttgtaattaaatatatatttattcacaataatttttaattttttttttaattttagtaactataattagacttttttatatagtaataaaatagattagttataattttttgacttttaagctaacaagttgccacttataaaagtaagattgtttgtgggcacttattacctaatttcattaaatgtatgttattaattagtactcttcatatatcatttgactatttgaaactaataatatcatttaatgtttttttttttctaataattaatgtaccttataaagtctttattttcttttttgtatatgtatcgagtcgtcatcatcatcaagttgttaattttttctctttttaagaacaaggtcatgataagttgaaaattttgaaagaactatactaatttatatcgtgtgtatataataattaattagggtactcttaactcgtaaaaaaaaaatgtactatatatatgtatatatattggctgtgttgtgttgtgtaccttattagaatattaatatacgtactgtgtatacagtttttaataaacgtgaaccttttaaagtgagatatagtacgaaatgaaaacctacaccacagaaaattaatggtatagggttaatttaattggtatatatatatatatttattctaaatgtacatgtaaataaatttatatagagatatataatgaattaagtttgccctacaacgtacgtaatatatatttgtttgtattcattgttatgctttttcttgatgtgttcttacattataaagtaacatggaaacttcaatttcatatagctaattaatagtaatacaagtagtacaagttagacaaaagtgttaaagataaaggtcagcaatgttgctcgatatcgactaataattttttatattattattaaatcacttacttcctaatttaatttaatttagatatataataaaaatgtgaagaatgataatgtgtgtgtatatatcacacatatacgatagataggcatatgcaccaaatttatatagagtaattaatttccacatattgtatgttaattactatatatatattaagtttcgtacgtgatcaaatggaacatgaataattataatattaatatattatgtattttatgtgaataaattcttagatccatggtggtgttctccgctaacgggacacttctctttaaaaactgatgctttagtgaaatctcgagtaggagttttgtgggattgagcggtgtgatacgggatgatgagggccggatggtggggttggatggagattatggtgtgaatgtggcggagttactagggcggttacattgggtttcagtattgctcactaatttggttttcttatatctctattattaaaagtgattcgacaatcttcataggctggattaatagtcctaattctaatcttgtatgtcagcaaattattttaaatgttttatctttataattaaacagttgttggtgatgatttttgcaagactatgttggtattattcatgtgctaactacttttattactaattctttaaaaaagtatatttaaatggatatttattagttctcaatagttcatttaatttaatgaaatccatgttgtcttttaaatatatataaaataattatgatcaccaagttttctatatttactacaaatggaatatgaaacaagttcttcattttgaaaaagaaggtaatgcagtgcaaaaaaaagatatatataaagtgccaagatgtataatgatcggtcccccattgatgatctttatcatgaacatgaagtaatatatgtatatatatatatatatttatatatatgcaatattaatggatggatggtgtcctttgttggaatatgaggataaaggagtgtaacgttttgtattatagtaagtactatcactgtttggtttttgcttgtttgcggtccttaattaaaaattaaattaaatgttggagacccagggccactcttgacaactcttgacaaagaaagatgaattgccatccatcggtatatata

SEQ ID NO: 185939 - DNA, 2242 bp, Cannabis indica
aatggcaatggccatggagtacagatcgatccaccaccagcaataagaatcgaacaaccacaagccccaattcccctccccaacaatcacctcctacccctgaatctcagattagatcgcacaaattataccatctggcgatcgttagtgctggctgctgttcgtgcatataatctagatggctatattcttggcactattcctcaacctccagaaactcttgcaggtaacattcccaaccctgatcttcaacaatggtttcgttttgatcaattcttgatgcattggctcatgaattctgtaactgaacacatgttgggacatgttattcactgccacacttcatctgagatttggacaacatttgctcaactttttgccacaagatctcgtgctcgactcttgcagcttcgaaatcttcttcagaccaccaagaaaggatcattatcgatcgaagaatacatattaaagatgaaacaacatgctgatggcttagctgctgctggtcaacctctcaatgatgatgatcttgttctttacattcttggtgggttagggtctgaatatgaagcagtaattgtcaatcttacatctcggtctgaatctctctccctccctgaagttcaatttatgttgcaaagccaagaaatgcgcattcaacaacagaccactgattccctccacaatgttcaagcaaatctggccaatgccaacttcagcaacactagaggttcttattctagccgaggttcaagaggtgcttatcgtggtggcagatctacaaattctaaccgagggggccgtggtaacagaccagtatgtcaactttgtggccgtgctggtcatatagctatcaaatgttatcatagatttgacatcacttttacaggggcagcatctacatcttcaacaaatggtgaaaatcctcaagcccttctctctgaaaccagctccaacacagacatttccactgcttggtatttggacagtggggctactcaccatatgactcatgatgctgaaaatcttaacaacaccaccgactacaagggtaaagctaaggttgttgtaggtaatggttcatctttatccattcatcatttgggcactagttctgtccctacttctatccccaatcaatctcttttattacaagatattcttcatgttcctaatgtcacaaagaacctacttagtatctctaaattcactaaagataacaatataactcttgaatttgatgacatttcctgtcttattaaggacaagacaaccagccgtgttcttctacggggccaactcagtgaaggcctctacaaactacaagtctcttcccccacaacacaagaatctgtcaagaaactcactgtttctcggcctcaagcctacaaccacacaactactagcaatcctgttcaagacaagtctcaaattgccaacatatggcactgtcgacttggtcacccctctcaacctattcttagcaaagtcttgtctcaagttgttccccatttcaaatgtaaacaactttctttctgtaatgcttgccaaattggcaaacttcaccaatttagcttcaaagctactgaaaataaaactgtacacccatttcaattagttcttactgatgtttggggtccatcgttttatccttctagtgatgggtttagattctatgttagttttatggatgattttaccaaatttgtttggatttttccaatgaaaaacaaatctgaagtcagtaacattttctctcaattcaatacctttgttgaaaggcaatttcatacttgcataaaatctgttcaatccgatcttggtaaggaatatgaacccttgtacaatctatacaaaactttaggcattgttcaaagaaactcctgccctcacactcatcaacaacaaggtagaattgaaagaaaacatagacatgtggttgatattggtcttactttacttgctcaagccaacatacccttaactttctggtgggaagcttttgcttcagcagcctatctcataaataggctcccacacccgattcttaatcatgtttcaccatttgaaactctttttaaacaaccaccagattataacatgctcaaagtctttggatgctcctgctttcctcttctcaaaccatatgaaacacacaaagttgcttttcgatcttcacaatgtgttttcataggttatagcatcacatccaaaggctttcgatgtttacatccatctggcc

SEQ ID NO: 185940 - DNA, 2222 bp, Cannabis indica
tttttttttttttttaataacttgggattttgtatcattccttgaatttttagtgcctatcaaattggtgttagagcgttttcctttgtagatggctatttgcaagaacgagtcttgaatgttagaatctttggatgaggtcacaactacttatgaaattagtacaaaaatgacttccttgaagtaaaggaagagatggcaagcaagaagatttgatcaaaaggttgaactgatgctcaagaaccacaccaaaggcctaacttctattcagactttggcaataagatgccaataaaaggcttccaatcttgccacaaattttctctacaattttacctattatctatgtaattcattaatgcccctaggttgaggtacatcacaagcggaacatgggaagagtgtgtggacaatgacatcaatattggctatgacaaaagttgtgggaactctagtagcaacggtgaaacacatgacgggttcagtcgtcgaatttctaggcgcaccaatggatttggtggtggaagtcgacgtcttggtgatggccatctggaagcaaaggcgacatatgggaatctattgcagcgagaaaagcttgcaaaaaatagtttttgtttttgggcgtgctctttacttgcataagaaaaatccaagttttaatggggtcatttcatcttttacctaatggattttgatagagggattgaaaaattgtcaagaaaccaataaagggaagacatgggttatttgattatccatggggttattgcccactctcaaacacaccactggtggaaggttacaataggtgagagctgggtttttgacaaagaacgatagcaaaagcttttgcttttgatagttggggctggtcacttttcccatgaatttgggtgggttgttctttctggaggatacgaggtcatgaggatattcccacttgttgactccataaaaaacaatattattgttggagaaagattttggagctcatttatgaacgaagttagtggcgctgcgtgggaggcataaatttgtatttggtgcttaattttacatttcaagaaccaactgctctatattgcattggagaatacaatagtgctaggttgggtttcgtttttttatttatatatatatatatacccaacttaaagaaggaaatacacccaaccacttgaggagtggttttggattgaagtgacgcattacaggctgttgcatattgtttacaatgagcaactaagatgaatgttcaattgggcaagaggtgcttcaccaaatggttatgacatcttcattcaaatgccaactaccgatgcgttggcaaagtactagctagcgtaggagcaattttcagattgtcaccttgtggacaaggtggcgttaggcctcaaattagcctaaacatgtcactccacaagcaaagttaattaggattataatagtcgagttgtcaagtgtttagttgcagagatgtaatgtttttgagtgggatgttaattaattagatttctattggttggctagttaggagtttgttagtctaaccacaaagtttctcgaatgacttgggattttgtattatcccttgctcttatcaattaaaagcctttcatagttattttaaaaaaaatgaattgtgcactagtgcctattagtttagctgtctttatacgtggcatttattttagttgtattagaatgttgaggtacgtagtttgcatttctactttctttcatgtttcgaagcccttgaaaaatgagattcttatccttactcgatttctaggtttttgatacagtatgtggctacgtgccatgcaatatattatatcttgatttgttgcattattatgctttaatgtttcttgccttttgtgcaacgtagttttcatgttttgatagagacctttcggaagttgtctttatagtattagaaaaggtgtagttgcctttatacttggcattcgtcttagttgaataatgttgaggtacgtagtctgcattaatactttctttcatgcttggatgcctttgaaaatgaggttcttatccttaccagatttctaggtctttaagatagtatgtactctccaaattattgattatgtaattgtggatgcattaacttaaaattaggttcatatcttaactatgggtggtcttgtatgcaataaattggtcattatctggattcactgtaaataattggtgcctac

SEQ ID NO: 185941 - DNA, 3395 bp, Cannabis indica
ttattagtcactagattcgagaattcaaccacaaaaataaaggtaattatattattagatttagattctaccattactaaatacattgtactatatatgagaaatttcattattgtcaattaattattatgaaaaatcaaactatcttattgctgttaataaagcttgttgctagattcctaattttttttcattctcaaaaaatatataaacaatataattataaatttgggcctataaatgaaattaaagacataaatattgaagttacaaaaaaaaaaaaatgaataaaaagaaaaaagaaaaaaatacgagaaaaattaataaaataatttatttttcttttaatataagaacatttttttattacaccaaattgttatttcattcaaattttacagatttaaataattaattattttttgtttttgtaaaatttagatttgggttaaatatatatatatattgtaaattttaataatgatggtatcctctacctctaatattttattgatggtattctctttttaaaacatgagtttaattttaaatgaatattatgtgttttttgaataatattgatcaaaagtatatactaaaatctagttcatctagaaaattgccaatttttaatctaaaagtacagctcatcataaagtacaacaagttcacattagcatagaaactcgtaaaaaatttaaaagaaaataaaaaattgtaaattcgattattcgaagttattaaagtaatattcattattacaatgtcttttttcactttttttttgttagtttgaatcgaatgaatacttttgacttataaacacaatccatgtttgattaaagcttctttaatcatcactatccaaaaaggggctaagtgtccccaatgatcgatattttcttctttagttaattgtttctatcaaatatatatatgataatttatggatgtataccatttactaatgtttaatcacaccatattaaaaagtaaatattgaattaatttataggattttttttacttttatactttaattttatggtcaatccccgcatgggacggctgtctaatttcattcagaggctccctagtcttattgtacccttataagagattatctgtgagcacatcacagtccctgtccggtctctaggcaagtctcaccctttctttaggctcaataggtgtcttagcctgacgtgcttgagcagcacatacccttgccatcagttcggcaatatggggatcgttagaaggcactgcacagtaagtttgctttgtcctagtcaagtttggatcctgactggtgtatcgtgcaatagtgataacaactttagcctgagagggtttcttcactaagggcgatctacgtcctttttgcggggtgtcaggagaaccactattgaattccaagtcagaataactcaaagagctggtcggagaatcactagatgatgaactactttcctggagtacaggctaatcctcaaagaaaaggctgaggagatctgagtctatctggtgttcacctctccagtattcgcacgagttcatttatgcaaaagagaagagggaaatgaacatccagacaacataaaaaccatacaggcaaaatctaattagtcggccatagtgaaaacacctcgcataggttggccatagttttaacagatctaaaataacctattttataaagaggaaccatggaaaccaggttcttcgtgttcttcagaacctatgatccaaaaatatgaaaagtaggggcaagattcaaccttttcaagctagaatccctaaatttatctcccctaacacattcgtacaacccattaaggatgggtgttcctaaactctcggcatggagattttacctccaacaatggcgtagaaacgaaaatggaacttgcagaaaaaatttcaataaaagaaaaagataaggttgaagaagctgactcactagacggagcttgggcaaggcctaaacggtaataagaaggttgttggttttcttttgtacggtggaaggtcgacgaaagaatacgaggaaaagttctgagttttccttgagtttttctctctggaatttttctagaagaaaagaaaatgaagtagggggattaagaagaagacaaggcttcatataggcctctcttattcaattcctctccccccacccaaaaaaaaaattaaatgggaaatgtattccctgtaaaattgttatggggaagtggaagagcaaaatatacatttatggaagagtacagccatcaacgcgatctcctataaagtatgatttgtaactgccatcatgacagctaacatttaatggacaatcaaagagactgaaagctaaccgttcacttctacacggaacagtcgccagagtctgatcacatagagctcatgtgcctgctagtatctgtacaagtgtcaaaatttcccatccagacagatgtccgtacggaaacttaggagaaaatattatctcaaagtttgcatatctgacgtggtacttacacgtggtatgatctagctggcctttcatgtgaaagggactttcgagcaagaatgtgcctggcagatcccatttgaggctagtatccatggactgtggatagccttctaggtagaatctggtcgggccatcagtatgccgaccagagaaagaatgatcaatatacctgccaagactgcatcgtgaatcactttatcgaaaaagacaagtctcaaggagagtcgggctagatagtcattatgccggctagaagaaacaaccccaggaatatcaggcaaagctacacaagtcgatttcttcttcaaacaacttccacaaatatctccaactgtatcctacagatgcagatttgactgatctacccaagattgtaggagtcacaaaggattgtaattgtaccctaaaatataggaatatttactttctaatcattcattttacgaagccaactgtaacaaccttcttcctataaatagtgaatgatttcacaagggaaagggacctgagattataatctcgcacttaagaacactacactgaatattctttgtaacatcctaagagatttagctagaattcactttgtcttccttagtaatctgcacgatattatctcacaatcaatacaactcaaatgagagtaggtcattatccaaatacaagggggtcaaacctctatttttttttttttttttgcttatttatttttcttaactccttattggtgattagtcagtgtttattagactctaaattaattggctattttcccagttaacaataagaatgatgttgctacaccactttgttattgttatagtagtaaggctttatttattcgcggtactagcttttagtcttgtttttttttttt

SEQ ID NO: 185942 - DNA, 1907 bp, Cannabis indica
agtcaaattttgggtataataatagttatgcaaagtctcaccttgctcctgtttgatattggctagtgtcgtgtaaggcggtttgtatgtctttgctgcctaaaagtgcgtaagaaacaggtctataaatgtctcccacgtcgagatcaatacctttggaaattggttgaaacaaccgtgtgtgtcatcttccaaatttgcagcgaggattcagaactttgccaattgtagtacctggtcaacttccatgatagtattaaacttatccaagtaatctatggggttagtcaaacccttgtatttcagcaacttaaagagtcagaagcctttccagagtcgggcttgtctcacttcttctgtggaaggtaatgtcacatacaacttgtaaattggcttcctctattgctcgatcattcgaagagctcgcaaaagattctcctaatcaattcctccctatacgatgttggcattattgataggtgtgatctgattgctaggtgcagcaaccacgactgctatgtttgcaggtaccaccacgttgtttgtggttgcgactagggctggtgtcgctattgggttttggctgcattaatcacattattgatagcttcaggggttgtttagcaagagggatactttgatcggccacatggggatcatggggttcctcctcgattctgcgacctcttagagtcagggatcaggtgagaaatgcctcatttggatggtctcgtagatcgcccatattaacatgataccttccttctagtcttgtcaagactgaacctgacctagtatagaaattatgagagaggctgtcagatcttgaggaagtggaaaaggtatcagggggatttacctcatctcgttgttatgcatgactgcgaggatggcatcgttcattgtcgtcttcttgtgatctttcttctctatgactacatcactggcttgagtttagaatatcgaatccttttccttgtgcagggtttgtgaggaagctggttcaaatcgggcctgtatggattgatctcatctaagcactcccttttgtaatacttgtgaccatcaaaaatattggtacggttaccatgatgtctagtagtgttatttacctggttattcgtgtgtcgttggctaggaggttctcacagtagacgaataacttagtttcgattccttcctacaatttcagcatacatagcatgtacttattccggtcatacaagacggttgtcaactgcactatacccttaacgacggagataggttttattggcagaaagtggccaataatggctattggcgtcgaggcttctccagctaagcctagaaattacaggaaaagattcaggggagtcatagtggtatgccccactcctccaaaagtgaactcaataagggcagttccaccgttgacaatcgaagcaccagacgtgcctctattgttggcctgttgttctcattggtgttcatctggtttgtagtcatttcgattctcctctaaaatctcagatatatcagaaatctgcttctcacagatagtgccaaatgttgttggagaaaattagacaatactaaaaatagcgagtattcgagcaaagtaagaacactcactagaagatatgcaattattcacttagaatggtgaatactcaaagaattgactacgaaatagacaaaacaaagatagtaaataataaacaaggcaaagatgtatagtagttcagtcagagctcggtctacttagtccacttttgcaaacaatttcagcctaatttatttgatttggatcactcctctatgtagaaagcaagtgtcctttgatcttacataatcggttagacaggactgtttattacattaatcacataatttaattaatataaatgtttaaagaataaatataa

SEQ ID NO: 185943 - DNA, 7938 bp, Cannabis indica
tcaagcttactaaacaatgtaagattaagatatatgtattgtgtggttcttgaaacagatcagtgcttggaagaagttcagagtcactaaggggaagatgtcacaagttttacaaaggatgtcgaaagtatacgtacgtatgttttaactgtgtaatttctttcaaattcattttttacaaaatcaatgattctctctgcttagtttctcttttgtaattttattctcagagaaggccttgaagacggttatgatggcgacattgcttttgcaagtgcgcttgaaacttttggaggagagactagtgaccctgattttatggctttaggaggtaactgttccatatctagtttgctgtatcaatatgtatttcatcttctttagaagaaaatttaatcatagtttgtacttgtggtgataattttatattcttgttacatttataatgataattaaccttacatggcctcttcacagacaatgtcaaagttgtctgtttgtaatggttttaccaacatcatataaatctcttgtttctttccccaatagtatagcttgtgaaattctttacttttaaaattcactgtaacaagccccaggaaaaagggcatcaacttaacttcatataggtgtatgttcacatgatttacatatactaatcgaatccatgctactctcaggcccagttttgagcagattcgcaagtgctttgagagaaactgcagtttataaggaagttcttcaatcccaggtaaattatcatatttcaatattttcttcaacttgaccgtcctatatcattcccaggtagtccataagcaatcatcaacaatctaacttgtggaaaagagacagttctgattgactttgctgtttgccgaaaaaaaatatcttttttaactgacttttctcaggtagagcatgtgctaaatgacaggctcctacagttcgtgaatgtttaccttcatgatgtaaaggtatagtgtttaaaatacatactttgattgcacatagtgtgtaggaacacccatgacgttaaatcaaaactgcagaaatattctttctaatataattccagaactgtagaacagttaatataattccatacatttcccaagtggacgtggactaaaactttgtggacttttcaatatcaaatttactgcataagaaaagagaatttaactcatagaaaccttacgaatactccacacgaactgctgggaataagtatccatgactgccaggtccttagatttacacaatgtgtgctcaatctcacagcagtagtggcatgttcaacttaacctacattttattggtagcaatagcataccaaaaaaatgatctacaatggtacatccagttcttcagttcatacacacgtgataggaaacatttactactttgtattttattcaatgtatgatgttgtgtaactatcattcttcatgatcccctactgtccaattagaaaaattcatgttctcactaaagtaaatatcattgttgcaggaagcccgaaagcgctttgagaaggcatcattcacacatgatcaggtaggtttccatcctcaatatctcagtagacatttcgtgggactttacctttttaccatgcttcataatccacatgcatatatatttttttcagtgataattttattatatatttttatacaattaatatctgtccatgctagatggccccatgaacaagactattttgaatgatcacaggaacattattttatattgtaccaataatttttttcttttttgcttaccctaatgtaacatgataattaaagctgcggtttaacttagtaagaacagtagaaactagaaagatgtgttttaaaactaaagcctcccaaattgtggtcccttgtggaatagaattgaaatagggggggaaagtgtttcaaaatttctgactgagtcaacttgatttccacttttcttgctgagttttagtatccaatactatgtggagtactattgaagccaagttgtatgaaaattgtctctgagttttccagcttaatgctgttaaaagatatgtcctgttgatgttttctgtattgcctattgtttgacataggcccgcgagaagtttctctcagtgaagaagagcaccaagactgatgttgctgctgttattgagcaggtatacctaataatagtagactagtaggctatctctaaattgacatgctactgaatgtttctacatacatttacttcagatacttttacatttatctatttatatctaatttgatagagaggcattccaggaactcaataatgcaaggtcttcatttgatgaagctcgctttaatctggtaaactaagttttacaaatatatgttatttgtttgaaaattcctcgtggaaacacttatgcctctaatagattaactccacatacaggtcggtgctctctctgacattgaggcaaagaagagattcgaatttttggaggctgtcagcggaatgatggatgctcatcttcgttacttcaaacaggtatacaatgcaatcaaaatgatgcttatcccaatgttgtatcacagatgtatgctgcctcttatttggtctcaccatcttttattttagggatatgagctgttacatgaaatggagccttacattaatcaggtgtgtagcttgctctattttacagtattatatttttatttcttgacttgctgtatagatttgattgctccggggtaggacaaatagatctctgtgaagtaaaactttttctccacgataatgggagggatgaagtaggtagaacagaaccaccactccctccccctcctaactcagaataatgccttccagattacttgtacatctaattctatttaaaattagaaaacttgtagattctttcatctatcagtagaagtagagtacgttcatgatcattcccatagcagcatgcactggcatgtggcaatagaaccattctcattagaactgcaaaacacaactttacaataccacattgggtaattctatccttgtttcatgtaagcagatatagctttgtacttctcaatcgtcttttctttttgactgccttattttttattttaatttcatttgatatatggtccacgttaaggtctgcaacccataagattgtgttagggaggtgaatgcatgacatgcaattttcaatacagtagctctacactggagagaacatatatcagagaaaaaaaagttatcatttcagaacagcatatatgatagtaagaatagaaaattcattaatttacacagtaagcataaagggacatcaattacaaagtaactgattctccagaatttttctctttatggaacttatttccattgttagaatccagatactatccctttctgactcccatcattgatgttaagttttagactatatatggagctagcttatcagaaatgtattagtccctaagtaatctacccaacatctcatcaagtgtaataagcatctgattttcttcttgagcaattattttatatgacaaactaaaatgccattcaacaactagttagcagaactaatgttttcttagtttacagtttattcgtgtcaaacttttttatttcatggaaaaaaatttaacttcaattcttccgttacagattttgacttatgctcaacagtctagagaaatttccaaccatgagcaggtatctctcattgaaaggatgctagagaacaaaaagcagtttgatcttgaaactaaagaatcattacatggctctcataattctacaaatggagacagtatgcagccttttgcttggcgatcccacaaagagatagaggccgtgatgcaatctgctgcaaagggaaaggtgtttattgctctcattttacttcagatcagttataattcataatagttattctgataattatatctattcaaggtacaaacgattcgacaaggttatctttcaaaacggtcctccaatttgaggggtgattggaaaagaagattttttgttcttgatagcagaggaatgttgttctactatcgaaaacaatggggctggccagtgagttactaactaaaagaaggtacttttaaatgattatgccttttcttttctgcttatgtagatgttgactataaatttcagtctggaagccagtctacaccacagaaaaagggctccttcgaaaatggtcatgggcttttgagtaggttgctttcatctcaccatcacggtggtgcaaatgatgaaagatctgcccatcacacagtaaacctgctgacatcaacaataaagattgatgcagatcaaacagatttaaggttctgcttcaggattatttcaccttccaaaacctacacgctgcaggtatagcatgagcatttggaatgatgaccctcctcatgtcaatgttacttttctttatcttagatcttatatgtctgttttgttttatgatgcaggcagaaaatgccattgaccgaatggattgggtggaaaaaataactggagtaattgcttcattgttgagtttccaaggaggacctgagagggtacatacaatgaatttttcatttattgtgaagcttctatgggagtttctatgtgtggtaatgataaaatccaattattgtgtcagaatctctctgaaagccccacaggaagcgatgaattttactctgctagtgatagtagttcattcagaagttctcccgacgttgatcacaaagctgttgaagatcatttttcaaagatgtatcacacaaacaatccctcaggtgtctcccgaagtttcaaatcacataaggatggttggaaaaatgagaagccacttgacatactaaaaagagtccgtgggaatgaaatctgtgctgattgcggtgcacctgaaccagattgggcatccttaaacctcggaattcttatttgcattgaatgctccggtgtccatcgtaaccttggtgttcatatatcaaaagtaagcaatcctattttgcattcatgttgcctagttcccatatgtgtcgcagcttttcatctaatggatatcaagaaactgttgtctgattgcctcactgttgcacaatttcctactaagttatcttagttatccaaagtggaaatttaatttgaatataactgaagtactagacatatttcctcttaattttgaaaatctaaacgttggagaagttgagaagtccctataaaaggttttccacgtaattggttacggtataattgcccagcagatgatagaaaaaaaccgaggaacatttatttagttgatgcttggtgagcttaaattgttctcccttttgtttatttactcaattctttctaaacttcttgttttgcaggtaagatctctaactcttgatgtgaaagcctggcacaattctgtcttaactttatttgaatcactcggcaatatctatacaaattcaatttgggaggagctattgtattcaagaagtaactatcaggctgatggtgtgcttactgggtgagtacgtttgacttattctgaatataagtttgtgctttgctttttgagttactcaatttcttcttgcattgtagcccctccaaacctagcaagctgtttttcatgagaaagccatgtcatgacgatcccatatcgttaaaggagagattcattcatgctaaggtatgagctttcttcctctcaagttatttttatttgaaagtttttacttatattcagaaacaattgtgcaccaactgttaatagtccacaaatgtgcaatctgctttcgttttttagatgttctttcctatttataagcggataaacttttacgaaagtgattaacatttgttagtttgtgacttagattcattgcaagtttctctgtaattgcagtactcagaaaaagcttttgtccgccaagccaaagataataaaaaactctattcattggagcaacaggtgtggagaggtgtctgtgttaatgacaagaaagctgtttaccgatatattgtttgcactgacgtagatgtgaatagtaccagcggtggacaagcactaaaatgtacatccttaaagcctgcaatgtagagcatttagcaaaagcaagaaagtcgttatcactaactaattgctttgcagataattctcgggaaaagtcttccacaactaatttgattccattggaaaaaaatgagaaacttatagaggacatccccgaaggctgttctttacttcacctggcctgcataactgctgacattggcatggtagaactactcttacaatatggtgcaaacatgaatgtttctgatacaagaggtcagaccccgcttcattattgcattatcagaggaaagtatgcaattgcgaaattacttattacaaggtgtgtgttttgtctgccttgaattataatgcctgcagcttaatgcatttacatcttgatttggaaaatggcacttgattctctactcaccatctacactacacacatttcattatattttatatctaacatatgaattatgcaattaagtggacttggaaactcttttagtttctactctgattcaggggtttcccaaccagtctttactttaatgtttgtcttatatacttttgtactcacttgatcttgattccatctctctttttttctttctctttttcttatcgaacgttaaatgttgtttctgtcataaggcgcattccaagtattttttaccaacttctaattgcaggggagctaatcggaaagtcattgacagagaaggtaatactcctcttaagctcttcaaaaaaatcacacttcattgacaatgagctacttgctcttttagcagaaatagacagatgacaatgtgagatatgatgaaaggtaatttcaaaataatgtattcaaagatgggatggcaacatgtaaatataacaccttcatgaaaaactggtttaatagcttcttcaaaccttagcagtaggagagttgaagagttgtcttgctcggtcacgagcttctttaggtccgtgcaagtttacaccattttagtcctttggactaaggggataatagtaggcattgttaggcctgtatgataataggtgaagtgtattatcaatgtaacttttccctcttgaaagaaaattcttcactctatgttaaggagctttagtaagtctatagcaagaatacttgtcaagtgtgcatatacaccaatatgagagatttttttactgtcaattattggcaactcagaggctcgaattttgacttgaaaaaaatacaaggcaaaccagttcttgaatcttgatgaaagaaggacatcaggctgaattttgacaatgtatcggtttttgcttttttttttttcttcttcattgtttccttcttcctttttctacaataaaaccacattatatgagttggtttaagttactgtaaagaagaagaagaataaaaaagaaagattatatgttgtttgtaacatctccatatccatagttatatggataagatgttaaattcctttgtagattttgtattcaagtcctaacaagtatttttcttattttctgggactaaaatgcaacttcagaaggaattttattaccattatcaattaaaacctatacttaacctgattgatcattttcttaattattattaatatttttccaattaaataatttcatttcttcttacttattcagttcaaccttggtaagggaatattgcttttgatttaataaaaacaattggtaaaatagaataagatgccaaacccggcatggcatgcattggcacctacttcatcaacttttcttttcattcattttaattagtcattataatcataatctaatctaggccggtgtattcaatgttttccactcaagaaactgtccaatatttgagctacaaa

SEQ ID NO: 185944 - DNA, 1166 bp, Cannabis indica
tctgaaagtttctgcacttatcactgctactcgattctgggacacatctatacttcagaattatttcctggatatcgacattgagaagattcagagtattcctttatcaatctttccaaatgaagatcagttgatttggcatcatgagttttctggtttatatacaatgaaatcaggttattggttggcttctaaaattgcagatcaaacactttcgtcaggatcatagcaaactgatcaaatgtggaagtttttctgggctttctctctgccttcgaaagtcaagatttttttatggaaggctatccacaattgtcttcctgtagcagctttgctatttaaaaggcatattagtaactctccaagatgtgttctctgcaatggtgattgggatacagttcttcatgctctctttcattgtaagaggcctaaaacagtttggcaaaactcagccttccatgtcaaccagctctcctctagcagcagcaattttcaagaattctttgctcacatatcgggcatctggtctcaagttgaagtagaaaaattctcttgcatcctttggagtttgtggaatgaaagaaacaaagaaactcatggcaccaaacctaaaccagcagagctcattcaacattcggccatttcttttttggaggattttcattctgctaaattctcagtcaccaacagtaataaagaaggtgtatcatctttaagagctatggatacaccaaaatggctgaatcctccgtcaggaaaaatgaaactcaacattgatgccgcttgcaatactatgaatcaaaaatatggttttggagccgttttaaggaattccttgggagaaatttcggctgctatgtcaaaaccttatcaaggatgttttaaacaagaagtaatggaagcgctagcaattatgtttagtctgcaatgacttaaagatttgaatctacctattcactacattgagatagactcactgttggtggtaaaaggattgcatactagttctcctagtgtttctgattttcatagtttgcttcatgacatttctattcttatgtccaatttccatggagttcagatctcacatgtttatagatctgctaatactgttactgattctttagcaaagtatgctttttcggtgaacagggaatgtttatggt

SEQ ID NO: 185945 - DNA, 3447 bp, Cannabis indica
ggcaatagatcttcacaagctgcttttacagggtcagattgcataactaagacgtgcagctttttatctgtctttattatactttcttcttcttcatgctgaaggttcacagacaatcctcctagatgttctgtcttgacttcattcactatgcctcctgtgatcttattttcatttaacaaagaatcacttgcattgggtttaacatctaaaatgtcctcagtatttacttccctttcaattggtttcccttgagttggtttgcctccttccctgtctgtagctttctcacttgtcaacgaagcagagatcacaggtgaagttaaactgacatccttactgggagattctacaagtccggtgtgctcggatgtaggtttatggacagacagaaacacagttttatcttctttatccttagccacaacattatcagattcaccagcatgcttcccattctcattattagcaacaccagtggacatgcatttgtttgtccaagctcctctgctaaatttttacctttacatcattgcctgtagaggagggttcaactgaattgtttctctgaggtgaagcaattggagaaaccaaatcagatttggacatctctctagcagcaacgctggcaagcaggttcataccaagatcatcagcaacagacatagatccattacctgcagaatactttacacagctttcaactaaagcattcaaggaactacaggaaggttcttgcagattcccagatttatgctcatttccagatgatgaggatgcagtttttggaacttctgaaaccttctttgtttcatcaacagtcctacagcgttcttcgtcagtcatagcagcgggtgatccatcgccttcatcagaagcagtaagcacatctttaaaatcattactctgccaggactcagcatttacatctgaagcaacattagctctataagcatcggttttgtccttaaagtcgggatcaaattcatcgggcttttctgagatcacaggagaagaagctctgctactcctgattgaagggtcttcaaatgaacctccactgctttgtgcaggactgcgaccacgatttggaatcttcactattagtttatgagtattcccgtcaacaatagtcctctcaagcttgtcactagtcaatccagaatttgatgatttgtctaaaattgggttcttatgcaatgaagaacttttgctagacccagtttccttttggttccctgtaagagagccttgaaatccatttattgatttacgaggtcgtgaagagccaccagacaccttattcgcattcattgaaccagcactagagcttcttgcatcatccttcccagaaacaactccagctctgttatggtcattagagcacgattggctgttgttgtgagattgactagaactgctgctcttctcatctctagtggctgtcaaaggaacatcagacatgccaccgctggcatttcgaaaatgaccatcttttatattgttaccagttgatacaggcgatggaattgatttgacagaccctggagaggcagaagcagacctagtagtactctcaccatggactagcttaactgaaacagatttggaagcagaaacctgtgcaactgagctctttacagcaacatcagacggtccacttgaatgtctgtttccaacttcaggtagacgtgatgatctcccagcccaggagacagcgtgatttgagccagacttaacatcatggatattcatttcagcttcaacccgtttcttccatgtatccaccagacttctggatttcttttggatttctgagtttttatgagagcgcaaatgattcacagactttccaatgttacatgtttttaaagcatcaagattcacaggcagcttatcaagtgcacgaagtaaaaccaagagaaactcctcaattactttatcaccatccttcgatccaatactatcaccaatcttccccttatgaatttcctggagccactcatcaaatacaggcaaaccacgcagctccacaaatctgctaaggcaatcaaatttatctgtggctgctacagctccagcaagcattgaccgaccggccaaatctattttcttatcatttctatcaggaagcataagctgcaccaatttttcaactccttcattgtcaacaagccctcctttgtcagttatcttggatatctcaaattttaaaaaactctcctgtctacagttaccagaatccccatcctctgtttttgcaaagcgttcccgtttcaaaggttcagagccctgctctattcgctctctcttcttccccttgacttgagatgaaaaggaagacaaactgttctggttactctctgagccagcttttaactgtgaagttgaagttggaccatttgatggctttggagatcggccacctgactgcactgttgcatgcattactactcttgttttatataacaactgatctacttcttcctgtcgttcctgccaaaaataaagagcattacttacaatcaaaagattcctatctatgagaaaaaagcaagaaaaaagaaagactgccctagcttacattaatataatcttgatccgttagccaccataaacacttgtttgtgatgtcataaagccttcggcacacaaaagacgaaataccagttggaagttcaacacctttaggaaggaatgcaactttacatggatggagtaacgacgcagcaggaatctcatccttatgaaaggaattagaaaatttcattcggtgcagcatccaataggatgacctttaccaagctttacttcagcaggacgataaagccaattttacacctaatttcaacttattatctttgcctgttgatacccaacgaattattccaatgaaaggaggtgaatcttgtgggggcttaaacagagcacagtcaccaaccgtgatcttccgtccgtcctatgaagaaaatcagaaataaatcaatattatgagaaagagaacatgtaaaggtataaacccataataatacaaaatgtacaaattcccctcccctccctaataataatacaaaatgcacagattcccctcccctcccaaatatctagaatattcaacaatagtgtattgtgctgctttcagcagtagcatgtaatcgtaaagaatccctgcttttcaacatcaatagatgttttacagcttctggccataatgtatgcaatacgatttacatacttattgatttatgagattatcgatgctattattcaattagatataaattagtagtaaattactggtaaatcaatgaatttatgacacaataaatttttatcctattctttcaatcacacttatttgtaaaactgaggattgacccatacattactggtaaatctacatctcaatgtatataaaatgtggggaagttaatttctatttcatta

SEQ ID NO: 185946 - DNA, 3578 bp, Cannabis indica
aaagcgcgatgaagctgtttcagtagaaaggaacttagtaatagaaagaaagatgtggagaatgtcaaaaaaacattagagtctcttccatataaggagggtcagatggaagttttacaaaaagtaaagcattttatcaaaccatagcattttacctatgtaattcaagacacgtgaatatttaactagtttggctatcaagtatattttatatttggtattttatacatgtttgcatgtatccagtttgatttgtttaaacatttattttgctacaggaccgtgcatctgagctagagtgggtgcagaagttgaaggatgagatacgaaatctttcagcccaattagctaatgttcaattcacatatcgtgatcctgtaaggaattttgatagatcaaaggtgaaaggtgttgttgctaaacttattaaagtgaaggatagctctgcaatgactgccttagaggtcagtcatttatttgatcttatttaatgttaaaaatggtcacatattctggatctttgactctaatgttgattaaatatacaggtagcggctgctggaaagttgtttaatgttgtcgtggacacagaaaatactggaaaacaacttcttcagaatggtgaacttcgaagaagagtaactattatacctttgaacaaaatacaagcacacactgttccagacagagttcgaaaagctgctgtcagactggttagttttgcatcaaactctttgttctctcttagcttttttatatgctatgatggtgtttatttgtcttttgcttgacaagttttgttatacttttttaggttggaaaggagaatgcagaattggcactttctttggttgggtatgatgaagaattgaaggtataagttcatttgctactgttaaatgacatcagatagtattctttgatggtatatgttatgcagcgtcttgtgctttctgtagaattgttagaatttcattattctaatgcaatatttttgaaaattatatttccaaatgattttttttgtaatctattttttcttatacaggttgcaatggaatatgtttttggttcaacatttgtttgcaaaactactgatgctgccaaggaggtatattcatctttgataccatgttcacatgtcatttctggaacagtgctatttgaattgtagtagtcattatttcttcagggacggtacattgtcataagtggattggtttgaatgatctagttctcttgatcagtgtattagcattccaggcttacttcaaatgtgcaattattggataatacttcggtacaaagtccaactagacaaaatcatcttcttagttctgattttacctacctaataaatttttgcaggttgcttttagcagggaaattcgcaccccaagtgtcactcttgaaggtgatatattcaaccctagtggccttttactgggggaagccgcaggtaagttacacatgccattctaattcagtttgcagaatatagtcccttttaatacatctagcattacaggggtggtggcgatttgttacggcaacttcacaatcttgctgaagctgagataaatctctctgtacatcagaaaaggctggctgaaattgaagcaagggtaactatttagtacctcattttttagatgatagtggtaaataggatactcaagatatgttttcttgtttaattcaactaggtggtgacattttgcttgtcttggcttctcgtgaattgtgaaaaattatatcatttgcgtaccatgttttcgaaatgatcatcgactattgctttgtgcgtccttaagtacatgatattttctttttcaacattctgtattcctgatttggggtttgagattgccttttttattaattttatttctgcttttgattattttttccctcattgtattttggcgttacatgcgctttcttggtgaaattattcactatttttggggatgggtgcatattcttattgtttttaatttcaagaaatccatttattgggactttgactcagactactcacatactcattaaagcactttaggtcttctcatatggcgtgtttgatgataatattggtcaatttatgtttttttgttttattattattattattatttttaatgtgatcaatattattcttaattgcttatgcacgcccacttatcatttactttttttgaattgcagatcactgagcttctgcctcttcagaagaagttcatggaccttaaatcacagttagagcttaaattgtatgacctttcattattccaaggcagggctgagcaaaatgagcatcataaggtttttcaccaccttgtatttatttaccaagacattatttggacattatctcattttgtttgctctgtggttttggcatgtgccacctagcttggtgaattagtaaagaagttggagcaggagcttgaagaggcaaaatcttctgccacagaaaagcaactcttgtatgaaaattgtgtaaataaagtctcagtacttgagaaatcaatcaaagaccatgataacaatcgtgagggtagactcaaagatttggagaaaaggatcaaaactacaaaatcccaaatgcagtcagctgcaaaggatcttaaggtaggtgttagtttttccatgttataaaatagtattagagatgagattctgttgaggtcatatgcttttcaatttcacggaattattgttgagctcattccctcgttttatcacaaattatggtatgcgtttagtgtttcttttaattgagctgaacataaaaatgctttgaatgatcacatagtctgagtttctgggaggtcaatattattctgacttcctgaatctaaatgctatgaaatgacagcttggcattatccttttttattttatgacatgagttatgtgctttattagtagcatttcatggacaagtgttcgtcctagctctttgatatgttatggtgtgattgcacatggccagggacatgagaatgaaaaggaaaaacttattatggaaatggaagcagttgtggaagaatgtgcaactttggagtctcaactgtcttctttgagaacacaaattgacaatctcagatcagaagcagaagaacagaaagagaaggtatagactttggtttaccagttcttttgtgtgatgaattcataatgcatgccttatgttttgcaggtcaattccacgaggaacattcttgccaaggcacaagatgagcttgatttggctcgtaaaaagatgaaggaatgtgattcacaaatcagtagtattattaaggcacagcaaaaactccaacataaacttagtgagacaagtcttgaaaagaagaaaatggaaaatgaggtgatttgtaagagcttgttttacattgtcttctgttttttgttttgaaaatgtgttttaagaaatgagaacctaaaaccgtttttgtagttctttttttttacaaataaaaaattaattatatatttatagacagataaatattttaaaagtttctaataataagacaaaataatttgaaagaaaagtgatgaaaagtctagaa

SEQ ID NO: 185947 - DNA, 2761 bp, Cannabis indica
cgaatgttaaaaaaaaataaaaaaaaaaacaactcaacctataattattttgtattatttgagggaagtaattcttcaaaagttgttgaactattagataattggcctataataaataaataaactttaggccgcacaaaaaagaaatcctaaatgccaaaaaataaataaataagaaaaagagaaaaagaaaaagaaacaaatcccaaaatcagatctatcactactcgactcccacacccacgaaatcccacccagacgaaattacaccagtcaacggtggagtaaactccccggagggaaagttggaggaaagccggtggttccaatggaataccaagtcagatctgcccagtctattcgacttggtccctttatggtatgttgttgaattttttttgtttcgtccaactttgttttgttatgaatcttccaagcatttctgttaaaagggttttgaactatgtttgattttgggatggggagtttgaatattctgtatttatttatatattttaacacatattgattattgaatttgactggtatatttagatatcagtaactcctatccattccaattatattattattttatgtataatcatttaagtgaactagctctatgtgcccgataaccgaatttaaactctgggtttgatgatcttcagctgcatttttgtgttaatttagctgttctttattttaatttagttactagttatgatcatgtgtgtgaaatttgattcattttctcattttccagattgtagatatgaatcatgagtgaatcaactaggtattactagttttggtattataattcctagttattatggctacaaaaagattaaaagagcagcatacaacagagggagacttagaaccaatgtccatggctgaggatagaatatctgacttacctgactctatcatcattcacattctatcttttcttccaaccatagttgccattcggatgagcctcctttccaagcgatggagacgcatgtggagtttgattaaagtgttaaacttctctgtttcaagggatgttgagttttttagaagacccaataatcagaaaaataatgagaggaagaagttctttaactttgtggatcggtgtttgaatcgcccttatgctgatacaagcattgaaaagtttaccctcgaagtggaatactatggaggtcgccatcgaatggatcgctggatgagatttccgttaaaaaagaatgttagggagttagtcctacatatcaagcgagctagggctttgtattgcttaccaagtgctctacttagtttaagatcattaacccttctcaagttgaatggtttagagttaaccactggttctggttctcctattgtaaaccttccatgtttgaaagagttatgtctcttcaatgttgtaatgaacgatcaagtattgaacaatctactgttgggttgcccttgtcttgagaagcttcatgtacattattgttgtggtctgctaaatccacaagttttgagtttgagcctggaatccttggaatactatgaatgtaatagatattttattcagacattaactgttgaagctagaaatcttcaatcttttgaatacaagggagtcagtgtgagaaaggacagctgtaatgtcaacctttttcattgtgtggcgattaaacatctctcattttctgatgtttgtatgactggtcgatggtttgaagatctaattccccggcttaactcccttgagagtttaaaaatagattcttgctacggggtgaaacatataaatgttaggaatcaacatttaaaagaacttgatttcgattgccgccttaatcgaacggagttgacaacagagattataatcgacacaccatgtttggaatccctcacttattctggttgtttaacatttagaatttctgttagcgcatcaaatttgttgtatgctgatatcaatgtttgtggacaacttgataagactgcttatgatatggagtggtatactagtctaataaaatttctttccgagttcaatggcaccaagaatattagaatattttgtggctccgaaaaggtatgtctgcacttgcaatcaatttcattcattttcatatgctgtctttggtttaattaacgagtaagtattgcaaatatgattttcaattctttttttgttttaagtttttgttcatctctatatttcttgtggttaatgtgtataggctctcatcattccaaatgaactaagagatatccacccttctcctctatctgatgtcaagtatttgaaggtaaagacagctcttccattgtttagaaaggaaatgttcaggaagtctatgcattggatttcaccttctttggagacattaacaattgaatagttgtatcagatttggccttctctgcagagtgcagacattagcaatagagttatttgtatctttcatttcttgagttgcggatgtgagctcactttaattatgtaaactaaacttatgacttcttaaagagttcctcatctcatgactcatgatgatatctatactaaattcattctttaagcaaaccatattaacttgtttgattcgaaatcatattatagacaattgaaaaatttagctaagatcccatgaatttgtcactttaaaataattagtatttttttttttggttgaactttggacactttcttatcttttaaaatatacagcttatataattatgctatttctattaggttttctttctt

SEQ ID NO: 185948 - DNA, 11259 bp, Cannabis indica
gttttatgctgcttgagaacttgattcagggcaactttttgaagcagtgtttgtacacagtgatcaatgttcaatagtatttgtaaagaataactgtgttttgttgcactggagacactgctactcacctgcttttagtgcctgtgtgtgtgggatttatgtgcaccacacacaccattactgcctttggctctataactgtgggaatttactctttagatttatatggaatacagatccagtctgttgtattctgttttgctttcttactggctcatgccatgtttagatgaaagtatgaagacacggcttgattaccactggttgattggaataataattgaaattttcaaataaaataattggtgtgtcttttgcttccatgttttgcttggatggagcaactgaattatgcatgacatagctattagctattattatcaagctgcttccttttcgataatttttggagatatcccactcttcgaagggccaatcctttgtttcaaactaggccaaagcctcttcgcatcttggcaaagaaagatggaaagatttctcttgttttgattagtcaattcatgaaacttgcaaatagaactctagcattcttatgtgaatgattttatttgaatagatcatgagtggggtttctaatgatcatcttctaatttcatcagccgagaattgttcaataaatggcaagcacaaagatggtgggcagaaaactatgacaaggtcatggaattatacaacgttcagatgttcaatcaccaagcagtcccacttccaaccccacctagatctgaacaagaggtaaatatacatatttgtttacctttgcaaaatgtgttatcacttatcaaaggctaatatatatattttttgaaaataatcaaaagctaatattttttatttgaataaaatcaaaatctaatattttttttgaaattaaactcttaaaaaatcaaaatctaatattacacttttgtatatatattttctttagtacaatatagagatgcttgtaactgtttgaactgtcaaggaagatcatatatgtcatatgttgcacatggacttgaaacatgtagtactgatggatagctttatacaaacaagatctttattattttcttgaagagtgaagaattagcaaattgaataattagttttcatatgtcattaatgatcatggttcactttctggatggattgatgtttaaatctctcttaatctttcagagccctaagattgagtctgttagggacagccctatgactcctcctctgggcaaagaacgcttacctcgcaactttcaccaattggggataagctactcttcatcagagtctcttgagcacaacctcatgcaatcccaccactacaatgatccaggggcattagcttctacacctaaactttccagcattagtgggatgaagactgagacatcttcagtcgatgaatctgcaaggactagctcatcgagagaggcagatcgctcaggggagctctctatgagcaatgccagtgacatggagaccgaatgggtcgaacaggatgaaccaggagtctacatcactgtcagagcacaaccaggtggcactcgggaacttagacgtgtgaggttcaggttagtagttgctcacactattttgattatgatagaattttgaattggtatcatctatgaattaaaaggtgagctgttaaaatatttttgctacagtaaggattatgatgttataatttaaacaacaatagctgttgagattactcttcacttttatgtagtctattgttccacttttacttgttttactttccacaaaagtagaactcagaaattttatcattgtcatcagaaactaaaactcaccccgcataatattccatttcagccatttggcttttctttttttctctccatttattgttttttgcattatcaaataggaaacagactagtacaaattatttattttggtgtatgaattatgtcatgcagccgagaaaagttcagcgaaatgcacgcaaggttatggtgggaagaaaacaaagccaggatacaggaacaatacttgtaacttacgtcattttagacatggacatgtgagactgagtgggcatcatcaaaaaatcaattttagaagcaaatgaagaaacaaagcaatcatatgtcaacgtgccctaattttcttacttttatttagttgagcatatcataaatcattgtgaattatgtttattttttcttgggttatttttgttttctttagtggagatgatgccgtgcaagtcataataatatctgtgcatataggtaagcctgaacaggtgggggaaaatgaagatggtggcaaatgttaactttgtgatagtgaaatttaattcatagtggggatatttcatcaactttttatctgatttataaacatgaactgtccgtgtcagtagatgaaatatataaatctttgttttttttttattaactataaataatattgttgtacaattgaataaagcctattgttgtgattgcctatagttaagcggtgagtactgtcagttttttttcccctacggtttatatatagtatttgggaaaagtaaaattgctacggttttgttattggaagttttcgttatgtcaatttggcatgtaatcttttaattgtctattgcaaaattttcaattatcttctttcttttttcttttcagtcaagtcctcaattatttaagaaatttaaaatcttttatttaaatataacacatttagctttactcattttttttcttttcagttttttgttatttttagtttttttatgggtgtgttatattattataaatgtctttttaaatcatgtattcaatgttttaattttttttttctctttgtttgaagcataaactagagaaatcaaatgtattatatttttgaaattgattttttcattaaaaaactaaatttttttattaaaaaaaattaattttgattatattaaaataaaatttatacatggatttttaagtttttttttctcatgatattttttttatttatgatgatttgtcttatatttttaacttatttaaattttttaaatattatatttagtacaattaagtttgcatactattaaaacttttttttccaatattttttttttattatatcccattatttaatgacttaattacaacaaaaataaaaatatattggaaaaaaattgtacaatcagaatacgataatcatgtaattaaattttgttttgatccatatatacaaaaatattttttatttccaaacgagaagctagtggatctatgccaaacattcagaaatgaggaaattattgaaagcatgcacaatcggaatgattgtattctttttaaagctaaatgattgtattttgattaataactcaataaatcattaaatccatgttgtcatattttttctattttttttattgatatacggaatataaattataattttttaagaatttttttaactatatttatagaaacaatatcaaaagtgtagtataaatattttttgtgaaaataacgtaaaaaaaaacaacggtttatatttttgttaaaaataattctaatccataaaaatatttaaaaatgggggttaattatgaaaaaattcctttaatcattagctaagtgatttatttagtttcgaactggaccaagcgcttgctaaatgggccgaaatatgagtaaatgggccgtggaaaccaattaacggtcgccaattcgggtaaattcagtattaataagattggacttaatggagaaattagggttataattacgttaattgtaatattaagataaattggtgtttcccaatcctgacaattaaaccaattaaaagagaagaaagaaaactgcttagagtggttctacttggtagtcttaagtagtaagtagtagtagtaacgtttttcaaaaccctcgcttccaaccttcccccacttttcctctctttcttcttcgaatgcttcacaaaaccctagccttgcttttatcttcatcgtcttcttcggttgcgttagggttttgattttcttcttttatatatagatatatattgttttgtcttttcttctattttgtatttggaagggagaccaacgagcgcgcgagcgagaaagatatggtctctgcctcgcgaatcgaagttgggcctcagatactctcggcgggagtacgcaaaaccatccaatccatcaaagaagttgtgggtaatcactctgatattgaaatatactgggcgcttaaagaaaccaacatggatcctaatgaaaccactcagaaattgctaaaccaaggtgcgcctttacacttttctctttaaagaacataattttgacttttcccccctcggttttggataatgggctctcttcgttttttttttttaactcttatttgcgtttcagccggttattgggattcctgagccttttgtttacatgtccatgagtaatgcattttgactgtcgagctggttatatattttgcttacatacttaggtttctgtaaattaattttaagtctggattgtaagacaattttttggttctttccccatggccctatagggttgaataattctgatttttcttaatgtgggggttgttgtgacgattcatgcaaaataaatggctttagtattttagctgtttaattatgtcccagcttgcagttacatttttgttgcataattatgatattactctgcttactggctgtgtttggtcgcattgtgcaatatgtgtaaggatatatgttgggaatgattcgagttttgttagttctttgctgtcatttttttttcgttttgtgcctcttcttggattggaggttatcacttatttgtgagtcatcatttgtgaccacccacccatttatgaattcattgcatttcttttgtgaactcaactttttccgtctgtactgtaaatttcttctgtatgtagagattatttaaagcatgtcgcactcgcaaatggtaccatggaatttatattcacactgtttcttttcatcatttgttagtttatttcttgcatacgtttatgcctttaaaaaaacattaatgtaactttttaattgctgaattctgacattgttcccctgatttacctcagacccatttcacgaggtgaaaagaaaaaaagacaagaaaaaagaggtaaattatgcatttctaaatcagaattactacattctgttattactgtatcaagatttcatgcttctatattggaattagactgtattttgcatgattatgtgctggacattctaatgtaaacatcagaagcactttttagtggttcctttgaaaaagaaacaacaaattgatggcttagctaacctttgtggagtatcccctttgggaccagtcgggttggggcctgtatatctgccgttatatttaaaagaatcagagtaacttctgttaatgtcttcatatgaattggtttttatggggttatctagttgtaaggagtgttggaaagtgctttgtaaggttcgaatccccatagactcacaaactttggggctactgggagttttattggtcaaactgccatggtcaaaattgcaattttttttggtaatgttttttaagctttgtgttttaactacatatatattttcactgtctagagttgatacactatggacataattttttagtttatcgacatattcatttcaagtttttctttgtttgctggactagggaaatttatgccactttcaaacacttctggttatagacaatgagcaatgttgggagtaaagtgggaaaaaaacatctttgtttctttgtttagttgatagtaaaatgatatgaaggtttagtttagcaagcaaatgttttcttttggtgtctcattgattttctaacatatgataattgcatatgtttgttgtttggtaggcatcataaatgacaatatctgcaaattggtgaagaaaaatgtgctttaggaatgttgatgatgttttactgatggatgttatattcatgcttgtggatttagagtgtagggtatgaaggttcaacggagccacggagacattctgagccagtaggtcaagaagtgaaagcaaatacacattctgatcgtaattctcgcagaggaggctactctcggaatgctttgcctggtaaataggaagtgtttaaatactaatctaaatacaactgtatttatgtattacgtatatatatacacatatatcattttaaacttttcttgacctggcattacatagtacatagccaaaggtctcactatgtgcgtttttatctggtttcttttgaaggattctcgcactaataaattgtttaagttaacctgaaaagttttcttaaattattgttcttcaatttgagatgttactccactttcccttatttatgtcaagtttttttcttgttaatcaaaaaagagttaatcttatggtcatagacatagcctagtggtttcaaacttctcatatataggaggtttctagttcgaatccccctctcccagtgtcaaaaaaaggttaatctttttatacatgtaaatagcttagtagacagtgacctgtttctgtttaagttatttcttgatcctttttgtttgtttgtttttatttgtaattttctttgtagtataatttaatcgttgtcttgttgaactctttttgtttaagatattccttcattgttaattgttttcatttaaattttgcttgaatttttcaaggaacttattgtttgttagggaatctcgccaattgctctgtatgatgttatttcaattgtttgacacataatcatattttatgcaggagttagcaaagagtttcgtgttgtgagagacaacagagttaatagaaatatcaataaagagtcaaagccagtggtaatgcctgctgcaacatcaaccattgagaacgtgtctagtggttctgggaaggggtatgtcattacatttctgtgctaacttactttttcttttatttaaagaatgcctagttgtgttttactgcaatatcatttaatttgttagtcttaaaataagcaacatatttttacggagttaaatttttttattatacaaccagctgagtaagtcctagaggctagaaggcctattatccttagataaagtattggaatgatactcgttagttttgacaaaatggtaaagaatagaaaattctattaaaatgtcctaatattgcctgaacttgagctgcttaaagattcatatcgtttacagacatttaattacagatatctaagtgcatttttgtgtttagaagaccctgtgttcttgacctgttgtgacttgttcacacgtatttaaaatctaagtaaatttgacagtttttgtcaaatgagatgtagtttatataaaagtgttaattatcaagtaggatctgcgactgtgtatagaattcattattattaccagatttcaacttacggtacctctttttgttgatatatgggttaaagtttttgtcattgtcatttgtgtgtacttgtgtttttctagttcttcttttgtgatgtttgtatttggcacgtcgtttatggttttttcggtctaaacttatctaaatgttgaaaaaaattacccatgaactttgtttcttgggagcctggtaagcataaatggaaggaagagacttagttaggtaaggtttgttactgtcctttgttaaaacatgtcatgctccagaggatatttgattgagcatgaacctgaaactacctatgttgaattttctattaatgtgatttatcacatcaatctttgaaggccactttcctattatgcctttgatatcctttcaattttttttttttgttatgatttgatttatttgttttcaaatcgtcttaaacatttggggggctgttacatgataactacttatttcttctgttgtcagttcaattggcagttcaagcagtcagaaactctctgatggcaagattttatctcagggtttgaataaatcgtttgattcccattttagaattgtccaagatattgattctagtggctctgccagaaaagaagtatctgaggaaaagcgggttgttcaggcagggaaagctaacaatccgcgatcgcagcctgcaatggtggcatcaagcagctctgccataggggtgtattcctcttccacagatcccgttcatgtgccatctcctgattctagatcttctggttctgttggtgctattaagcgcgaagttggggtggtgggtgttcgccgacagtcttctgacaactccaagcagtctgtagctggaagttctttaccaaattcaattttgggaggggagggtgctacagaatctttacagtctttcaatacgatatctaaaaaggatgaacttagtcaaacccatgaatccattatccctagcatgtctgttagcagatcattattaagtcattatggtaacaggcagccacaccaacaacctgtaggtcatcagaaaggtaaatcttgaaataatgtttatatgcaaacaatgtgtttatatatgttctaaaaagtgtgtttttgcacatagtatgtgttctgaagtattgtgttggctaataataggcccccattcatacatgtttataaattaggtagaatatgaaccatgtgttttcgtgcagcttcccaaaataaggagtggaagcctaaatcaagtcaaaagccaagcctaaatggccctggtgtgattggaacacccacaaaatctgctactcctcctgctcacaattcaaaagacttagatgattctaaggtgcatgatcagctttcaagagtaaacatacatgaaaatcagaatgtcatcattgcacaacatattagagtccctgagacagaccgttgtcatctgacctttggcagctttggaaaagatttcgattcgtctcacgatctggttaatggctttcaagcaggaagtgcagcggtggaggcaaatgacgaacatgctgcaaggttggtgtgatccctatgtttcttctgttttatggtcatttttagactattggaatttgttaagtccaaaatttgaatatttgggaatgttaaactcagacattaagttacttttataagtctgccagaaataatttaaatgtttgagacactctaccacaagttaaaagtctgtcagaaataaggtattttgtgtattatttaatgtatacccgttttatatgataatttgttgcagtttgtcggctcctgagtcaattactgatgaggcttctagcagcaagcaagtggatttgattgatgagaaaaacagaaattctgaatctgattctcaaacatcaggtgcagtgtctgacgatcaattggcagataagaaagagtcctcgagtcctccaaatttggatagttattcagatattggattggttcaagacaacagtccatcctataccccttcagagtcacagcagcagccagatcatccagaattacctggtttctcggtgagcattgttcagacttgtaattttttttgtgtaaaagatgatccttgatcttgatcaaatgtaccatcttttgttgttagtcaattggaaacaggttttttgtttatcttagtgatgatcagatgcttatatttaagaacataattatcatgtcttgcctaaggtttttctaattcatgctgttttacaagcaggcttatgatccccagtccggttatgatattccatatttcagacctgcaatggaggaagccatgagaggacaagccctaccatcgcatcaggaggtatgtttttcttgtttgatgtgttataatcaatactttagctactttcagcatggtaaagccaatttctctactggtttgattagcttacaattatattctgttttcttgttttacacttttacttctttctaatttcctttttggagttctaaataaaattcttgttggaaagaaaaaaaggtttttctcctatatctatttaaaattcttggtgaaattttagttttgctcgtttgctgccttaaagtcgtgttgttttgctctaattaattttttttctgcgtttaaatgttatgtgttaggatagcgtatgcagtgtattggtgtaatgtatctggttatgcatgtatgtacatgtcttcatgcatatttgtaacaacatgaattggttatgactgaattgtgtactgtcttcgactgtaggcgttgagctctcataatcccaatgttccctcatcaacaattgccatggtacaacagcaaccacagcaacaacctcctgtaccacagatgtacccatcagttcatgtttcacatttcgcaaatctgataccatatcggcagtatttgcctcctcaagtttatgttccaccaatggccatgcctggttattccaataaccctgcatatccgcacccatccaacggaaacagttatgtgctgatgcctggtggtggtacccatcttaatgccaacagcctaaagtatggagttcaacagtataagcctgtccctgctggcagtccaacagggtttggaaatttttctaatccaaatggctatgctatcagcaatcctggtgtcgtcgggggagcctctgggcatgaagactcatcacgcattaaatacaaagactgcaatctttatgttccaaatccacaggtgtgaaacaaataatgctagctagagttctcatggctttaaattttattggttgcaatatgtttgcaattgctgaccacgttgttaaaattcatcattaacttagtttattatgttacttggtgtgacaggctgagacatctgagatctggatccagaacccaagggagcttccaggtctgcaatccactccatactacaacatgcccgggcaatctcctcatgctgcttatatgccatctcatactggtcatgcttccttcaatgcggctgcagcacagtcgtcccacatgcagtttccaggtttgtaccacccttctcaacctactgcaatcgctaatccacatcatctaggccctgcaatgggtggcaatgtcggtgttggggtggctgctgctgctcctggtgcacaggttggtgcatatcagcagcctcaactgggtcatatcaattggacaaccaacttctgaaaacgaatatatgtctaacccctgggttgtaagggattgtgaagtagctat

SEQ ID NO: 185949 - DNA, 1017 bp, Cannabis indica
ttatttctgagcatttcttggtagtgtacttggattataaaggaataactataaatatttacttaatctcacattgtcttctcttaccaaaatgatccatctcttttttcttaggttctatccctatttatagggtttttactatgacaattattctttttgatctgatctaggtaaccgttcataaaacgtgaataatcttcacgtttcatgtttacatgtggataaaattaaataattgttgataatcgtcttttgatcttatttggatgtagtcttcttctttttgaggtagcatattctaaccatgactcgtgtttttccatcgatgttcaggaagctagtcgcattttgtgagatgctagttaagatatatattgtcgctatagcctttcacgacaatgcttagtcttagtcttctgatattctgaaataagttgtattttgcttatttcctttaatctttcaatatactcacgagtatgtgggtcaatgagttgcaagctcttaaagaactcataatttaccctttctaacgatactgtatcgatctgttacacccaaagagacttctatctttatcatcttgccatacatcgcttatctcattgtcttactgccaatgcataatacgagaccaatattgctcgttattagttatctcttttagacaattcatttataactgagttttttacaattttcgtgtccaatttttcacatgtcatgtccatatttatgactcaaaatatgggcataacaagtaataaagtttaaaaactatgtttctctgccttcttcattgggtttagttttaacagattttagacattgcttttctgaatttcaatttgctaatctttctttttgttcttgatcttcaaatattgttgttcacactttagctaactatgccttctcagaagttattagtaagatggtggtttggttatccttctcgtatccataaactcattttaagtgagattatttaatataatcatagtccactaccct

SEQ ID NO: 185950 - DNA, 897 bp, Cannabis indica
atatccaaattaggggttaagaatatacttaattggatcttcaaaatgaatctaagtcttataggcaatagtattagtattgcaagagtcatgaaagcctgctatatatagccatggacctaaaatcaagagcaataacacattaggcttattaatttgctttatttcatgtgccctgtagatgtagtactggagcttctctaatcttttctattgggctgtatatatacattagcattatgcatagataattaacagcacgtggatgtgggttccattttgttacatgacagtttaacaatatctctctctatatccttcaaaatatgtagtggttaggattttctttccttttattatgctactttcaaaatttgttgtggccagaaagaaaagttgttctcttcctcctccatcaaataactctctctacgctcaaatttatcaccaaataaataaatacaatcatattacatgatgtagatattttattgaaataattaatatcacagcttattagagtcattgacaatgttctgatattattaataagtctttatctatagttctatttactgaataatatataggcatgaaatgatagtttgacattttgattagctctctcgctacaacagtcttcatcagatacacatacatgttatatatgactaccagtgactactagagttggtcactttttagaatcagagttcacacttcagcgtatttagtctcaccttggttaataagttgtgataaaaattgttgggttctatctcaaattaaattgatgatgaatatatagagtaattcatatttttatatatggttcaatacttttatatttaatctatgtagaataatgttctctaataagttgtattttcggaacac

SEQ ID NO: 185951 - DNA, 911 bp, Cannabis indica
agaaaaacttccattaagaatcctaatggccaaagctggtagatttgatcttgaggtggatcaaatggaagtgaagacaacatttttacacgagttcttaatgaggagatatacatgactgcaccagaaggttttgacatgggaagtccagacaaattatgttttcttaagaaatctctatatagccttaaacattaaaaaggggatcgatatgaaaggattcgtgactaaagagctcaggccaaactcagaagataccatatgctacagtgtgataactaaagtgtcattcacttaatgatcaagaaagcacattgacatcaagtttcacttcatcagagaaatgatatctaaaagagagatttaagagaagaaagtcaacatcaatgacaatccaattgatgctatgaaaaaatgtgtcactcaaagctataagtccaaacattatttgatgctcaatgccataaacgactgctatgcttcctaaggaatcaaactcacttcagtctgtcactattatctagactggtttcttgaaactaaagggtagaatttgttaaatttagtaacaagtaaccaataaccagttaccattaacaggtgacaggtatgtgagttaggactactactttctagaaagaaatttagagggttgttaaaaaatttattgtgtttgatcaccaatattgtgtcatgtagaactaaattaatatgaagcaaagcttcctagtaattttgagattaatctctcaatcttctctttcgagttttggccctttagtgtttctaatttgtatatattgattctcattggttcttagctgaattcactttgttgaattttttgtttatgtcatttttgattgagagtttttgatgagttcttgcttgtggtgatacaagatcacaac

SEQ ID NO: 185952 - DNA, 12085 bp, Cannabis indica
aaaaagaccaaaatgaatatggtcaatgtgaccggatccaaagagtagacccgttcctttctctcctttccaatattatattattaccaaaaaaaaatcatataaatttagatttaatttgaattgtgtttccattaatggctttttttcttgggtagggtaaggactaaggaccgactctgactcggattccaaactctcttcactcactcaatccacgaccatgaatgagaggaagaagaagaagaagaactcgacgacgaagacggcagcggagaaaaagttcggcgtgttcgagtttgacgacaacgatatgaacatcgagcaggttcccaaaaagttccctcctcggaaactcggaatccatggaaacaagaacaaggctaataatgttcccgatcagtcccccataaacaaataccactttctcgaaatctgtaagtccctaattcaattcccttttttttttttttaaaaaaaaaaagtgtttgttttttggtacgagagagattctctctctttcattgttggttggtggtaaattggtaatgggcttttattctcttcttattttaatgtgaagctatttgatatttctgtgcatgggatgggattttaaacttcaaagcattactggtttaaaaaaattataaatatttgaaagtttactgcttcatgttatatatcgaagaactggaatcatggtagagaaaggggcttactgggtgacttaatttagaaataaggaaggttaatcggactggaaggttgctctttccatttatttatcttgctatgaatctatgattagttgctcatcagtttatttcttaatctgtctgatgtctttttttttacatgttatgtttgattgtgttaaaatatcaaaagggtggatggcttcatatcaagttttcatgatgtatattattagtattaatggtagttgttgctgatttctttttccctttctcattttgatgagaaaatattctttagattgttgttgtttatcatttcatttgaatttggaagaaactttatttctgtttattcatatacgtatttatcatttgaatgttacataagttaacaagattgatgagacaaaccagattggttgaaatggatgagattgaatggggaataagtttccgctggtgttttgtttttttttaaagagtattaaacaagtggagagccaatttttatttaaatgttgcaaattctcaattccagcttgcttaaatactttttttttcattgggtttggaaacttttaagtaaagagatgtttatatttagcttctataacaatttgggatgatctctattgagttggctgtgtgcaccataagcttcatttcctgccatgatggtttagagatgggacgattagcttaaacttgattgcatctgtaggaatttagtatgtatattctttttcatgaaatgtgatgtattggatttgtggtttgggattttatttattgaataatctgcttgggatagggttcttattttgaaaatgcatgcagaaatgtttattaccatccctggtcaacttatcctgagtggaagcctactcttatatttatttattctgtgtaagaaatatgtcatggaaccaaacctaacacttttgttgttaaatcatatattcttataatagcagtgtgagttagtaaaatttatcattttgcttaatatcagattgccttgttgagttacttctcgtttaaaaatttatatgtgattgttgaatatttctaagtttctgcaagtttcatctgcagttgcacgtggcactgagaatgtacaccaggatgctgaagctattgatgttgatggtgaaggtagagtttcttattgctcaaacctcacttttcagttagctttccaatattcctgtttatataattactccagggacaagattcctgaggcaggtagcaacggaatgttaagacgctcatccttattgtgtaggtttccactactcatattctgctgtatctccaaacaatactcgacttggagatagtcctgtcaaagtggagaactctggggtggatgcctatttgatatctagctcttcatctcataaagtaaatcgcgatcctaatggtggtttccagtacacatattctgctgtatctccgaacaatactcgactcggagatagtactgtcaaagtggagaactctggggtggatgcctatttgatatctagctcttcatcccatgaagtaaatttcgtaaccttgtttcttgttttaattttttatctctttccagtataaattataatcatataaattttggaggaattttaacttgattcagacatttaatttttgaataagtttcaattgaagttcacgattcctcatttagtcatctgtgatatagtaacgatattttttattgcagaccaagcgatctggtagaatatcatttgaaaccctcagtactgaaatgagctctttgtcaacttcacccttttgctatgaagagaatcaaagtttgtctattcttctcatgctaaatataactaatgtgtctgagattgtataattttagttttggcatacagttatttctttttttactaaaaactctccataatttcagtttccccggagaaacaacaagtacaggcagattgtggtggacataaacttgtaagacctcttcagttgtttatgttttctactacttaatttatgagaaaatcgaagtcatattgtgataagcatgtgaaacatagttaattgaaaacgaattgagtaatatatgctcttttttttttattgttctttgttgaattaatgactcagttttttttcttggatgtgagtacctcatcttcttttgtaatgtttttagttattaatgaagtttttttcttatgaaaaaagaatctaattcattgataagtacaacaataaatccctggggccttcttgtttttttttttttaaacaaagtggttgttcttgtttttctttcgtgctacaatatatgtacgtgaacttaaacctgaaccactcagacacatacattcatctacacaactacttgaagtagtcttaagtggcaaagttgatgatctagttacctttaagattgttgtacttttttcttgtgataaattatcattgatctttgaattagtacgagattggctttactcaacaattagccattacattgtattttgagcttgatttcggatacatgcctcaatgcaattatgcaactcatgtatcctcatatttatactgagacaaaattgagtgagacttgctgatgctgttattggtagcttttcggtatcaataaaaattgaagttgagtgttggagtttaaagctagtgacgaagtagagttttaggaggtgttataagaagtgaacaaaataatatagtacaaaggatgttctaagtcatctgtgttaagtcctacaaagggtataaaatagtaaaaatactgcaagccatagcaacatatagtacaaaactaacatttacactactcagacaagacctatataagccaccgctgccaatcaaacagaagcatgaaaatggataaatgttgaaactccttactcttgaaaatacaaagagtcacccacccgatgttaggatttctgggagtttgagatttagcatcgatttgttttttgtttgtttttaaatctcataaaaagcttctaggagttggttggatactaagtgtttctttactttatactgatgatggtagttcttaaccgacattttatttattatatcttgcaggatgacaaagacaaaactgttaaaatcttccctgaattttttttatatcgagacatacaatatatgaaatcttgcttaacattttcatgccactgcatcaaactagaaggttcccctttaactgggactcccaaaacattctcctttcagtgggctactgacgatattattaatattgaatcagattggtctgaatcggtgggttacattttctcttcctattcattacttttactttagaaatctaaatgttttctggatgcaggtcgaaactgcccttgttgtccttcatgttaagttaaatacttcaaaaatcaaaggaaatgctagtaaaacttcaggttagtgaaattgtggagctgcagtagtggaaatatttccttagctcttatagtttaaattgtgtctatgttattttcagattattgtatttttaacatttttctttaaaatttcattcctaactttggttcttttgttgatgattgagtataacatatcagagaggaatgtataagtacattggaatatgatcagcattgcatattaaaaagtaaaactatgtattggatggataaaaacttttcccgtgtattgtgtggttagaactttatgttttttagtcaagtgtttcttcatttatttaatattccaaattccaagagtatatgtggatcatttacttgtggaaatgaagatggatcaaaaaagaaaaatcatcgagagtaaattatatttgttgtctttgttaatgttccaagaagtagaaccatctttattttgctgtcaggaaatgtcttttagcaaattgatctctcatgtagtaattttgtttttgtcaatttgttgtagcagtaactatctgtcatacacttgcaggttttgagtcattgcggttttcagtttatgaccctgattgggccaagacactcgaagcaatcaaatcattaggtgtgggatacaacaataaatggaatattgattttgagtgcgttttctattgactcatgaaatacttatcaattttttccccttctctatttacttttgtgttgatagataactattttaacattttaatggtagaactgatcatgtatgaattcagttggagctgtattatcaatgacaatctgattattttcttgtaatttgttagaaattcaccttttatttctattttggtgaccaaaaagggcttaaattttatgttttcactatttgcaggggacactttcttttccttttctcatttactttcaaaaacacttttttcccctttgtttataaaaagatttcgtatgtgaatgtgaagcttgctgtatacttatcattttttctttcgcagtgataatataccaagtggtggaaaacatttgtttgggcacagttgcatgctctctcctacgagttccatatctaggtaagacgagataaaagctcttattatttgatgttgaaggttcaccggttcacccaaatatctatgactatgacatagattctgaaagtgctataaacctttgatactatttgttagtttcatgtccctctcctcaagaaaaatatagcttctgattgtgccatcctttaacacttcggttgaacctactcttctgtttactaactggtataccagagtcacgaaaataagacattttattgcagcaaagaaacacaaacacatccaggttaattagagagatgctgtttctctcctagagcttatgctcggtacaaataagattgaagatgcccaaacccttgcactcctaatttatctacatagaatttcctaataaatcggattctatgatgattctataataattatgattcagacttttcataaacatcttttatttccctaaatactcaacccactaagattgcctatgttgaccataggatgtctatcactaactgccataaattatgtaacttggtccgccatggtgctttttgttttccagttatgatgagcgttttgaagatgttatctatcctgaaggagatcctgatgcagttattattagtaagagagacatggagcttctagagccggagacatttatcaatgatactataatcgacttttatattaagtaagttttgaacaattcaacgctcttcattatgtcaaatatcaggtgcctacttttcatttttaacccctaaccggaaacaatattaatttataggaaaaactttctttgattgataaatggttttttccctttagctgtctctgttttttactactttccttctacatattctaattgaataagttaatattttaatatttatatgtttgcttggatttcccaaatgctagctcaattcatgcacaatcttaaagcaaataagtcacatttctgatttgataagaacttatttaatgcaattgaaccttactgcacccaagtttgaaaatagtaaaaataataaaaagtgtacggagggagggtgcttgtttggtatttcatgcattggttcatatagacatgttttcacgctgattgtaaagatctagtaaaagtttctctttatccatgtccatggaaattttgatttagcttaaatgcgacacacatgaaataaactgtaacaattattatgtttctatttttctattttaaatgtgattaatgcaaaagaattcttaagctaagtaattgcagcgagatattttttcaacaatttggagagtgcaagtgctgtgcattttttgactttacaaattgaagttcatttcacaggcatggcctaagatattcttgactgaacaagactgatgctcaagtatttttgatacaagtatcggaaatagtagacgggctcaactttcaaatttggagaaattagaaagtgcagttgcaaattgcaattgcagagatttgagcatagattacccatttttattttaaattaaaaatttagcttgtcttcatgcatactcatatgttgacatggattgaacatcctcattcattgaataattttattagagatctggtaatgttaggcaattgaaaaggcgaacctggaaaattacgtatagacaattatgcttgcaaggcttgaactaaggagtttctctgctataaggaccatttgaatgaggctataaatatgtggttgactttgttcttttatgattcaatagtttcagataaagcaagctgactataaatttctctcagatatttggcgaacaagattcaatcagaaaaaaggcaccgtttccattttttcaatagctttttctttcggaaacttgctgatttagacaaagatccatcgagtgcttatgaaggcaaggcagcatttcaacgtgttcgtaaatggacgaggaaagtcaatctttttgaaaaaaacttacatatattccggtaaattataggtcagaaattattctggaattttgttgcttgcatctctagaggatagctgttatgatattgttctctgatgagagttattaatgcattctgattgtagtcttcattggagtgtgcttgtcatctgtcatcctggtgaagtgcataatctcaaaggtgagaatatatatggttgtttttttctagtttgtcttcataaaggttttctttgggactttttatgtcttgtgatttgtaggtgaagaatctgaagccacatccaaggtaccatgcatattgcacatggattctattaaggaaagtcataaaggcctgaagaatctcatccaaaggtaggtggctaatagatcttcaccttgtgacattagtagattttctatcattagtttgagaataaaaaattagatttattttctcttatgctcgtagatataactgatgactcttgcacgactgacactgattttgactaaattttgttttttcatgtctatctcatgaaaatgtagttacctatgtgaagaatggaaagagaggcacggtggtgcagcggaagatgtttcttcaaaattcttaaaattgagatttgttccattggaggtattccctttgctttttctgtgcaagaattgtagtttcaaaggaaaaaagccaattaaactttgaatcttttctattctcctatggaagcttttcttttaaccctattattttattgtacaaaacctcaacttaatatagtgagataatgcaagcaatagtggataaaaataccaactgaaaacataaaataattatagaaaaagaaagcaatttcataaaattaattagagaattgaatcccttgaagctcctttacctagaaaagccaaatggttacccagtgtgtagttttgtcccaaggcctttcttcaaagtcaattctcttattcttttacagccatattgaccatgctgcctccagatcattcttccacaaagcttcttagctttattacctataatattacaggtctaacaatttacgggaatagtggggtctacacctaagattaccgaactccttgagaattctgcggcataattttaaagagaattacaatttaggattagttgattcgattagtgttctccccactcttttgcaaaagcaccacccttgagaaatcatttcaaagggtctcctcttttaaagtaaatcataattggtaggctgtcctgagatgacaacatttcacagtttctcacaccaatctggtccaaaaagctgtgaaatgacaatgtaatattaggtcattggaagcctcatttttcatttatatgcttaacacatcaccccagataaaataactaaggaggctttcttctttggaaattatcttgagttttcaatcctgccaaaagaactagccaactaaacaattatgaagaataggcttctttggggattatcctgaagtttcaatctgattacctatcctgcagtctgattacctctgaaatatgcaacaactccctcccttagttttagaatggaaatcttgacctcttaagaggccacacttgaaccttaggcattttagaacctgtggtgttgagctaacacatttagcatggattcaaaagaacttgtttggcatacaagacggtatctcaatacagttaggaaattatcttttgaggggacatctaggaagtcctactttgttttcatctacaagtttatcgtaatcatttaatcgtagtcattcctttgaattggtttgttatttctctggttgcattgtagtttccattgtagccagacaaggaaatcctatattaataagactattatacgaaatcatgtctcactaagcttttctgtatattttcttttaatttatgcaaattcttatttaaagcgatatgtaagagttgttatgaaatgtgcatatcaatggctagttataagtgtacttttagtcatattcagttttttttttaatctatttctttaagacagcatcatttattgactttatttgttttattttaattttgattcagctgccacaacagcaaaatctatttgactgtggtattttcttgctacattatgtggagctttttctggaggaagctcctcttgagttcagcccctttgacatctccaagtattccaaatttgtaagtattctcattttatttaaactttttaagaattatatgtggtgattattatcatcaccatcttcttttttgcacatataagataagatgactcctgttgtttttgttttgaggtcttgttggttttgatgcaccactgcatcaagtaagaaacagccacatgcttacccattctttctaacttcaatggtgccatgcattttgctcttctagttttctggttttgaaatgtcagaactgattcccgcataacctattatacattaactgtatgtgctatgattgcattggtagagtaagcataacaagagttagtacattatggtattaatacttttaagagatatctctcaccaaccattggttttttattgttttcttaatcatatcgatttgctgtcattgtaaagtagcatactaagaatactttaacatttttccagttaactagaaattggttcctacctgaagaggcttctctgaaaagatatgtattgaagaagctaatttatgagatccatgatcattctcataaaacacatctggccgatagcattaaagaatgcccttccgtagtacccaatgaaacagataaccaagaagttggagtgatctttcttgaaaagataggcattgcatccatttccaatcccgatgattgtggaatttctttgtcagaaacttcactcttaagaggtgaccagtgctatagaaactcagatgatattgcctggccgtcgactcatgcaaatctacagctatctgttccttatgatagaagtatcttgtcaccgatcgaggtaatttatcttttggttaatttctatttggcaacaagcaaaggtccatgcttatttgattataaagttatctaaatacacattacctctcttccagaaataaaaacatgtacattattccttccttatgattttctaattaaatcaatagaggtagttcaaacagtcaggcatgtggtttgctctcgatatttatttaaagtttatgtctttgcttggaatttgcatatcattttccgctcctcgaatatttttagtgttagtacagaaaggggaactcgttaaaaagaaaaagacttcctgattattatgattcctttaaaacgaaatttaaatttgtgacctttgtgtttgcctgtaaataggaaactgaagaagctggaggtcaagaaaccaggtcgccattagataaggaagaatatcaccaagtcggggaatctacatctgatcttttctcaaggttccatatcgaagacttagagacgtttgggaacaatgaactccctataaactgtagggaagttaacgagggggatccaatatgtggaacatctagtggttttccaacgttgcaagagataggattagatgtagttattccaatctcactgcaggatatggagagatctgaccatttggctgaaccagttaaagaagagtgttcttcatcctcaagtaaagaacttactgttattgttgcaaattcttccgaagagggtagtaatgagatcggttctactcccactatctgcatagaaaacgaagcttgtgttgtaccagattctgaagagaatagttatgatatcagctatatcccttgtatcgatgtagaaaatgatatcgacgaaaggggtaggccaactgagaacatcattcggaaaagaaacatcattcggaaaagtaccaatcttccttcaagcagtggcaatgcagtgtcagattcagacgaattgccaactacaaagaagcaaagacacgaggctcgtataggtggaagacgagccactggaagtgtctcaaaatgatttgcaaatataagggtcttgtgaataggattattggctttttgtatatctggtttgaatagtatttctagtgctaatctagtaatgtagggaggtagatagaaagtataagttagtctaaatgaattgctaaaaaatgtttgaaatcaagtgtaggaatatcatcatagttagtttaaaaacagtctccttattggtataggtagaagctaatcatatcatagtttcttggctcaaaagaagcattttctagtacacattattatgtttctacccatgttttgattaattttcctttggttaatacaatggttcatgctaaatgtaaataagaactttgggttgccgtattatattaaattatattaaaggatgttataatacaattcaaacaaaaggtttggtagagcactaaataaatgtatgacataatacgattcaaacagaaagtgtaccagacggaccttaatggtctctatagtctatatcacaagttgccattatttccttaatctttaacttggccaattcaatgaagtgatgagttccgattttggtttaattattcatggttgcattttactttcttctatgaataatgttagtttatattttgttagatgatcaacaaattgagctacacattttgttgttaggaattttcgatactattcttatcatagtattttcgagtacaatgttcttgatgaacttagtgctattttgtattcagaatgctaaatttaatgaaattgatatttcaaaaaaaaaaaaaaaaaaaaaaacttggccaattcaaattttagaactaaaatgatatgaatgcaagggcacttatgtggcttttgaataaggtagcttttgatatttttatttta

SEQ ID NO: 185953 - DNA, 3223 bp, Cannabis indica
taaaaaaaaaattatatcatcattgatttcatattgatggacgttatataggtttttactctttatctttttattcaataaattctggttagttattttttaaaaggaaaataattattttttgaaaattaaacaattctatacaaataaaaataaatcaattattattatttttaagttaagtaggatttttacctctgaattttcacatgtaccaaattatgttcctaaacttttaaagtcgttaaaattgttaaatttaagaacttttgactaattttagtaaaaaaaatctagcatggttgaaagttcaaggatcatgattaagtatatgtgaaggtttgagggacatgatttagtagatatcaaaccaaaaaaagtggacataatttggtacatgctaaagtttgggggtaaaaatcctaattagtcttatttttaaaaagtaaattaacttgtaaagcaaactataattagaatttatattgattaaaaatttatgttatatatacctggattgtctgcaaagaaccgtatagctagccaaccaccggaaggaacaccagcagtgttcctcgcaaccgggtcaactagattaaacttagctggatccttgttcgggtcaaagttcccaaacccttgacccaccacaaaaaagttaaacccatgaagatgaagagggtggctctctgcgctcacaatgctcgtgtcttgcatcaccacctcaacgctcgcattgaaccccaacaccaccaaccgggtcccattactcaccatagtgttgttcggcggcgtcccagtgtaattaaatggctgaacagggtttgctggaaaatcactcgtgtaaactccgactgactttttgttaaagtaggattgcagaagtgccatcgagggtagcgcgaaagacacattgttgattgacgcggcaaacttctgtccattgggaccttgacacgtggtgttcttaggacaagggctggtcccgagtccaacggtgaacaaaaacttcttctccacagttttagggacatttgccgggaacttagcagagttcaagctacgtaggctgctggtgaagttggcgacgaattgggtaacgttgacgaatttggtggcattgaaaggagggagaaatggtttgtaagtggtgaggttttgagtacttgttgtggtgttgggtgggcggtgatattggagtatggcggctgtggtggtgttgtcgagggttccggagccagtgaagtaggggctagcagcgatgaggaaggtagcgttgggatagtagggtttggtggtgaggaggatgttggtggtttggcctggggtgatgaggagtgtggtggtttggtagggtttggtgtaggaagcgtcaacttcaacaatggtgaagctgtgatttgctatgctgaaaaatagttcatcattaagtgcagcgttaatcaaccggagtaggtatgtctttcctggcttcactctcagcttgaatgtgtctgtatatatatagtaaaacatcattttgggactgatgtatacattataatttaaaatagaaggcaatgcacaattaataattttgttgactatttgcaatagtgtaatgctatataatttgcgaatatatatctctacgtattgtaccattagatgatgaacaattgtacaatggcccagggaagccattaatagtgtaagcatccgaaacattgggtccccctccagtttgaagtgcttggttaatcacagcttctgggtctacattaaaccactctcctatacatacaataattaaatgttaatataaatctttttctttcattcaaatattatcaaataaatttaatttatgtagaggataatattatacctaatataatcggtacttccttgtaaggcttggcaaaggggtaagattcattgcgcttaggaagaataataattggcccataaacagtggatctgagccaagagatgtgagcgtgccaaagaagagtacctctctggcccgtgatggtgaaattatacgaataactctgacccgtttgtattgggcattgggtcacgtatgccggtccatcagcccatccactcgtcagttgccgaattccgtgcctgttttccaaaatttaattaaaaataaaataaaaaccagaacgtggttgcggagattcgaacccaggcctccacggtggaattctcgccactaaactacagccactgctatatgtttagctgtctaatataaaatattctgttggagactatgaaagtaaattctacatcatatttctcaaaccttttataataatttacaaaatagtgagtttccaaaatatatatttatataatagtcaggctttcaaaaaaaaatatctttacaaaatagttcaggaaagtacaaactaaatgctcaattgagtggaacttgttactattcatcttagcaaaactttaaaagaagatagtatctagcatcatcacatatataaatatattaaatatattattatcgatgtaattaaatatattaaattttacatatttcaactactcatatatattcattttattagatgggtctatcatttttgaaatgaaattaccataactctaatttaaatttgtgtgtaatttattttatatgaacatatcattatcagtataaaagttttactataagaaaattatcatattaattattttatagtactttgtctttgtgagaataagatgtagtgatgtctattgtacacattgtatatataagtataaaatattttgaaaaacccacattataaatataagtattttcctttattatatatatacttaccagtgtatggtaatattgttggaaacatgattgacgaccttgacaataactctatcaccttctcttgctattaatggagggcctggaaatttattgttcacacaaataatgctcttcgtatggcacaatcttgtcacggtttggttccttatctatcataatacacacataataataccattaacaaacatatattaccataataaggtttaaaatataccaaaagaaataattagtaatgtttaatacgttgaacgtgtaatgccttgttctgcatgtgacaagctctggcatcatcataattgtatacaaaccaaagaacaaagctgtcattgaaggaagataatgaagaacattataagaagaagtacccatctctctctctctctt

SEQ ID NO: 185954 - DNA, 6095 bp, Cannabis indica
aaaaaaataatatatttttctatctttggagtaaatatttaacaaataattattttgttaatgtctccactaaattatggacctgaggtccccaaactttactatgtatatcatttaggtccctattttttttagtagttaaatcccaactttttttatatgctgacattaatgagtttagtcaacacttagaccatctccaactattgcatcatttcagtatatatttttcaataatttagtgtagaatatatattttgcaccttaacatctcactttttaaattgcttaaggatttttttcctttctaaagcttagaaagtgaaaacggagctttgctagggttttacttaacttcagatcgttggagccatggcgggtcaaggaagacctcggaagatatcccaacaatctgaatccaagaatcgaaaacgtgcgactgggaatacaatgactgggaaggttcagaatcaaagcaagaataagaacagagctaataaaaaaagagggtcaagctcatcgaaaaagccttttaaagtcaaattgatggaggagcttcttcgggtagcgaaagcgaaattcactgaggatgaattggagaatggagatttggctgctggaattgaagtggagctattatcacttggagcttctctgcaactgatttagaaaatgcaggaaatctgcaaagatttcttaaatttcttggatgtttcaaagagaggttcttaacaagtaaaagctggtaagactcccttaccccctattttgagatatgggaatgtaattcaaaacctgaatgtgaaatttagaatgaatgaggatggactgaataagaaaaaaaggaaatcgaaattgaattagaggacattgaagaggaaattgatttttggaattcctccttagtgtgctacgttctgggagctaatcctcccattgggtcttttgccggttttgcgagaaggatatggggagattaggttgataaagtaggtttgcttaatcatgggatgtttataattcactttcatgctctagaacacagagatcgtatcctggtagggggtacctttctttgataagaaatccattattatgaagcctttgaatgcatacatagactttaagaagaaaaatatcctcacagctcccacttaaattcaattgcatgggttggatatcaactattgggggaggaaagcactattcaaaatagttgcccagatcggggaattgctacaaattgaccaaataacctagtagaaggaaagattatcctatccttgagttctaattggggttaaattggatcaagagttccctgataagatttcatttacgaatgaattgcgtctgaagatggatgtggaagtgctttatgaatggatttcgattcaatgtgcaaattgccatgaaatttgccatatttcaatggattgcaaaaggaaagatagtcataagcaagatgggttccaaagaaaacaaataaggcacccaagaagaaagtggagatagatgaggatggatttcaagctataaaatcggtgaaaaatggcaagagaagtgtggaaaaggtcctatttataactaccattgagaatatttttcaagtgttagaggaagaaggggatgctcagagaaaaaggaagaggaggttaacaagggaagggggagcaccctacagctcatggatagaattatgagttggaatttcaagggaatcaacaaagtgaataagcaaatggagattaagaattaatttcctcttttcaaatcaagttggttagtctttttaaaacgaaaataaaggcttcgaaattgggagttatttatgttacagtttttttgggttggtgtctctccacaagtaacatctagcatccacaagggagaattattataagttggaatccactaatgttttcagttaatattttcctttgtacaagccaaataatgcattcggatgtcgagtcaaggctagggaaagaaagttttttgtttacgtttatgtatgcacttaatgatgaggcatgcagagagctgctttggaaggatttgaagtctttggctattgaaactttaaaatcgtggctagtgttgggtgatttcaatgatacccttagtgttagaaaggtagtgggtgataaagtgaatattacaaggatgacaaccttcaaagattgtgttaatttttgtaatttagaagatgtgaggtcttcgggatgttttttttttacttggaataacaagtaggagagtggagatagaatctactctaagctggatagaattatggctaatcaagaataattggatagatttccatcaaccgaggttgtttttcttgcaaagggccagtttgattactacccaacagttttgtctatctatctagagctaaaaataggggaaaaaccattcaagtactttagattttggcaaaatgctattgggtttactaaggtgctcacaaatagttgggaaacttatttcgcgaagactcccatgtatcagctgattagtaagttgaagaggttaaaaggggcattgaggcagtttaaaaagctaggaataggtgattgttatctcaagaatttgcctaactggcgtgacattagttggagtgacaggtggtgaagaatgcacgattggtcatcttttttaccacattatgcaaacacgttgcttggataatcatgttgcttaactaatcacattattcgatcagtagcatccagctgacttaattcggtaagattctattgctaagtattcacagggcaatagtctggtcaacctaccgactattaaggcttggttgagtgtattcaacatccacaaaattagcctccaaatccctaaataataggccataatagttccctacaatcaaggaattgaggaaataaatagctattattgaatattctgtaattaatactctatttgcttctggtaatagaccatcaacaacatgctattgcaaacttaggagtagtgatctgagagcccattaggaaagacatgatctactccatgtgatggtgttcttaaagtttcttcataccaccacaagtgcatccattgcaagtgtaattatgcctgtaatttgacagttcatcttagatttccttcaacttcgtaaatacatgctgatagtttgattgtcttgccgcaaattcatcaatatgtgtgggtcgttcctttgatgaaagagaactttcaaatctatctagataactgctgcagttttgtcacaaaaagaatgttagaataatttttttttagagacagagttaaggatccaagagatcataatattattatttctaatctaagcattgtaaagattataatcagtaggaagaggtttaggaattgaaccgtccacgaacccaagcttgttcttgacatagatcacaagctgcatagctcgactccaagaaagatagttttcttggcctgttagaatatgagaaaccagaatatttccaggattgtctccatagtagagataatatagatttgtaggatcttcgagtggattttttgaaattgccacttaaagagtttgattgttttcattgacatgcacttgcaaattctcaatgattgcaaggtttaaaactctagtttcaactcgagaaacttgatcattgttcgacatggttgatcaaaataaaatcaacaattttatgctagaggaagataacatgatgctactgatgcgacaattggagaggaacatgcaaagaacccaagagagattagacaaacaccacctttaccagagaataagacacgatgaggcaggatgaatagaagtaggatcgagatcaatcaaaggaaaatatgttttcctgctctgataccatattgtggaatgaagaacatagagaatgaaaaaaaatttatgcattcatgtaatgtgaattcactaaattacaaagtgtgcaaaatacttatttatacaaataaaaaaccaactaagctcacacgagctgaaccaatcgaaattataaactcactaactgactagtcaaccatagcggtaatataactaactaggaaagatgctaaaatctattacatagtatttacttgaaagggaaaactttttggctccacagggctagaggagaccctagttggtattggaagaaactcctcaaccttaggtcgatcatatctgagtcgatgaaacatgatgctggaaggtttaaggttagcaaattttataactcttttcttaatgttgaaaaagtagattatgtttgtgtagtttggagtaggctcttgattcccaagtatagatttcatactttggcagatagtaaactctcagttgatgaccagagataaacttcaaacattacaactctcttgtgcttctccatgttgtccagtttgtaataattttattaagagtcgtgatcatatgttctttctttgccctttttctcttgcgctactgcgtaaggttcatgaatgggtaggtttcaccacatgacccattgtgtactcggattgaaggtcttggatcaggcatttggggtctgaattacaatgtcaagtattgattgttgtgataactgttgtggtttatttaatctgggttgacataaatttttatatttttgtatgtagatcatttattgttcaccatgttagtaatatgattaagcaggatatcaaagctcattttggttgtctaggtaaaagaaaaatgtcgtctaaaaataaatttattgctaatattataagtagttgatagtgtttcctgagtttattaattttgactggactggtgttgcttgatgtaattattgtgatgtttgatttaatgagaatttatctccttttaattttttttttttaaaaaaagttgttaagaaatttctcaagatttcatcaactctttcttttcattaaagtaaaagatttttttttatttatttaaaaaagaaattcattacttgatattattgtttttgaaaatccaaaatgttggacttcaaaatgaaagaggaaaagcatcactttacccaaatattattccacaatgaaactaataattagaccaagtttgtatcttttcttatggtaaggaagaataatttaattataaattataaatatatacataaatattagcattgaattttctgtgtttcttcctctctacctgtatccacatatgtaaattattatacacttccccaactatggtttgttcatccgtacacaactcttcccattataaatatacattattatattcatgtataaatttgctaaaataacaagactatttatatgtatataagattatgcattttacaataataaaaatgttataatagtggtggcatcagtgtaatgtaatgacaaaaagtggttaatttttataaatgagtggggtttgaccttaattcatataggaaatattatttgatacatagaggcatcaatagttgtggttgtttatttgccccaattaattcaataaaagaaaatagtatgtgaaactattttattttgcagcacataactttttatgtaaaatatctataggtgaaattacataatgtgaagcttttgttgtaatttaccccttcatgttaaatcaaatgttaaatttaactaaaatgacacataataacatcatattgaccaaaaactaatttcaattccattttttttttttataaatctcaatgaaaatagaaagtgaagtgtcataaaattcatcaccccaatatataaatagtgtgctaaccttaaaaaaaaaaaagattagtgatcaattgggaaggtcaattttggtggaatcataattgttaataataaaatgaaaattattatattcagaatatataaatgaataaatgatattcccttgtttgtttgatccaatcaaattcactaacaactaaattcactattctctagcttcaattggtggaataatgattccatataaaaatgattgattccttataagtttaaaaattaaaccaaaccaataaaataagaatggcctagcctatatttattcttaataacacagtccacaaaatcaacctaacatt

SEQ ID NO: 185955 - DNA, 1119 bp, Cannabis indica
caagagactcttgtttctctacgggtcatgtgcttcagttggagaaatgttcctatggagtgttatattattttgaacaaatttattaattaattgatcttatgatttttgaataaataaataaatataaaacaaattaaataaataattaaaaacataaaaatatttttaatacttgtgtaacagagtgtattgatagtgtattgatgcactcctactatttagaaagtagtgttgaaataatctattataaaagaaaataaagaagacactctatattcaaaataaagtctagaacaaacaaattaacataaactagaggaaaagaaaaattctaacactatcccatccatggaatgagaagagaaattaagtggtagtaaggtagataggtaagggtggtattgtagttgggagccaaggatgcacaagtgtaaactgttgtatataggggagatgactcatatcttttttagttttactcacttttcttaagattatctcatcaccaccaataccaccaatttggtacaaactaaacttgctacaaccaatttgaccatagaagaaaaacacatcatgatgatcatcaggatcacgatgcatcctaatcacattcaatttgagtaattcttcatttgtagtagtagtagtttcttccttaatattaacaatgtcatcatgcactaaaacccaatcatcatcatcccatttcagttcccatgatttcaagtgaattttactgatttcattgtcaatccagtatgactggcacagccggagtcgacctcgaaccacaccaatcacactagaaaatggaaacaatgttcgaggattacgcaacatatgaatactaattcttcttcttgttgttgttgttctttcttcaacgatttttggtcgtgacaaatattcaaactcttttggcatggcaatgaaaacacattcatataccttttcttcttctttcttgggtgcgaaaagatctaaagcaaggattcctacgcactcgtcgtgtctcttgatacgccagtacaatcttccatcgttacaagcaacccctgtactttcccagtattccccacgatcggtgatagtaatgagcattggacacctcca

SEQ ID NO: 185956 - DNA, 1154 bp, Cannabis indica
attttaataatataatattaaaaaatattattctaatctattattttacccaacattctacaacatttaccaacgtgataaacttctagagataaattattattttatttttaaaaagatagatttaataagtattttctaaatattatattctatacatatatatcattgatttagctaactttgaataatgaggataaaaatgattcttaagaagaagattgtttcatattaaatttatttaaatagatttaaatttaattagatatttaatacttaactaactttctataaaccatactatatttttatattaacaatttaaaattttatatttagattatcatataaatttaaatatattaattaatagtaaagaaaagactaataatttttctctaatgccttaaaaatattaaaaatttgagataaaatttaaaattaaaatatagatttgggaaaaatagtggtaacgactacaagtgagctacgctgatgacaagagatgaggtacgataatgacaatgtatgaaatacgatgatgaaaatgaatgggatacaatagaacaacatgtgtgatacaatactatcagcagacgacgaatttctcttcccctctccctcagtcccagcgccttggacgtcttcgtccctgttctctccctttctctgcgactctgtctccacgtctccctctccttcagcaacccactgatggctcccccccaagacccaatctcctcaacgacggctacagttgatatctctgtctttctgtgtgtccatgtttctatattttagtgatttaattttttcatgtgtgttttagtctgagtaatttttttttttcttttgttgaagtttaaacaaaaagaaaccctaaattcctaattccactgcagtgttgaagtttacgagtttaaactccccaaagcttaaactaggatcggaacactgcatttcctgtttccaatatggtaggtttcttctttccgctctacctctgttttactcccatttccctcaattaactattcattattccattttttctgtctcagttttcaatcgcagctatcaatgataccaactctaaaggccaatgggagcctttagctccaaccaaagaagctcaggcatctctctctctctct

SEQ ID NO: 185957 - DNA, 1290 bp, Cannabis indica
actatatgctcctggcatgtaagaatagctatctgtatgaaattttaatatcaggcatgtggcagttattcctccatgtaaaggttggtgaaaaataaattgtatttcattgaaaagtaatacacctatatacatacacaactaggaaaactaatacaggaaattatattaggaaactacaggaaactaagcctatattcaaaaaaaaaatatatatataggaaatgatacaattaggaaactaagcctaagctaatttaggcaagtcaactaacacacaactaatacatcccctcatgttgaagcatagatattgatcatatccaacttattacaaagataatcaatttgaacctcattcgaaacttttgtaaaaagtcccctaattgttcaccagtcttcacattccttgtaaaaatcaagcctagttagattttttctcgaacaaaataacaatcaattttaatgtgcttaattcgcttatgaaacacaagattagatacaatataaagagcagcttggttgtcacactacaattttgttggagctgaagtttaagttcaacttcaattaagagttgataaatctacatgatttgatacacatactgtgccataactctataatttgatcctacactttaccatagtacaatattttgcttcttactattccatgaaaccaaatttcctccaacaaagatacaataacttgaagtagatcttttatccactttggaacctgccgaatctacatatgagaaacattcaatatcaaagtgaccatgatttgcatagacaatgcactgtccaggtgcacctttcaagtaacacaaaatttgctttaatgctgcccaatgaccaacagctggaaatgacataaactgactgaccaaactaactgtatgtgcaatattagaacgagtcattgtaagataattcaatatcccaaccaatcttcgatatatctcaggatcttcaaatagtttccccatctcttgtaaggtgtatactaggagtcattagaacattacaaggttttgccccaaaaattcctttcttatctaatagctcaagagcatattttctttgatataagaagatactctttttactctttgtaacttccacccccagaaaatactttagcactccaagtcttttgtgtgaaactgagatgattcaaagacttaaagagataagattctcatagtatcacttccagttataacaatgtcatccacatatacaactaaagattttgattgtttgtaaaacatagaatgatcag

SEQ ID NO: 185958 - DNA, 2430 bp, Cannabis indica
aaatcaataacggcaccataaacaaatgcagaggagcaagaatctaaactctatgacccatagctatattgaattaaaatagtatcaatttccaagtctgtattcgtctattattttcaataaataattaaattaccgtgaattttaaacataattaattattattccaaaaacataaaataaatactaaaaatttaaacaaccacaaaaactacggagtttgaataaataaaacctaaacacgtaccacagaagaagaagacgaagaaaaacaatgatattgactcgagtttcatagaaccaagatatccacacaaataataataaataaaaagtacgccattgtttaaacctttaatttatctgtgttcgtgagattttctaggtaaccaaacaaaggtagaacgataaggagaagaagaaaagaaggggtttacctgtgaagcgaaagagaaagcaaagagaatcaaaggcgatcgaagaaccaaacaaaaagaaagagagttacacgaccgaaagaagaaagaagagagagaaattggggttaaccggcttagccggtaacactaagaatcggttatgagcaacacgagtcggtgtgtaccaacgtggttttaccggtattagccggtgtccgaggttttcaaaattataaattaattaactaattaataatattattttgaggaggagaataaaataaaaacaaaaaaaatatataattataatttataattagtggagtggggcaaaaaggaaattatgatgattattgccgccaagttatcccatataggcgaagacaacttaggtatttgtgtcccaccccaccttatgacacgtgtcatttcctctgtttcccaccttcatctacttatagttgactggcttttgactttttcctgaactcaaagtcttttgaattagactctcatgatcatttgagtagttttttatattattttttatagtaatttattatttttttttaatttttatttaaaaattaatttaaatataccaacaaaaaaaataacacgtgcttaaagcataagtattttccgcagacttcaatcttggaggctaaggattatcatggatcgtctcatctgtggtctagtctcatttggggtctcgagctgttaaaaacggggatgaggaaggttgtgggggatgggcggagtattcaggcgtttcgtgatccttggataccccagcctagaacgtttcgaccaattacaactgcaccgagtggtagtgtgatggtttaagagttgattgatgggtctggggcttgggatcttaatgccttatcccattatttcttacggttggatatcgatgccatcctcagcatccccgttgcgcaatgggggatgtgaggatcagtggtgttggcattacacttccaacgggtgctatacggtgaagagtgggtatgtcgttgcgcttgatgtggcgactgaaagaaatggtgggtcttcggtgaatcaagcttcttggtggaacgacctgtggaagttaaagataccacagaaggtcaaaatctttctctggcgaatgtatcatcgagctctcccgaccaattcccaacatatcaagcgtaatattccagttcaaccaatttgccacagatgtggtgaggccatggagactccgaaacatgcgttagtgttttgctcttccttacttcccatctggtcagagcttcgggtttggagtcagttcagtcggtgtaggaatggcccgttggcagagctgctggtttgcttattttcgatgattgagcagagtaaatttgagttgttggccatggtttggtggtgggtgtggtatgatagaaactccgttttgtttaggaagaaacaatcaagacaagaactgatagtggagttagcaaaggatgcgttggaggagttccaaggggcatcagggcgttctattggtcgggttaggtggccctcgcggtgatgtttccggggtgggtgatggggttgctggggggtgttgggacgagccgagcgagggggcggtttggtatgcccgactcgatggtgtccgccggagatgggtgagttcgtgttatcggttgatgttgcggtcacgtcgggaagagggtttgctaggtttggtggggtgattcgtgggggtaagggtgtggtgtgggcggcatgggccgagggaggggtcggggattatcaggtggtagtagcggagctccttgcggtgcgtacgggtctgttatgggcggccagattggggtataacttggtgcgggttgagacggattcctcggttgttagttcttggataaattgcccttcgtctattattatgtttaaacctattgttgaggagattcattctcttttagctgttgttggtggtagtttttgttgtgccattttgcgtgttgcgaatggtgtggcc

SEQ ID NO: 185959 - DNA, 1795 bp, Cannabis indica
gagggaatttgggtccgggtctataaaatagagcacattttagttgataatgaagaacgtggactacaatagtttctcagctaatcgtgcttcttctctattaagaaaaaaagtccaatacaaaattgctattttttctatttttgataactgattcctcttaatagaggcaatacagtgctattaaaacaaacagaggcagcaactccattaagattctaagaagccaaccaaatagcaaggtggcaaacaaataaaaagtaggacagttcgagaagatacactagagaaaaatgaaggatatagaaaggaaaatgcgtgagatatttatgtagggacaaaaagtttacaactaagattttggaactgagcatcaagcatcaatggctgacaaaaaaaaaaattgttttagatgaaagaaagggagactgaataactgaggaagatagatatatctaaatatatgtaatttctataatattattaaaatcatatataattgttttatcaagtaaggttacatctattgtattaatatataccaagtttcctgtaagaaagttttactatacatatttcgaaatccagtgattttttatgacgtgactcttcactcttcaaactcacttattgcaactagcttaaattcacttactgcaactatattaaactcatttttcaggagaaacttgccttttatatttattttttgaaacaataatgtacttatccttttaagggtgtctcaataacttcatattctaaaatttatagtacgattgatgctttaatactctattttcctttattcttttggtaattatattttcttattattggcaacagattatttagtaaaagcagcgttagtactggcttgaagtctggtattcagagaattaaatatttgacgaatctttctcaccccaccgtgaccaacttcacatcctcatccttgtaattcattcattaatccttaatttcttataaattaataattttaattttacatttaattataaattttattattaattacacagattgaattgatttatgaaattgtgtttttttttttttctttcttttatttactttgttgcatatttggtttggtttttagccttaaaataagttgctctgcgactctatcagtaacttcagaggtagaaaagcgaagttttgaggcggatgaagcaaatttactagtgaaggagcttcaaggagtgttcaattctggaaaaacaagaagctatgagtggagaatttcacagcttaaaagtatagagaagatgcttgaagagaaggagaaagatatcacccaagctcttcatgaagaccttgcaaagccttatcttgaagccttcatttcagaggtaattaattaatcaataatatcccttatttctcctacttttaatttgttttgctcattcttttttactcagtaattaatcaatcagtaataaaaacagatttctaccacaaaaggctcgtgcaaacatgctctacaagagttgaaagagtggatggagccagaaaaggtacatatatttattctcttctcttgatttgcatgtaagaaggttaatttgagcataggtatgactgtgaatatataaatatatatattttcaggtgaaaacttcaattacaacttatccatcaacagcagaaattgtatcagaaccactaggagttgtattggtcatctcaacttggaactttcctttctgtacgtataaattaaacgaaggaccactagtacacataataataattatggatatatata

SEQ ID NO: 185960 - DNA, 2661 bp, Cannabis indica
tttataataatttttcaaaatatttgggcccaattcaattcaagggtgctaacgggtcggataagtggcattacccgacccgtttgccattccttgaaaataaattacctctcaaaatttgaacgtgcatgacgttcagacttccgcgctaaggctcccttaaactctgacaacttctttcttttcaagtacagagtgttccacactgacaccatctttgcttccgcgctccctcctcttggcttcgccattcctgtacagacttcttccaccattttcattcattaatctctctctctccccctgtatctctattttatatatgtacatatttgggtctcagtcgaaatgaattttcgattttaggaaatatgccctttcgattcaccaccctacatgtttgggttcttaatgttcttgtactctctctcgctctaaattttggcttggtttttctatgttaatcattctgcaggagaagcctactgttcaaattgcatgcttgcggctactgtaggaaagaccttcaagattcaaggtccgagtaggtactcaatgtcctcgtttacagacctttcattttttgtttatttatttattcatcaagattgcgattttgattcttgagcttatccttagcgtttataaacctggttggccgttttcccttattagcttaaaatttttgggtattttttcttttcaagtaatacttgtagttgtatatttgtgtatattgaagacatgctgatccatatttaacaattttgaagtgtgaaaacccataatgtcttttaatatgattaaactattttattactttggtttttcgaactttcttattcttcctgttcttctttttgtttttagagtggtaagaatttcttgattcgtttacaaatctccttgttcttttcaaaatgtgaaaagtctaggaatgaaatacataaattgaatttttctgaaacagataaaaaaaaacttattttctgatccaacggagattaggcagttgtgggtgctgacatgtagataaggtttggctcaattttacttttttacaaatgggggactatttactcgagactagaaaaggttagttttcatttctcaaatgttttgaagcgcaagattaatgttttttttaatcaacgagaacattagtttgtagctgctcgtcattttcaagtatattatctaattaggctctttgttttagttttttgtttattttttggctatgaaggctctatctttgttgctactgactttcgatgtctgtaggtattttgaagcaatatgttctacttactaaagataacaagcccatatgtcggacacgatgtagtaacccacctttccaactgtatgatttatttctttcatgttcacatcacttttttcatccgtgcacttctgtcttcttttacaagttatggttactgcctttgaagtgttactatatttcatttccttaaaaattattttgaaaagtatttatgttgacgtatgtcttttgtcagtataaatgaattgacttccctacttggttttatgttgccattttctgttttcccaccctgaagaaagtacaaagacaaccttcccatttgaaatggcagataatagatggaacattgtgtagctaaactgtaaaagctgttttcttatacatattgaaattaatgaaaagattgtgaggacctagcaagtcatactttcacataatgcctttgatatgatgatagttttattgtggaaaaactttgcttcctttcttatgtcccctttccttgcattttgtctatgatggtttaattgttttccataattgagtttagttggaagcatgattagatttttgaagaacgtgaggaaaatagaacggagtttctcaaatatgcttttcctgaattagcagtattatcttctaaaataactcatgagcatatgcattttagatttcttagtaagagagaatgagagaggaagcaactttgctggaagcctggaacttccattttataagaaattgataaaaaactccctattttttttatagataccgtcttttgttggaaaggataattacttgtaggtttagttatgcggaaggttggagagtgtggttgggtgatagatctgaggtgttttccaaatcgactattgagttctttgcaatgttttttccccatggaaaagttcagtccatctaaagttagttttttcctagattaggagtatagcaataataacacacaagaatactaaaagatcccactagaactcttcgagaatactagaaatccattattaaatcttcaagaattacacaatcaagctcttgagaggctttctctcctatttttaacctttcaagagggctagatctctcctacttgatattattctctattctcatccaacataaggtatctgccaaattcccgtactctaattttagagtatagaacttgcaacatcagcagcctaattgcaagctaataaccaatgaaaatagaacacgtcaccctagacaattaaacacctagtacaagttaaataaaactttctaagactaatccctcgataaacaaactgaataggaggcttatcatcttcgtttcattgatatgttgggatgtttaactatgcatatta

SEQ ID NO: 185961 - DNA, 1961 bp, Cannabis indica
aaaaataactaattcaaaataatcaattcggtttacacttttgtgaattaaattagaattactatgtaaattgaattgaaaacaaaatataaacttgcatttagtgcaaatgaatacagtgtgagcaaaatagtgtgaattgaataagatgaacaccaccagaagaaaatattgctcattttgtctctatagttctattctcataagatagaaaggatataatatatctaagaaaatactagctaataatgcaatatcattatttgagaatcagtctgcctcaaaagattgtatcaaaatttaattgtatagcattaactctttgctctctctattaaaaagctacagcatcaaaactttagttcatgcaaaaagttgacaatacatgtataccataataccaaacgaagtttagcaattaagattagtgaaaactgattaaactagtaattatatagtcaaaatacaaaagctaaattctatctccagagatgtttaactatagattttggaaccttgaatcgtttccaagagatgttcaattctatacttcataacaggttgccctgaacgtgtcttcttaaacatcttttccctagtagcctttctctgagcattggctttatctatttcttctttcttcgcctgaatagctgcttctttttccattcttgccttttcctcctcttcgcgcttcttttcatatatttctctcaaactaactttcgttttgttctggctcttcttgtttttcttattcatttcaacctgtgaaaacaatgagagtaaatgcatcacttacagaatgtatctctataagaatacattttacacatgacagtaatcaataatgccaaaacttatatcagtccttcaaaaatcatacaaacttactctacacctctaaaatctagaaacccagaagaaaatattctgatgtagtacttaaagtattattaagcttgagtttgttttcacacaagaacaaatgcaatgaaaataggcaccaaataacttgctcttataaccaacctcgctgggcatcgaagcagaggaaagaccttgctgtttcattgactttttaaacttgctcacatatttagcatttttatagaactcctgctgcttctctgcaaaacacaataaagtaaaattactacagtgaaaaaactctagatatagtatcaattttagttatatttcacaataaagttcaagcattagttcatctactaccccacacgagctcaatcaaatagatcctataaccaggtctatttaataatgctcttatctctaagacatcataagcactaaatcctaacacaatcacaagcaattcacccaatatgtacttgaattttcatactgaaacttctaacaaggagccacattatccaactttgataaaaaaaaatatgtaaagcactacaaaacataattgctattatatatatatatatattgaaaactgtatcatcaaaataagaaacaaagcgtagaagttagtacttattgaagctggattgtagtggcttctgttcgatcgggcatgggcgaaggcttcgagtgaaaggcctttcctcgtgttattggggttctgattccttctcttcatgtttactgaatcagggacaccaattccctttccttttcgatcctcgcttggggtccgattcttcatctgaaaaaattgttcaattagggattgtagaacggggatgagtcggaaaccctagaattagaaacatacctaaaaggaactgtgtgggtggtgccgactgccaaagaaagggagagagaagggtggtggagatcggcgccgacgatgagaactgagaagtggacggaagagagggactgagggtgaggcgcacaaagagagggagtcgtcgaagatgaggcggagagattttagggtaatttttgttttattattttagataatggcgcgatgcaac

SEQ ID NO: 185962 - DNA, 4072 bp, Cannabis indica
atcgctacaagtattctacgttagttcataacttaccaattcgaacaatttacgttactatttacttaaagttattatgtgtacaaaatttataaggtacacatcataataaaataataaaaaattaaataactttttttttttaattttctttttattaaagatcaaaaattttatatatgtaaaaaaaaaaaaaaattacaaacttctatgatttgtcactcacccttcttggtggtggagtcttattgccgaccagtaccatttattcatctctactttttttctcgtcccatcccactatcctagaaaaccaattaagaaaaagaaaaaagaagagatgtgaccaagatcagaatcaggatcgagatcttggagagagataaaattttttgtttttatttctttatgtttccaagaaattgagagatgtggatggagtatacggtagaaaaagagaaatatggatagtggtggatagtggattttggcagccgattttttgacctcagcttttttggttcaaagtttacttagacaatttttctcttagaacaacccctcttactaatggaagttggagatttttagtagagtaaatcaggactgggcaaattgggctagtgaagctgaataactgttttggtttattaataacttttcttggctatcggattctgcccagtttacctttgggttttaccaagagataattgttttaagtatctcaaatctcaatcaatccacaaatatacgtgtcttttattaattcacagaggaaaaaaccaacaaagttttctactttcagatcatttatagtaattatcaagattttctttcattatttcatttgttttatttttccaaccgtgatttgttatggaatttccaaaaccatggaaaatgtcattaaaagttgacttaaacattagtgctcgattgactaatattactagctgatattattgaccaaagtatattggttgctgtgatccatgatcatttttcctttaaaatttactttaaaggactttaatttcttcatcaaaatcttgcatgaggtgaaccatttcgtggtcttcaaaacaaatagtccaaacaattatggctgcactgcaattattctttcttctaattactcaaatttgtatctcaaatgctcaacaaaacagaaatagtattaatattagtgtaggctcatctctctctccctccaccaataaatcattttggttatcaaattctggccaatttgcattttggtttttaccaatatggcaatggttttgcattgggaatctggtttgagaaaatacagcagaaaacagtcatatggacagcgaatcgggatgatcagcctctctcaaatgatgtcacactaattttaaatcgcgacggccttgttttgcaacaaaaacaaggcctgcaagtgccaattaccggcgtctctttgcctgctgcggccgcctcagcttcaatgcttgactcgggcaatttcgccctctatcactcgaattctaccataatatggcaaagttttgatcatccaacagataccattttgcccggacaacatgttatgtccggtcactcacttgtctcaggtgtctcaagtatgaatcactctagtggaagatttcagctaataatgcagttggatgggaatttgaagcagtaccctttaggcattacaatctcaccttactatggttactggtcaagtggaacacaagataaatccaagaattcgagtctgaatttagatgagaatggtcagctttaccttctcaactcgaatggctctattatgaagacgattttcgatggccaaagccagagtcaacaatttaacaattttgcataccgttttacaattgatgtagatggaatactgagattgtattctcataatttggttcaaaacagcagttgggttgctgagtggatttcaactcgaaacaagtgtgatcctgttggcttgtgtggattgaattcatattgcattgttaataacatcagtcaagaaactgattgttcttgtcttcctggttttgattttattgatcataaccagaaaagccttggctgccaaaggaattcaggcatagatagctgcaaaagcgatcatgaaaaggcgtttcgtgttgctgaattcgatgtgcttgaatgggaaaacaactcatactcagttgtgtattacatgaacaaaactgagtgtcaagaggactgtttgagagactgtaattgcatggtggctctgttcgaaaatcagcattgcagcaaacaaatggttccattgagattcgccaagcctcacacaagtgcctaaataaaaaccatagtcaaagtgcctaataatggtggtggtgactatggtaccaattccaacatgcctcttaagaaaggccacaaaagaaagaacataacagtctttgtacttgtttgtataataattgctttaacaatcttactattttctctgttttttctctacagaaagcaattcaagtcttacaaaaatgtcccaaatgaaaagacattgatagttcatgacatacttgctctcagatcatttagtttgagagagcttgaaatttccacaagtggtttcatccacaaattgggaagaggttcttttgggacagtttttaaaggaacaataaacttgccaaatggtgagagagccattgctgtgaagagactagagaaagttgttgcagccgaaggagaaatcgaatttcaaaacgaaatgaaaaccattggaagaactcaccacagaaacttacttaggttgcttggttactgccatgaaggatcaaataggcttctagtatatgattacatgagcaatggatcactagcaaactttctcttcaaatctgaaataaagccaaattggaaagaaagagttagtatggcttttggcatagctaaaggaatcttgtatcttcatgaagaatgtgagaatcaaatcattcattgtgacataaatcccaacaacatacttatcgacgaaaatcgcgttgttaagatcgcagactttggattagcaaaactactaatgccagatcaaacaaggacaacaactgggattaaaggaacaagaggatttgttgcaccagaatggcacaagaacatgcctataacatctaaagctgatgttatagctttggggttgtgttgttggttatcatttcatgtcgtcctcatgttgatgtaaatgttcatgagagggaagccattttggtggattttacttatgaatgtgtcaaggctaatcaagtgagaaatcttgtgcaattgaatgatgatgatggtgatgaagatgtggaagaggaagagttggttagaatggtcaaaatagggttgtggtgcattgaagaagagccaactattagacctgcaatgaagaaagtggtggccatgtttgaaggcacttttgatattcctcttcctccaggtgttgcttcttacaatagtactaattcttctaataacattggtggtgtcaccatgtgatttcatttcatgttgctctctctaatttcatgtctacaatatttctttaacaaataatatttttcttttggaagtaatgttcaaattaatgtttctttagtcctaggatattcaatattaatattagagtttttaacatgattggtgttttactgtatggagattaataaaagagttattaagagtgttgccaccaatttttaccaatatatatacatgaacatacacctatgattggaaacaagagttaatcattggaccttagttagcatcactccgagaagaataaatattgatttttatattccatattagagttataaaagtagaagcgtaatttgataaaaataatttttacataatatgaattataagcgcaaggatctcaacataatatatatagattaaaaatctaaactactaaaagaaagattatatctcttgaagcctttcagggtatctttgtttcttttcgtataattatcgaacatttaatccaataactttgttgaagaattcacaccttgatctttaagtattacagtgtgtactc

SEQ ID NO: 185963 - DNA, 1984 bp, Cannabis indica
gacaaaccttgtcccaagaagcagtatgaatcttgcttctctttccactttgatcccataagaacatccttcaaagtttttccacttccttgacaatgctttcaggaaggataaatatgttcatctagtagtttctgagccccaaaagaacagtctgaatcagttacattctactagcataagagagatgcctagtagcccaattatgaaggtgtttttttaatcttatccaagatttctccacaattctccattttccacttagtaggtctcaaaggcactcctaagtatttgagagggaatctaccttcttcaagacctatctcttgagcaattttttttctttcaaaaggttgcaccccaccaaagaaaatctgagatttagccaagttcacactgaggcctaattgattgcaaaagtcatcaagagtagttttgaggtgtcacactacagtctgggtgcctttactgaacaaaatgaggtcatcagcaaaactgagattgacaagattcagacttttacattgagggtggtacttgaacgtccctttttcagcctctttatgaagtctcctagttaaaaattccataacaagcacaaataacagaggagacattgcatccccttgtctcaaccccttctttccttcaaaactctcttgtaacctaccattcagcaccaaattataggaagtactcctaatacacagcattatccaattcacaaaccgagagggaaaacacaaatagtttaaccacttttcaagaaaatcccaacttacagtattataagctttgctaaggtcaatcttgattgcacacctagctaatgtattcttcctaccataattttttataaggtcttggaagataagaatactgtgagcaatcgatttattctgaatgaatgctccttggttttggttgatgaccatagtaagcaccttagcaagccttaaacaaataagcttcgagatacatttatacactgttgaacaacaagcaattggccggtagtccattgctttagaagggttctcagtcttggggattaaggtgatcgaagtttcattatactcctttgggataactccagaatcaaagaagattcagatagcaagaaaaaattcttcttatatctcacgccacattgacttgaagaactcagtgttaaaaccatccggacctgttcttttagagctaggaatgctaaataaggccatcttgatctcttttttggaaaaaggttttgaaagagcaagtttcatatcaagagaaagcttattacccttcaaattgaagatgttcacattcgcagtaggcaagtgatgactccccatgtaactctgaaagtgattgataaagtgcttaaccactttaggatactcctcaaccagctggcctttctcattagtgaagtgcacaattctgttctctcttcttttctttatgcaagcacaaaagtaggcagtgttgtcatctcccttcttcaaccagttagctttgcttctttgcacaagaaatctatgaagcaacttttccttgtcactaaactccattgcaacccttttttcttcctctaatttccccaaatccccaggattagcttgagttgctaactttgcttcttgtaatcgagctttgacctctgcatgttgcacttcaatatctccaacttttttgttaaagatcctaagctgatgctttaatctcatacatttaatgaagagccctttcaaaccattacttctgaccaatttattccaactatccaagataacttgcttatagtctttgtgatgcacccaaaagtagaagaacttaaagggtttgatgccaatatcactggcctttgcagaagagacaatacaagagcagtggtctgaaacagtttcccagctcatgttagcattagagttgggaaagatgcccaaccactcttcattttttagaacataatgaattcttgaaaaaacccgtcatt

SEQ ID NO: 185964 - DNA, 6003 bp, Cannabis indica
agtatataaccatagtcatatgtaagttcctgttatcacaaaattaatcacatttggttagctaagaatgctaatgacataacataatagttcaagagaaaaaaatcagtaattagtttagcaaaaaatgtgttggatacatttgctgctgctaagagaaaactaatgaaaacacaagagtccctcacctgcataggggggatgctatctgcagcaaataacacgactcgagcaagtctaaggtcatggtgagagttcaaaacacactgaacaaagaggttaggctcacagctatgattgataaatctagcaacatttccaaaggaacctgcatcgatggaaaattcgggtgcacattctgatatcttcccttttcttctgacagtgtgattttgtgggagagatacatcacgcaatcgcctctgccaataataatatacataaaacaaacaaaccataaacttttccaaataatctgaagtttatttgcaaaccatgtcaatcccaaaaagagtaaagttgagatgagattataagttggtcaacaatagagcaagatcccataaacttcatttgatggtaactatacctctcgcccctccatctcattgatggtttgccagccatcaatttcaaatatgtagtcattctcagagacattgtctaattcatcactcctcctaataactccaacgtattcacatactggcgaacctggaagaatataatcccatgacctaacagcccaacctttttttggagttcgatagacctgtaaaaaaaaaagcagttaaattacataatatgtcaaatgggaattcaaaggttcaaaaagggtgacgaacacctcaagtcgatgctttaattcccgcatggatgttcgatttacacatttaggtccacattgacattgtggtccgcactcaaaaacaacatccataggttcgaccaatctaaaatgggagaacaaatcaattggtgaattttgcatcaagaagaaaaatgcaattgaatagggaaacaaataaataaaacagaacaaactaaatttatgaggccaaaaaggaggaactgaaaagtaatgcaataaatgaataatttaactcgtgatgtctgtttgtcaatgcaactagacattgtttgtattcaaagactacataatagtgttcacaatacagcttattatttatttgctgcaaaattgatgattaaatcttaacctgccaccatcttgactgacataaggaaagtcgttgttatttagtcgagcacaagaacaagtctttggattagtacatttctctttgcaattgcatccaggaccatttgatgggactttaatgttatccgctacttgaatagatttaatatatgtaaagcctacatgatgccacccaccacaccaagaaataaataaagttttgaacccacaatattcttcacactcactaaaacaaagtaacacttcaaaaaaatgaaacaaagtaacaaactcatgtacaaaaaatccgcgaacgatttggctctcaccttctggtgctgaaggtggatcatcaattacattggtaacagggataggtttactttcttgaccattactaatgtccttgcagaccaacctgagaaaataacacattggcattaacatttatgaatgggcacatacaaaaaccaaagcttatttgtgatcatgacaactgatttcatacccaggtattacagactgagctttatgatctctcccgcctataaaatggacctgaaaattatatcaacccttcaaatattttgtcttcatctacctttgtcaaaagtaaaccgcatcatatgtttatggagaaaacttgcaaacaaagtaaatgagagcttatggttcaatttatttgacagtaaacgcaaaaaaaagtaaatattttggaaataaaaagatctaataacctgatttgtgatcaattcaggttgatttgaaaatcgtttcaacctgtatttataaacagtaaagccagcagtgcctttctcagcccagaattgaacaacctagcagaacataaaataataaacaaactcgaactttcaattcatggtaagttcatggaataatttatcatccattgtagtagcaccataattatgaaaaagctcaaaatgcagcatataaaattgttataacaaaggcacttaaccatgccagtgtatctacattgcttgtttatgaaatcggttacaatttctccttttatatcttcccatttcgtatttttatacatagaagaagagaaaagatattattttgttttaccaacttttcctttgttttaaacccctttattctggcactaagacagattacagacatgttctctaaaccacactatgctgaatcagtgcatcgctacagagaataacaatgcagctcgaactcataatttgcacttttgcagagtatgctaaaatttacaactattcaactaggtgaaggaaactgaagaaagccaaaccaaaatatatagatattatcataatagagcacggaccttgtacaaaccatcatatgtataaaccttgttactgtaactagcctgaaatttatgtccacgaacaactctgacgggtatggattgctccatattattctgcacaatgataaaaaagacacagcgaaagtaaacagttagtaattcactacaacagaaaaagatatgctataaactcgttgatacatagcagatgctgtgatgtttctcaacagaaatttaggaaagcataaacattaaaggcaacaaaaaacaattcaaataaatggagacagaattttccaggtcacaccttaagagccagattaccatgctttagttcctgatctttaatttggcgcttcttaccaagtaaatcatttccaccttcacctgtatatacaacttcttcagattcatcaacatcatcttcgtattggccagacagcacgattgctaatgcaagtggaaagatatagtttttaaacttgtcctgaagtgttaagattagcatacagattttcagtctgattattttttttagaagtcaacacaaaaagacaccttaacatctcgtccaaaaaaaaaagacaccttaacacagactaactaaaaaaaaaataatcaaattatcaaacaatcccaccctgacttgtcattgggactgactgattgactcaatatagatgttgctatcatcatttttcaatccaatggaagagcatgaccactattaagaatttagcttcagaatgttgtaagctaacaagaaaataaaaccaacaacgcaagaatttattttcaaaatgttgaatgctgaaaagaacaatatgttgttaatctcaacaaaacactggcatgtggcatcaagcaaaaagttgggaactgtaaatttcagaagttatttaaaggtagatattgagtttgacagagaagtttggatcgtccaaccattcaggacacatgtcaggtccagtcggaaaaaaaaaaagaaagactacagtaaatagttaaatagtcacataaaacatatcgatacacaacaaaataatcacattttcagcttctcccgggccacagatggcacaatctatacacaaagttgtttacatgattacatcggaaacaatcaatctaattgaagttgcatgacattaggattgaaatcatattatttatcctaagtcccatgtttggagattgtgtaaaatagtcaattccccaaaagtagtctcatttacgtgagacaagttataccaataaaagatgtgatatcactaatctcgcacttaaattggcgggtcccatccaaaatagactcactttttaagcttttttttattccttctaagagcatctgcattatagggaagaaagtactaaataggacttcttgcaagttatgacatcaatgatgaatggaaatataagtctaaaactcttttctgagtaacaaaattatcttagaaaataaaagttaaaaagtaaaaataggtactttcttacttacaataaagtaattgcaaggaaaaatatcatcataatgaataagacaagaatattaatcgtttctactgataatgtttagatacagcagcagtacctggccattagaatcccccatataatcaattccccttaaccagtgcccatgaagtccaacaacaaccatctcagaccgagagaaaaattgacgccccacctcaatacctgcataattataacttaagaaattaagatggctagagaagtgattttgaattgcactattattactaataggaagaatgagcatgcaaatcgcccacaaacagattataatctagataacataatccaagcaacaaaaatgtatttgaccaacctggtatatgaccaaatgttctttcaggtttcaaagttctctttttgaacatctagcatatgaacatgaaaaaggtaaattatgtctaatactcaaaggcagaaaagaccaaattctagttaaaccaaaacaataaattaacagcgcagaactccaaagcaatttcagagagagagacagagaactataggaggcattcagaaaaagttatactacaatactcatgcataatcaatttcctacatacaactccaaagaagaacaaaattccactgagctaattattatgaaggggagcatagatgccttttcaaaaaaatatagctaaaaacaaaaatgagatgtgactgcagagcaatgatttcgaccaggcagaacatcaaatgcttcatgtagacaagtgattgggaaaaaagacatagaacctctacaatgaaaatgttgtcttagaagtatagcttttgtactgataacttacctcggagatcaccttcaaatcaggtcgcctcctaacattgccttgaggttccccgtcattctgcaaatatttgcatggattaacatttataataatatggtgaaggtcaaccaatgttcccagatgacaatgaacatcaaaatgaagaaattgttatcatctaatttccaatttgaaagatgaatttaaaagcacctgccgtataaacctcgttgcaaaatgcattatagcttcaaaaggcttttttcttatcaatcaaaataaagtacagacaaataacaaactagatgagggttcaaagctgaaagatccgactctttaagaatataagttacccaacattcaaaatttaacgtaaatcattttcttaagtagccaattctctaatccaaattgtcaatctccagaaatcccctcccatctttttgaacaaaatttacatgtctatctaagaaagccacacttacatcattcaaggtataactcaatctctcccatctgtttacttttcttcataacagccaaacatagaatcaaaccatctaatttagagatataagtgcacaactataagtctataataaggaaggcatcagactaaagaataactaaacacagtatcatgttaaaaaaaagttggttgatgaggggtcaaaaaaaaaaacctgttaccttcttgcatctagtctcctcttcctgcaggtgagcaataaacatacattatcaatcaaataatattagctacttggaggtatatttacatacatttcatgatcgataaaggagaagatttgtaacctgaacaaattggaggtgcaacaaattgaaaagtctcaatgactctttgactcttgcagcaaagtgtgcatcattagtctcatctttcagagaagtagccggctgaaccagcgattgaccgtcatccaaaatgacaccattttgattggaatgatcagaatcataatgtgagtttttggctttgacagacttgcatttgttcaatttaggcattttggagataggtgtagtatcatctgcattgggaggcgtccttttcctggtgtgactgccatagtacggccttctatcttctggaatagtttgcagtctggggctactcctcgggctagccattgattttgacagaa

SEQ ID NO: 185965 - DNA, 2609 bp, Cannabis indica
gaaaagatgttactggcaatttcaaggctagaataaataaatgcaagaaggagttgaagctgttgaagaacaagagagactccctgtctgtcaatcggtatatagaagtgaaaaagcaactttttgcaatcttagatcagaaagaggctttttggaaataaagagctaaacaattttggctcaaggatggggatcagaacagtaagtacttccatagagcggcaagtaacagacgaagtcacaaccgcattgtgaaactgaaaaatgacaatggcgattgggtagaatgggatcatggattggaaaatgtgattgttgactacttttcgaatttgtttgctactgatggtagtgcttgtactgaggtgattgactgcattcagtcacgtgttactagccagatgaatgaggaattgactaggaatgtctctgtagaggaagtgaagcgagcagtttttgatatgcatcctgataagagccctggtccagatgggatgacccccgcgttttatcaaaaatgttggggaattgtttgcaatgatgtggtcagccttgttcaacaatatttcagtacaggagttcttccaccgggttgttgtgacgctaatatagttcttattccaaagaagaaaaggcccgaaagaatggttgatttaaggcctattgcgatatgtaatgttctgtataaagtgatcaccaaagttatggcaaaccgaatgaaaccttttatggatgaaattgtggcggatactcaaagtgcgtttatttcgggtcgtcttatttctgacaacataatggtctccttcgaagtgcttcattatttaaagcagaaaagaaaaggaaaagaagggtacatggctcttaaattggacatgagtaaggcttatgacagaattgagtggggctttttgagagcgatgcttgctaaacttggcttcggtcagtcttgggtgaacttagtcttaaattgtgtcacttcagcttgctataaggttactcatggaggacgtgacaatattggccctattgtaccaagtaggggaattcgtcagggggatccgttatcgccatatatttttatcctttgtgctgaaggactttctgcgcttattcggaagtatgaagatcggggctgggtacatgggtgtaaggtggctaatagcgctccaaggatctctcatatgctctttgcagatgatagctacctctactgtaaagctactattgcggaggcggtgaaaattcaagagttgcttcacaaatttgagatggcttcggggcagaaagtgaatttgaacaaatcttcaatcttttacagtgtcaacacagacatcaggcagagatatgacattaatcagttattgcatatgatacaagcggatgaaaatagtctctacttgggcctgcctagtacactggggagaaataagtctgcagttttgggctacctcaaagatcgagtaaggaaaagacttcaaggatgggaagctaagatcctttctcgtgccggaaaggagattctcataaagacggtggctcaatctttaccgaattatgcaatgagtgtttttctgttaccggtggagattggtaaagatattgagtgtcagatggcgaacttttggtggaaaacatcctcgaggggcaacaaggggattaattggatgtcgtgggatcgtatgtgtaagcataaatcagtgggtggcatgggctttcgtaatttacgggacttcaatcttgctctccttggaaagcaaggctggcgcctactttctaggccaaactctttggtggcacgagtttacaaagcacgttacttcccaaatgagagtttccttacagcacaattaggaaacaacccaagttttgtttggaggagtatttgggaagcccaagatattgttcggaaaggtacaagatggcaagtgggagacggcggctcaatctctgttttgggggatccgtggttgcctgatgctgataacccgtatgttctttcatctcatccaggcttggaaggggtaaaagtttgtagcctcatgtgtccgaatgatagatgttggaatttggagattttgcagaacatgtttggggatagggatatcagtctgatcaccaaaatccctttgcaagtgtccccgtatcccgatcaatatttttggcatatggagaattcaggcctttacactgttaagagcgcgtataaccttatccaacagagcaaggggttagtctatgaagatcatttctccactttttggaaacaattatgggcgttacgcattccaccaaagctcaagaatttgatttggcgttcaggtacgcagtgcctcccaactatgtgtcaattgcttactaagagagtggcagttagcgcattgtgtcctgtgtgtgaacttgaggaggagtctatccttcactgcttgtttacttgccatcatgtgcatctttgctgggaaagagtagggataggaacttaagtacctgtcaatcataattttttatcctggatggctcttcttttcgagaagcttgacgttgaaatgaaagggatggttgctactctttgttgggcaatatggaatgctagaaatgagctggtttggaaa

SEQ ID NO: 185966 - DNA, 1768 bp, Cannabis indica
ctagataagatcttaggccttagcaaataaaaaaaaaaatcaatgaaaccattagttatgttttctaaaacaaactattgttaaattaaaattttagtggtattagattagagcttttagagaaagaaaaataagtttttgaagtagaatgtgtgatgctgatgatggtattggattgaaacctgtcattaagacttttagtgttaaattattttgtttagtatctgtaattgctcttccaatttgagattcctattctaataattttagatcattgttagaggtttgtaataagtatactatccaggttgttcttaatatgtatttttaaatataccaattttcatttttacaatgtacaattaagatcaagctagctatctaacatgatgtttagtttggtaacggtgataaatggtttatccaataacgattatccacgtttaagttggaaaacgacatatcagttttaaatataatctacaataacggcacaattttatttggtaacaaaatgttcatcaaagattcgaaggtggttgacgttgtttttttgcaacatagcttttaaaaatgtgttactttaagttaatgtagtttttgaagatcaagttctataacattaaaaggtttttaaaatgtaattttatcagtggcggcctttttctatttcatataaaaacaaccaataataacaacatagaatcaaatagtttggtacgggtggctaatggagacaattcaagttggaaatttcatttgcatttctctggcaagagagggtagccatctctctcctctaatctttttcagttgggctactctttcctcttccctttttgctgcttcctttgctgctgcttctttagcttccattctagccaatgacttttggcatgcttttcttgatgcagccattatatattctccatcaacagtaacagattggagtctttttttgaactgtaacccaaaccaaaaagaatttgaggcaatgtcataattaaaatcaggtggagagtaatgaaatccatcatacataataccttctttgatttctcatcaatttcttttccgggaagaattttcggtcttttccttggttcttgaggttcctctggtcatataaacatacttttcaattacaatttctcaaaatttcatgacagcaactggcaagattaaccgggcaagagaagaaactcaaagtgtaatatggcaatttcgatttcaataaggtgtgctcaaagcagtcatatactgattgcgacaaagatcttgataagcaaaccagttttgtagaatgcaacttgtaaaaaaaaattcacaagacaaactaaactataatgcaagatgagcaagaataagataataaattactaatatgaggatgataatgattaattaggacctggtgtgtaagaacatgtaagcttggctgagcaaagaagaagaaaaatggacattcatggtaaagagtccccattatgagtatttcgaggcttaaagcccaaagctttttcaaatgaagaaaatagtgattgacagttagttacttaccggtaggatcaagttctattccagggttagaattcttaaacaaacgaattacaccttcattgatggtatcgtcaactggttcattaataggatgatctttcaccatcaccaaactttcctctaagatttcattcaaaagcttctgtgcctgataagactcaagacacttatttaagtcaggaaaccttaattattcactcattatatt

SEQ ID NO: 185967 - DNA, 1177 bp, Cannabis indica
gtcaaaatcaaaattgaatgtaataagtaaataacctttgagattttagtcggatgcatattcatcagcacggtgaatggtaactttaaaaacattagcagatcccttaagaaactcgaaaatgcagacatcgttaacttgcaaataattgtccttcgtaaagtctttccaaccaccactaaatacggctctcattttgctattgtttttgttctttagttcaaattgaacagaacaatatcttctgtctgtcaaaagaatgacaattccctcatttttaaggtaatccttcgcaaagtagagcggtatagtctgaaaatgtacaagaaaaatagcgcttactttacaatggtcaaaacccaaagcaaagaaaatgttgctgcagttttaagtaaaaaataaacttaccaaactacgacctgaaccaagaagtgatggttctataacaaccgagaagaaatgatttttcgatttaaatagagccctttcaataagcctagatttttcaatgaacacttgctggttcggacatgaactgtcctcgctgaattcacctctgttgcgcaccaaaaatgttcttccacccaccatgcaatattccttgggctctgacaagatttgcacctaagaaatgttaaatgggaaaagcaagagtatgtagtaaagaacatacaataacgcttgtttgtttacctagagacttgaagaaatttgtaccaactcgaaaaattaaaacattaaatgcaatgtacatctccctgagcgaagaacaaacacacaaacatcgcctactttcagattattgtcctgaacaaatgctggccaacctgcctggaatgtgggtgttggtactccattatacacttcaaacttgtactccacatcccaggtcttgtagcccgcatgccaaggactactattcattccatccccatatgagacttgaaggggaattgtatcatcacatggctgatagtcattacccgttgcaaactctactggcaagttctacagaaacataaagaagaaataccacaacatacaattatcaaaagtgtagagaaaagattaagggcaaaaacaaggagaaataacaccaggatttaacgagttcgagccatgtgcaatgccctacatctcggttgaacaacaaccatcattatcttcattaattacc

SEQ ID NO: 185968 - DNA, 1977 bp, Cannabis indica
cttccatgtcaacacaccatcaactttccaatcaaagcactgaatcattgcagctagagtggcctgaacaaccagcattgcaagtgaggttccaggacaccctcttcttccactcccaaatggcataaaatgatagttttgacccctaacatctaactgcttaccatcattcccattctcatcattatcttcactaacaaacctctctggcttgaactcaagtgggctttcccagtgctttgggtccctaccaatggcccaaagattaacaaacaattgggttttttcaggaatgtcatagccattaattgtgcatctttcagttgattctcttacagccattggacctgttggatgaagccttagtgtttctttgactatagcttgaagataaggaagattaccaatatctgactcttctactaatctggtttgtccaacaagggtgtctatttcttctcttgctttctgcatgatattggggttgtttactagctctgataatgcccattctattgttaaggcagatgtgtctgacccagctgcaaatatatcctggaaattaaaatttatgtaattattgtttagttaccattttgatattgtagtttgatagtatgtgagtgtgtacagatttcaaatgacactttctcatgcatgctagcttgtaataatagaccaagaaacccttatataaatatatatatatatatatatatattatattaattatcatataaatttgaaaaccttaccaggatgaatgctttaatgttttctcttgtcaatttgaactctgaactctcatcttctgatatatcaagtaacatgtcaagtaaatccttcactgtatcatcctcactctccttcttgctcctcacttcttcatgctctttaatgatcctatccatcatggagtcaaacttatcacgaactttcttaagcctttttccaaatccttgtaaatctaagttcttacagaaccaaatatagtccttcaaattgaattttccagtaagctctgcagtttctgttatcagcttcctaatctcatcagcttcattatcatcattatcagaacatgttttccccataagcattcttgatatgacattgttggaaagcttcattagttctccttcaatctcaacctcttccttttgatcagccttttttagcatcaaatgtaagaatttcttaatctcttctcttctaagtggaagaaattgatctaatgttctgccaccaagaagttgagtcatgcaaattttcttcatgaacttccaataaggtccatatggggtgaaggagaagtcagctgagccatatgtaagatagtctaccgcagtcatctgagggcgattcaaaaaggaagtttcttgtgtcttaagaaactccttcgccacttctggtgtggaagcaactacacaaagaacagagccaaggtagagatgaattaaaggtccataacggttagagagtttgtggaaagcttggtgaggtattggaccgagaaggtgaaggtgtccgattattggaagggccattggactcgggggaaggcgaaatttggtccgagttttggtaaatatggctcggaccaacatggtggagacaatccacaccaggaaaagtatgatgtagccttgaaaatctgtcatggttgaactttttaattgaagaaaaaagaaaaaaacaatgcttaaactaatgaggtataggagtgattataaagaagaaaaagatcaaatatatatcctttgaggcctgcaattacatagagaaaacaacaaattttgtgcaagttagattaattattgcaatgagacttagagaagagttttttctttataatggaatcttgtcctttagaattggtcaatgccgtacctattaaagctatactagaattttaagtattttaatgctaacatataatatgattagttccataatggggtaacagccgtccttgat

SEQ ID NO: 185969 - DNA, 1665 bp, Cannabis indica
agagagagagagagagtactactactactttactacttacggagaaatgctgccacaagagtcgccacacccaagtacacaaattttagacagacctgatattttgggcagaaccaaggtgttataaacagacatacacagatgaatgaaagtgaataaatgaatcaaaatcatttttcttaccttagaaacaatatcaacaacatctttgctggtttggttgttcccaaaagaattgatcatctctccgaatagaatggtcataactggcagacccaatccattaccaatggcacccaaagtaccagcaatcatcaaaaagatatcagtggtatctgcaaaggagaagagcttgtgaaagggaattttctcatctggtactttgctcttctctgactcttgttccttttcttcattattattattattatttttattactcttggtagagttcaaagctgtgtcttcttctatctgggttttggaggagctggcctcaccctcttggccattctctactgccatggctcaaaacactcttagccccaatatccaactgcacaaacaagtagcaaaggagaacacagattattaatgaccaaaaagtcttttaattgagcacgaatggaaatggggtgtgtttatatttcaaatcaaatggttaaagaatccgacatcataatataatctagaagcaggcctgtaagtactaaagttaaaaggtaaaaaacacagagccaatttttttttctttttttgctgaaaagagaaaaaaaaaaggttgacttggttttgcaggcatatgtatatctttaggctcaacacaacacccttgttttgttttaatatctcatttcagacaagacaacacatgcgttcaagtacaataaggctaagcatagttattgaacaagtagttccacagccaaaaatacaaaacatctgagctttaagccaagatacacacagaaagtacaaaagaatgaaactttgtttgtatttggtaagaattgaaagaatcagtacactaaaattcaaaagaagaaagaaaaagaaaaagatttcttttatttttgaagtttgaagatgtaaaaggccaaaagggtacccagcaactgtggaagtggctcacaactgcggctggcgactccttcaacttttttgcacagagagagagagagaggtgatatgtcatatatcaaatatggtaatatagaaaataatatatttatatataagttgagagagagagagagagtaaatgattcgttgttgcttaatgggcaagcatcttcatatataaagtattcgatataataatacaaaggagggaatagctgttcccatctaaaccttgttgttattattatttggtcaaaactgcgaagtttcgcttcacaaaattctacattatatatattatacttgtattaaatcatatattatatattatcacatcattcatttctattgaataaaagttgttggtttaacaattttattatttttctattcacttaaaattaattattaattagttaaaaaatactgtcaaattaattaattaattaattaattgttattttaaaaattttattattattttacttaaatatttaaatttaattatttaaaaataccaattaaataaaatatatattttta

SEQ ID NO: 185970 - DNA, 4344 bp, Cannabis indica
cttccatatccgacctatgtttttagacactacaaaaaaaaatccatattgatttgtacaatacaataataccttataaataataaataaataaaaaaaatgaaaacatatatctacaaagttaggggaagagaaaaagaaaaatgaatcactagaaaattttgtaaagtaaatgaaaatgcagaagaaaaaagatagatagctttataagtttggttccttgtcccaatacaataatagatggtatatcatggtatgaagatcaacaaaatgggccaccacatgaaacaaacatttggtagtgacccatgttataaattattattaattattatcaggaaaattataacttaatatatacaagaaaaaatgacaaatttaaaaaaaaaaaaagagagaaaagaatgagagaacacatgttctcatgtggaagcaaaattagcatcatttactcactcactctcacctctccataaatcctccacaaccccccttcccctccaaaaagaatgatttccaatcaggagaggtaattttttttgaaaaaatcaatgtaatttgcttgaacaaaacttccttttattttcttaaacttgaagtgatttctctactgcccccaccaccaccaccggcagaaactttcctgtgccgtctggagccagacctcctatctctcccacgccgtgttgtgacccttcgaactggggcatttacaacattttcattttgtgagggtgtttcgaataacgacattggtggttcattgattggagtaggcggtggtggcggtggcagtgttggtggcggtggtggtggcggtggcagtactggtgttggtggaggaggtgaatgagcagccaatagctgctccatgacctctctatgatatttctacaagaagaaaataaaaatgtcaaaccactattccaggttggacttttaactataaatcgaagaggcatgaataatcgaatcactaagtttgggaaagacaacctcatataacacaacagaatgttatgaaagaaattgagcttatataataaggtttatattgtgatataaattcaagaaatcagactggacttgtacaaatgtcagtgctcaacttagttgtgtaaaaatataaattttcaaacaaaagattcatttatgcaaagtaattacctgcacaacaaagttgcgcctctcgcagtccaggaacatgttgatagtgtaatttgtttttgccttgatcttgtccctgacagtggaaaaactaatttggtccctggaagtaaatcgatcaacttcgttgaaccaaagacaagtaaatagattgcttataggaatatgctcccttattataacacatccttcaggaacatctgcataccacaaatatatcagagcttaacctaacaaacattcacaaaaaattagcagtaaaaggaagacaaaagaagcagcaccaaccacttgttatgggaagcttttcctcggtgtatggggtcaaaccctcctttctgtagaaatcaacctgaaagtctatagatgcattatcgtattttccagcagctttatttgcctcagcttcaacaaatacatcaaagcgtttataatgtttagatatagcaaatgatgcatttttcctccacaagaacctgaagcgaattatgaaaaagaaaaatgaaggattcagattctaaacacggatgttaataatacaaataaataattaagactatcataaaccaccttgtccatttgaagagtgcatatgtaaatttccactaagcatttgtatgtttggaacagtgcaacattttcacaggttttacaccattccaactagaaggctaactaaaacccgaaacacatgcatcattttatggtctttaccacatgcaatataaaataatatttgggcttaaaatttaaatataactaggataatacttattgctgctgaacttagttgattcgctcgtaccttcaatgcaaagttctgcagaatagaggtaatcatttgaagcaaaacttgcaagcattgcaaaaaatgctgattagttagttgtcttcatttgtatcaaacagcacccattacaacagtttaaattaaatcctagtaggaccacatgataaccatagatacactacacattatgtatatgggaaaagatgcgtaaaagttttaccattaaaaaattcactcaagctttcttgtaatgagatgggagcctttaatataagaatcaaccagttgaacttgctaagtgaatttgtaaggagatatatatatatctactgattcctgtctttcgtaaggaaatgaaagcataaaaccagacttacctttcaagaacttggtatggatcgaccacgagctcaagctttccatcaacccacaaggaaaagcgagcatagggaaacagcctatgcatcaaaagcttgggaatctgtaaccaaaaaaatacatatcaacgtgcttgtaaatcctaattgtttatcccctttgagacattaaaataatccagcttggcaaaatatttcaagaaaacaacctttcccgtgcgcctgccatcagaatatggaaggttacgtacaacgacaatcctccataccccaatcttcctgttgctgtccattgtaccagcagtcttcacataagcttctgtcacttcatctatgaacatgaagaagcaaacagtctccttggaatattcactaatgttctttggctggtttatttcatcaaaattgcctaaagaaaaaaggaaataagtgattagaaattgtattagctagttaagaaatgttcaatcaatcaaataagacagaggattaccaaatatagcagatgcaacaacaacaccttgacattgctccatagcaaggagatcagtctcatctatatcaaatcccgtatttcgaccaggtctaattcctcgaacgaatctgattcatatacaacacataaatcaaattcataaaacattacatattcttaagaaaatacatagaaaagaaaaacagataaacaaaacatacccacaatgcatgctcatcgactctcttatatcataagaatcagttctttgagctaaagtaggatagccaccgaactccgagcccccgaattctgtttctttagataaattttcttcataaatataagtcaaattcttaagaattggagaaggtgaagggacctttggcattaaagccactgcttcttccacaggaaggtaacatactggacaagctgataagacaaacaagcaaattcaatagcatacaaaagcaatgaagaagaatgtattaacaacataagctaatttctgtacgtatcaatggagaaaggcggtacttacgccgcggcccagttcttttcttatcagctggtggaggaggcaatgtgaaactattacaaggatgccctggtggaagagtatagcccagaaaaacagcaggaggaggtggtggaaaaaccaagctgggattctctactgggattattggggtattcaattgagaagaagaagaagaagaagaagaagaataagaagaagaagaagaagaagaagtaatgttgtttgtggctttgtcctcatatggaggtgaagattgagacaaaaataaagtcatcgaattgttcatagtaatgatctgaacatgatcactttgtgaatcttcacctaattttaaaaattaataagacaattcaaacaaagaaattctaagtcaatacaatacatcatattatatcaaatcaaatgaagattagatcagtgtgatcatatcaaacaaaacatgtagaattgaataaaataaaaagagaaccttttccagtacaaaccagacgaaacggcggcggaaattaacagaggaggagcattccgacctttttccggccggcgaacttgcagatccaatgaaataaagtctctctctcctttaacatcttggaaggctttcgtgaagcttgaattggaattactacaccgttctgaagctgtttatccaaagagccataacttccagaacgaattcccaaacccaatgaccctccacctccagccattgtcattgctccgccacacccagatatgcttctctcatttcattcactcaagtcactcagagatcagatttaaacaaactccaccacccaaattatcattgctccgccacacccagatgtggttctctcatttcgttcagtcaagtcactcagatcagatttaaacccactaccttaaatcccaagaaatcaaatacccacttacccaaaactcaaaattcacacctgaaactctctcactgaattgacccacgcctttctcttctgtaaagagagaacct

SEQ ID NO: 185971 - DNA, 1191 bp, Cannabis indica
ttaaacagtgatgcaggaaagaagggaaaaaaatagtataaaagagagcttggaataaagcaaattacctcaaccatgagaacaccaggcattataggcctctcaggaaaatgcccgggaaaaaagttgtcgtttattgttacattcttgattgcaacagctgaaactccaggattgtattcgatcactctatcgactaatagaaatggaaacctaaacgacaaccaaaatcaaaaatcaaaagctcatatgagcttaaaccaaatatcatttgtttataattaaacttctatcactatagctactaacataacaccaatttaaaatttatcagaaaacgaaacaataaaaataagattctgaaaatcccaacatgggttattgtgagtttggttcaaaaatcattttttagcagataaactcacctgtgaggcaaaatttcacgaatctgatttatgtccataactgtgggaaatgcttcatatcctataaatatacataaacaaacaaatcaaaagaaacaagtcagtacccaattcaaatcaaagaaaaacagagcaaaacccagtaaagagaatcgaatttcagtactcaattcaataggagtctcttcagtcgattgttttgcagcctcagaagatgaacaatacacactgaaatgacttgaagaactatcattcttagtcttattcgtcaaatgggtgaacacagattgagatccagaattgagcagagagagtcgagaagaaaaggagaaagcgcttaggcgaggtgagacaagagatgtgggagaagtagtgggagttcgaaggagaatagagttggagagagttatggtggccaccattgttgatcgaaatgtaagagaatagagaggaaatggaggcaaatgtggtgaaggagatggagaaggagagctaaagggtgtaatggacgacaagaacgaggagagcttttttggggatttaatttattattggtttgtttggtttgaaaattgtgagagatggcggaaactccaacgatctctttcttctgattttgtgtgagaaaataaatttagcatttttgtctcccaagttagacacaactacaagatggattctgttaaattacgtatttatattgtattattgttatatggggattataagatcatgtcaaaattcaacaaacatgatttagtagata

SEQ ID NO: 185972 - DNA, 3362 bp, Cannabis indica
aaaaagtgataataaaaagaaaaagtaattttatgttttcgcaattattaaatacatagtaccttttgagggaatggggtcccacattgtggttgcagccaagcaggcaatttctggtggcctgatttgagcaactgagcttctttttcacaatgtgaagcacattcggggcagcaattgagtttgtggtcttgtaatattggcttggtttctgggctccgagagaacattatccttgagccatggacactgcccaccataataattttcaatagaaaggtcagttcaattatgtggtggtgggaaatatatgattttaactttaccattaagacatgttgtaataaagtaaatgagcatatcgacacgccagagatattgtctactacatgttatacaatatttcatattgttttttaactttcaaccttgaactttgaactttgaagaatgtatggcaggaaataattgaattcaaaagctattttgtcgttaagcatgcatgctttcaatatccctaaaaagctgatgtctttttcggtacgaaggacatgcatttctacacaacattattatacattcagacatgtaaatccgtatattattacagttgaaaagaataataataataataattataataaagatttgaaattacgatcccagctccttcgatcttcaacaaaaacatgctgtttatcatacatattatattgtatttatatgtagataaggctgtatacctgcagagcttttctaagtaattataaagctctcaagtatgataattacttgatttgtaccatatctagattcctctaagcaagaatattggaatataaaaaataatcatttcataagcacataaatgaaagaacgacaactaataatggttcgttattttaatttatttttccctctcttagaatttgaaattggtctgtcggtgaagtgaaagcatataaagctagcgaagaataaaaaccataaaagaaagtgtcttcgttcgtatttgtctctcaccaaaccgcatacttttttttctcagcggttctggcctctggggttaatttcagagaccacgtattgtactctcaccacagcagaaaattaatcacacacaaaaataaataaatgaacacacacacataataatattatttaaaataaaataaaatatcacgaaaacaagaacaaagagagaaaaaaaacctggtaggagcagctgcatggagactcaaaccgagtcctccagatggaacattaacagcttgaagagcccattgagtctcaagcggagtttctctcatttgacacttcatgtacgtctgaatactcgccgtagccactatccacaccttcggcttggacagaaataagcttgaaatctctgaaactatatgatcagctggattataaatactactggacactaatcctcctcgaccgtctgatctctgatgatgatcatgatcatggtcctcaacaatcgtccactttaagtctccagtatatataataactccttctcctccggacacaagacactccacttttctcttcagctccaaaagcttcctctccacgtcttctcttttcatgaacttgaaagaaatcggggagaattgaaacttaacgaaatgggttctcctaagctcctctggaacctcacctctctctaaccttcccatcaattcgcaaactagtccttcggttacagacactgagtcaccaactatcaccgtgttctttcttttcttcctcaagaggacatcaaacacaaccatgatatcctccttaaacttggtataatttcttccctcttcgctgcctttcggttgtgaaaacagaagcgggttttggtcagaagagtaaggcaacaaatgattatgccagaaatttggtagcaaaaagctagatgaagaactgaggaaaacggaggtgttaatggaagttgaagagtcttcctccagattgttcttgactgctgtactagagaagccggcttctctcataacccggctaacgctgggatcatccaagatggagatgatgagctgctcaagctcaactttgattgttaagagtggttgagcttgctgatggtgttgctgctgttcgatggagccacgtctctggtgagcttgagctcgtttgagagcggctatgagggcgttggagagagacggctggtggtgagaatggaggagaggacctcctgtggtaggaagtcggttaagtgccacgttgaagcaaagctcaagagctctgcattgaagaggctgctgctgctgctgatgatggtgatagttatgaatattggtttgaatgttatgatgatgagatttgagacaagccctcctcaagagactagctctagaggtgagcaaagtggcagccacatgaagaggagtgacctgagcatggcctctcctcttggctaaccccagagagtgcttcaatactgaagcagcctccgctgttagtgtctgttgtagtgcacaaactcctgagcgcatcactcggccaaaacccaccccctaacccccacccactaactttcttgtcaaacaaacaagtacccacttaataaacttggcttctatttcttactttcctttattattattttctcctctccccccctttgttgtgaaacttcacactagttcttttcacaaacctttgtttttccctttctttctttcccaacaccacacaaactatcctagttttctaaccctctgtaggtatatttttcagaataataaacgcttggttttttggtacctcttcccctcttgtgcaagtttttaggctctcacaacaacagtagtatagtacctgaaatggaagtagcagatagtgaagttttagaaagaagagtttttcagagcttgatttgagcttttactagaaaacccaggctagaccacgccaccaccttctttatacttcctcttcataaaagaaaaagaaaaaaaaaaagcttaattttatatttatcggggagtgtgtttctcttttttattctcctttcttttgttattatttttgctctctctctatatatatagtttacagttaaaacctgaaacatatttttttatcaccctagctatatatattttgtcttatgattagaaatgtagtttgggtagataattagtatacaataataataaagaataaatcataaataacgctttcttacgtatattatattgttattagtagaattatatggttttatataatttaatataatagttttaaggaaatattactatgagagtattgttatgggtggtaccaaacaccactataagacgatattttataattgattagcggttttttat

SEQ ID NO: 185973 - DNA, 4845 bp, Cannabis indica
gaattgtaatattatgtgatgctgtgaggtgtgacttataactaatagagagcaaaagtaaaatgattgatcagttttccagaaaaaataaaatccttttaagtcattacacaccttctagcttcttcatcccgtacttttgcatcaaactctttgctaggaggatacttcggcaagattgaaggatcacatggaagaggttttactgtaaagaactagaaaacaaaacaccaatcgaacagtcagaatagaagacaaagtaatgtttgtgactttaataacgatttatgttttgacaatcacatgaaaacactaaaacaacaccaaaaaagacctgaccgtccattttgtgtattggttcacacaatgagagatctatacctcactcttgagagcagaagctgcagatccacgatcagcaggatctatggaaagcagggtctccataagtgctaaagccggtgcagggaactccttaaaggtatctgcaacacagcgtctatagggttgctggggcttaaatattgttgcatgaggcaacttcgattttctccagtaatcctcagaaggagatccacaaagcttgaaaattttgtgtaactgctccacctacaaggaaatgcgagaaagcctcaaagacctaaggaaccaaactgaccctatacatgcaaaatctaaaagactagatcaaaatttctgcatgattattccaattcaggcaccagaatttagacttgtttgtttcagtgtctgatttataagcaatcatacaacttacaagcaccttatatccagacaaaaagagtaaaaaatctaagcaaaacccagtggagttgcatgtcaaaattttataattattaaagacatcagctaataattagtaaacaaataaatttcagaagcaatccaacgacaatgtagtatagagagagtatttgtgttttaacagagagaaatcatattttgtgacaacaattttgtgctgaagcacttatccaaatatccatatttacaattactaaacaaataaatttcagaagcaattcaacgacaatgtagtacagagagattctgacaagtgaacaacaattttttctagggtaagaaatactacaatttcaaatgaaaaaatctttagtacctctgttcttccaggcataataggtttgccggcatacaattcagcaagtatgcaaccagtgctccataaatctacagcagttccatagtacgtggcaccaagtaagagctcaggtggacggtaccaaagagttacaacacggcttgttaaaggctgattttgatgtgggtcaaaaaaacttgccagaccaaagtctgcaatttttaatattccattattatcaataagaaggttagaacccttgatgtcacggtgcagaaccccacggccatgacaatgattgagtccacataaaagttgctgcatgtaacacttaacctgcaaatgaatgaactaaacatcaggaaaggcagcccatagttaataagcactatacctaaatgccttgagttccaagctaattaacatatattaattaagggggcgtttggtatgaggtgttcaaaaataatctgattaattggaataataaagcggagaatatgaatgtttgtaaacttattactgtgtttggttatgcaagggaatatccagttagattactgttcattggattatattgtttggataaataaaagaatatgaaaagtgttgtgaaaagttaaacaaaaaatattaatatattaagtcaattctattaagattgaagggaatatatagaacccacatttttggaagtatttaagattaccccaatagagggaaatcttatttccaaagtactaattttcctatacttaaaaataaaaaaacctcatactaaacatggttaatgtaaaagattaccattcccatgaaaagattataccataccaaacagcccataaaaaaccaactccttatgcttatgtttgtaaagatatgcagcctgaacaaaaatatgactatgtactgtagtaatacaaaacataacattctatgcatacatacctgagcttccgtgaacttcaacccaggatgtgaagcaagacctgctaggtcatgttccatgtactcaaatacaaggtacagactgcaagacatccttgatgtaactaaaccttctagttttattacatttggatgatcaagcctacgtagaatatgaatttcccttgccataaaacgaacactctcaggctctaggttgtcaaacctcactttcttcaaagcaacaattttcttttgatcaagatcacgagccctatagacattactataagttccctggccaatctgcataaacagatataatcaaataactaaagtgagcaccattaaagaatagcatacctaggttgcagaaacaaagaatgtaccatgcaagaccaagtcaacacacagcactagatcagtcactgagcaatttaacgatgttaagcattatattgactgtattaaactaagtaactgccggtttctttgtaaacatcaattaattgggagcaggaaattccctccctctagtcaggataaatctaagtaatgaagcaagttgaatgcttgcctaacataagcaagaaaaaattattttaaagtattccaatttcaacgtattcttgtattgttcatcgataataataataaaataatatctaaaacaccagaatagcaactctatacagcttaatgtgaaggggcatactttatccagcttctcaaatgagtctgcacggcgtggcacccatcccctgatcgcctccccagccactgcaactagccaagacggccaccctgctgcaatttgctccccttcagaagccttaataatgctacctgtagctggatgttgagcaaccaaatattccatcttctccctctttctctcattattctcaccatgtaatcgaacaggcccatttatttgtttatcaatcaacattgctcttccattattactatcgtttcgatctttggctcgatatgcttcctctcttcttgatgaagctaccctagcagcacgcaaatcagatgacgccttgcttgataaccgctctctggggctctccttgctatcatcaatagcagagggcttgcaacagatgcaacccatcacgcaccaagaccaaccccaggaagaccctcctcctttggaaccaatgtttacccccctcaactctaacacattacagtatagtcttttctttcatacacataagccctgaactcaattccaaaaacccatgataacatttgcaaaagatacagagcaaaacttgtccaactaaaacccagaattcaagtcatcccacaagcatatcccgtcaaccacagagactcatttccaacaacctaacaatgttatttagcgagaagcaaaaataacctcatatttcaccaacccacaaccaagaatcttcaaaatcttcaaacaataaagtgagtcatgacacaactttccagaatgctagttctcaattctgaacgggtaaaaaaactaaacacagtccttcacactaggtaaaaccctcaattccgaaaccaaaatgcaaaaatcttcattaataaacataataaatcttcattaaacagtaccttgataacggctgttgttgagcagtaaatgcagtggtccgtccaagaagcgaacccagtgaaagaagaaactgaaaaatgtgcgtagaaggatattgaaaaccctagatactgatccgagtctagaagaaggaagacatggatctagggggaagggatttgggagacacgtagagtaagtttcagagaggtaaagaaatgaaaaataaaataaattattaaataaatttgtaaaataagtaaataaataattaattaattaattaattaaataaaatgtgtatttatagtgtgcttgtggagctttcagtgaagagagagagaagcttgtgacttcccaaacccaaggctaatagacattcccttcaattgaaatatattctcacgcgctctattttaataatgattttatttcttttaaaacaacaattaaaaaaaaaaacttatgttatgtgacactatagtagtactaactaacacaatgtttggtaggagggagaagtggagggatagagagtagagaaaggagagaggtgggacttgggaggagataacaaatttttttatttggcaagagagattgaaggagagaaaatagaggtgagaggataccaaatctactcaaatctttaatttgtaatccctctaataatagaaggattggaactctcctacttcaattattgtaaattacataaataccctcaacaaatattattaaaaaataattataaagataaaatagtaattttataacttaataattatctatcctgtcatgtactatgttagtaaattgaccataactttcttaacatatcttagaattaaacgattcaaaatgttttaaaatgttgagattgaaatctaaaacttttatgttcatctctgaatccaattttacttacaaagtcgtcaaaatatgcaaacaaattctatcttataaaactgagcttcttcaaaattgacattttccaccaaagtgtgctaaaactattctaaaatccttcaaacatgtgattagccttccaaaataacaaatcaaaatcaaactaatcaaatatttaaaaagttaattcgatcataataaggaaaaataacataatttaatagacaaatatgtacttattaaattcccttgcacttgaactttgctagttccttagtaaactattaaaataacaaaaact

SEQ ID NO: 185974 - DNA, 1542 bp, Cannabis indica
atcaataagcttttaccgtcgatcaatatttaaagcaaaaatggttagcttctattgctaactaacgctaaagtgggtatcttttattgataactgacgcttaaggcgtcttcttttacaaaaataataaaaaataaataaaagaatcatcagttatggttttcggcccatttaaagaaaaacccctaatataaacctaacattataacctaaccctctagttgcccactattctctctctgttgcaccgtggaagctttctccctcatttttttttctttccttggttgttagatccagatctagatctagatggtgctaggtgagattaatctagtttagaattttttttttagtattttttgttcacattggttcgtaattgaagcaaagaattaatttacatcgccgcactactatttgcatcgatcatgaaatgaagcaaaaaaaaaaaaatacatcgattaagaactaaagtaaaaataacaatatttgtgtttatagctataacgtcggtcacactaactcacacaaatattttatatgttacttaaaaatcgtagcaaaaaactttttttgtagtagtgaattctctttttggttgtattgactgaggattgtttccttagtgtggagggttttccctcttcacgagcttgcagactagggccaagataggtgtttggtgagaaaggacagggcatgtctgtagttgatgtgactactgagggcatgagcttcatatacacaattgtgaaaaatacatgttagaaagggagcaatgaaaatttctaagttatttatttacttttgtgggaaactcattttttcgcttgtacataagggatatgctacaatattttttctaataatgcactacgaaggttggggcgacatgcatcggggggatccgaggggtcttgaccttcccagatgttatttcccctttatattttacttacgtaattttttgggttgacgcgactctccgggagggtgctttcctctcagagctacttgcacttttcccaagaaataattattactaagtgtcttaagtcagacccctcttgccacatggctaactctctaagtgccatgtggatggtctaaattttggaataacatatagcatatctatttttgtgttaaatttaatataatatataaattttaccctagttatggtcttaaatcaacaggaaaatttaattttttatgcatatattactctaaaattaatccgttaaacccatatgtattaatattagccaaataggtcaacatttcttttttttttctcaaaataccctccccattttcaaacagccactatctctctaccctctttccctctctcggtctcttcatcttctctgaatgaaaactcgaacccctaccaattttccatccgaggattcacgcaacccaccacgacccacgacccaaacaccatccttctctaccacccacgacgactgtgaatgacgaccaccgtgactgacgaactgaagacctatttctccacgaccaccgcgaccc

SEQ ID NO: 185975 - DNA, 3494 bp, Cannabis indica
ataatatattatatatatatatatatatatatatatacctctcaccaccttaactaccttaaatctgttattgcctctctcatgctttaactgaaggtaataataatcactattcactctgcttctgccttatgagccttatatgcatctctctccctaagtattgtattacaatctttttcattggtttttgaaactttgtttgtttgtttcaatgggttttctcaaccagaaaatttgataggtttttcataaagtttggtgtgaatgatgagagagagatcaatggtgttgaaaaacaacttctgggttcttgtttttgttctactcctatttggatttgcagctaattttcacactgcaaaaggcactcctaggcctaggcctcggcggattcttttagatactgatgttgatacagatgatttctttgctctgctctaccttttaaagcttaacagatcagactttgacttagaggtaatcaactaacctttttctttcttcatcatttgtctattacaattttagcccacttaaaagattagacaacaccacatacaaatttgaaaacaaacatttttcaaacaaattgttgcatattgacagttacgtattataatccttgataccatcgaagcattgagttttcatattcttcttcttcttatttcctttttttttaaaaaaaaaattaaataattgttgttttttatattggtattgatgatgatgataataacagtagtaaaatattattctggtcaaaggataaaagaacacttgatgttaggaccataatgtgtcctagtattggttttaccaattactactgtaataacatcttttacttttaaaagcttattcttgctttgctttttctagtctccaatttcaaaagctaatttataagaattcttttaattttagtttttttacctcattttagggagtgactatcaacacaaatgcctggagtaatgctggacatgctgtgaatcagctctatgacattctttacatgatggggcgcgatgatgtcgctgttggagttggcggcgaaggaggaatacttaaagatggtaccattcttccaaatgttggtggatatcttcctataatagaacaggcatgatgaacacattgattgtcttctacatagaaaaaaaaacacaaaaacaaaaacactttgtacattgccataacatgtctatatatttcagggtgttacaaccactgggggatgtagatatagacaagctatcccagttggtattggaggtcgtatggatgttgatacaaattttggcattagaaaagcttttcttcctcaggtatatgaactttttattctactgatctgagttatactaagatataatcaatactttttcatttttctttatgacttaggggagcaggagatatagaccaactactcaaccaactactcaacaggttatgtatgataaaatatctgctggtcctataactgttatggctataggagcacatacaaacttagccattttctttatgaaatatccacatttgaagaaaaatgtggagcatatttatgtcatggggggtggagtgaaatcaaagaacccgacaggttgttgtcccaaaaattctacttcgtgtactcgtcagcaatgtggcgatcctggcaatttgtatacagcctacactagtaatccttatgcagagttcaatatctttggagacccttttgcagcatatcaggtatgacaatattaatttgaacaaaatgatgtcttgggcaatatattaaagaaactaaaactcaatggctgtaacttaaactgaataatgacgattttttaggtgtttcattctggtattcctatcacactcatccctttggatgcgacgaacactattcctatcaataaggaattttttgatacatttgagaagactcagaatacatatgaggcacaatatactttccaatccttaaagatggcccgtgacacttggtttggtgaccaattctacacggtagtgtctttgatgatgttaagttcaagccaacagtattaatttatttcttatttttgctgttaaataatcaaactaatttactatgtttagagctatttcatgtgggactccttcacatccggtgtggctgtctcaatcatgagcaacttaaataaaaagaatggtgaaaatgagtttgctgaaatggaatacatgaacataacagttgttacttcaaacaagccttatgggatatcagatggatccaatccatcctttgatggcctgaaagttcccaagttcaacttaaagagaggtggtgttcatagtggtcatgtccaaacaggacttgaagatccattttgcattgccaagaataatgggaaagggagatgtaaggtaatttcttatttatttcatgtgaaatcaaccaatttctacaggaaaacttgtgttatttttgtttggtattatggctttaatctaaagttccttagatcttgtaaacaggatggttatacagaagtggtgactggacctgaggcggttcgtgttcttgttgcaacaaaagcaaaactgaatccagatcctaacagcccacttgacagaaccttttacaaaagtttcttaaatgtaattcaaaagaaactgtttccatgcttctaaatatgattgcctatactattttatgacacattcttttggggtcacaggtgttgaatgctcctcaaaacagtggaagattcaatttcacaacacagtttccaaactacaaagaagttctttacaaaccagatttgaaaaaaagaagactaggaaaaccagttgtatttgacatggacatgagtgctggagattttctagctctgttgtatcttctgaaagttccacttgaagtcatcaaccttaaggtaatgaaagttttggttttgcctccaacaaaaaatgttaataacacaaaaaggaattatcttttgtttatgtaataatgctaataaaatatcagtttattgatttgttcatgctgtcttctctcttggaaatgtaggcaataataataagcccaactgggtgggcaaatgctgcaacaatagacattgtttatgacatacttcatatgatgggccgcgacgacatcccagttggtctaggagaagtttttgcattgaaccagtctcttccaacattttctgctgttggagactgcaaatacattaaggccatcccacatggcagtggaggatttctggactctgatacactctatggccttgctcgagatttaccaagaagtccaagaggttatgattatgttacaaactgatatatatatgtagagagagagagagatttcttgattggtttttctttagttagagttgaattaagtgtttgagtttttcttgttttttttatgtttctaggtatcagtcagtaaaattctatcaagtatggagctccgtcgcgatacagatcatcctgactaa

SEQ ID NO: 185976 - DNA, 2643 bp, Cannabis indica
gagagagagagagagagataggtgggttatctctcactgtttcacttgataactctacaagattctgttgaaaaagttctttcttttctcctccatcaaacaaaagtgagtgttttcttttggttggatttgggggcatttatgtatgattgtgttacggatgattaatgttctgttgttttgtttatctgggtcagttttaacttttgtatttgagtactggtttgatcgttcttttttttttttgtgggtgtttttctgtgctatgcgtttggggttgatgggtttttgacattgaaggcttttgtaatgtgcatggaggtttgtgttttggtttctctctgcatgttcacgattgatcattggcttttctgagtgaaaaattagagttttgtacaatgtggttgcaacttttgtgttcttgttggtttttcactaatatctgtactataattgttgggtctcaaaggcaatatgattgttggctggttatttatttctctctctctctctctctctctctctctctctctctcttaaataattttagcccatcggtttatgtaagataatagtcagtgtacttgtttggttgattggtttgaatagttatgggtttgttagcttttgaaaagttgccctgcaactctattaaaaagtaaagaaattagacatgtgatgttaaacttttgctatgtggttgagagtgtttgttcttttgataattactgcaacaaggagaggggttggttttctgggttggccttgattttgcaggttatagtgcttttactattgcttctactaagttctttcaaacgggttattattgctttagtgcctagattattattattattattattaatattttggctaatttaaagtaggtggcttgatattttgctgcaggtatgaggtcatctggcctcatggggaaggagttgcatgaagatgaagaagtgccttgtggtatcctaactgccataacttttactgtttcaactcgtgaagttacagtaagaacttttatacctattgtttattggtctatttgctgtttgcatatgatatttggactgatatattcatatgaagctactgaatatgagtgtgtgtgaagggaatataggtttttcttacaaacatgtctattgatcaagtcaattggttgttagagaaactagctagtagaagttgggtttgagtgttttggtaattaaagttcgatttttgcaacttttgtaaaacacagttttgagtttgcgacaaagtgtagtgtttgtacctagtaaatatagagtttggatgtgttttcgtgcattgatacatacatacaaaaaaaaaaaacttgcttctttgcttacattttgtgtcattatcattatgctgttgttggtattattatttgttcaattttggatgtatcaattctccgacaaaaatgaagaacacaccatttggaatttcgccttcttgatacattagcttcttctcaaaatatatcatttgttttagttcttagctttgttgtttctcaaaatgcctccttaatatcgtatccttttgctatttatatcttatttatacattttgatgctgtgcatattaatacatgcaaaattattagttcaaaactgtacattgagtggctttgtacttagtagttcgaaagcaccaaaattcaactttttgtagattaaacttcatggtattttaattcttttacaggaaaagatatctgaaatatcgattgagaatgtcaacgaggttaccgattcgagaatgggactcccaaatctatctcttgaatgcaccacatgtggtgctcaaaacttaaggcgccgtgaaggtgttccctatcaagaaaataagagctgtgaaggtgagaatggacatgttacatcaaagtcatggctcataattagataataagatcgtttagtgttgctgtaattggagattgctctaagatgccttttgttttccaggtcattttggccatatcaagtttcctttcacaatactacaaccatattttctatcagaagttgcagagatactaaacaatgtttgtccgtcatgtaaaagaatcaagccatctcaacgagtcaaggtcaggtatcacagtccttatgcttgatgtgccaaggttaattagtgagaactaattgaagtgttgcacatgtatgttatatattttatatttttgtaaatttcttttgaaataaagcttttctattcatgtaaaataatgattgaactatacttttcttggctttcgaaattttggaagaaaatactaatatatctacattattgcttgactaaaaaatatattagatgagtactaatgtaacgctatatagtttatattatagaaatatacttgagattctataatcacactcactttcattaacatatggaaccttttgactcaaagtaggttttattttttccttaatggacaacatgattttatgatcaaagatggaaatataatgttaacatgtctgggtaactagtctgacgataaatgcatcttaagaaagaaaaaaaattccttctagttttattttaaaatgatgctaataaaatgtgacattaaaaagcttgatttattttcttgtttttttttac

SEQ ID NO: 185977 - DNA, 6310 bp, Cannabis indica
tattattattattttattttcttttgagaaaattgggaaaccaaatttaaaattggaaaccaaatttatatctatatatcatatattttttttccctccagcctcaaggtctctttgtcactctctctttccatcttcactcttttagtctcagtcggccgtgaaggaaagcaagaaagaaagcttagtaggtacgattattgtgtttcctactcaatttgtttataattatataattatgtataccagatggtagtgttttttctgcgatcttcctcttctcctatttttctgtttaataaacttaaaaaatggagtaatttttgcatgaacgaatctttagattggattagttcgttaccgacttttgttttccatgctgcattgctctatctctgttttcatatgtggcttctatttgtatcgatgttgagactgaatttcctgtttatctttctgtataagcatgtctatatttctcttggttctttttacgaaatggatttctgggtttcttgggttcatggtagtgttctctttatgaaacaaaatcaaatgattattgtgcttgagaatgtacctatattgtgttttgaaagatttcttctgtatgcgcagttgtttaatttgtttttctggtactgtatgtgcctttaaaaggttttaagggttttctattaattttttttgccttttaaaaagtttcaagggttttgtattttttttgggtgatatttgccttctaggaaattgaaaagtctttagtggttggaaacaaggtttaggcttgtacttttttgtttcatattgtgaatgatttcttcaataacttttgttgaaatatctacagatgggttctaaggaacaatgtggtgtcccggcaattgtgaatcaagaactggccgtcacccctccaaagtattctttaatgagcagaaaaggaactggacgtgcagggcgccggatacctttactggcaaatcattttaatgtttcccttaatgtcccagatgcagtattttatcactacagtgtatgtttcagttgcatgtgtttttgtgctttctgggtttattcaatctcattataatttaattatgatgtactaccactttcaggtatctattacttcagaagatggtaaagaagttaatcttaagggaattggaagaaaagttattgataggctgcaccaaacttattcttctgaattttctggtaaaaggtttgcatatgatggagagaaaagtctttacacagttggtcctctgccacaaatcaagtttgagttcactgttgtcttggaggagtcattagcaaagcagtatgtctctttgttattacttgtttctttttactgtttctttttggtgactgacattatttgggtatgtgcggtagggaaaatgggagtcctggtggcagggagaatcccagtgaaaagagtaaacgctcaaaacgctcttatcactcaaagacttttaaggtagaattaagttatgctaccaaagtacctttgaggtcggttgctcttgctcttaaaggagttgatgcagataatagcactcaggatgcattgagagtgcttgatatcatccttaggcagcaagcagctaacaggtatgtcattgtctctcctgctcattatctctctggtttatattttaggccattttctttttgaagctgtaatgttgtcttgtcgaaactatgtttgttccaatttacaggggatgccttttggtaaggcagtcattttttcacgacgacttgaggaacttcactgatgttggaggtggaataactggtgttcgagggttacatgctagctttcgcccaactcagaatggcttgtccctcaatatgggtatcactttttgtataattgtgatttctaaattgtaatgtagacatgaagatgtgttattgctacctgtttttttgacattgctgcctctcaactttgtctagatgtgtccacaacgttgattttgagacctggatctgttattgaatttctgatagctaatcagggtgtacaaaatattcgtcaagttgattgggggaaggtaaataaattgttaaaatgtgtgcttagacatgatcattaatttgttgtaaacataatttttggtgacttaggcaaagcgaatgcttaaaaatctgaggattaaaacaagacaccgccacatggagtttaaaatcataggcttgactgacaagccatgccgtgatctattgtatgtgtttatctttctaagctactttctctatttttccctaccctagttggtttctattgaagaaactataattttatcgtcttattttctcagttttaacatgaaagtgaaaaatggtgatcatacaaatggagacgagactgaagaaatatctgtgtacgactattttatgaaacactgtggtatagagctacgtgaatctgcttacctgccatgccttattgttggcagaccaaaaaaacctaactttctacctcttgaggtatgctaggtttatatgcttgacaatctatttattagaagtgttgatgaattcttttgcaaaataatattttgtggtttttttctgtactcttctatttctgtttcagttgtgttcacttgtttcgcttcaacggtatacaaaagcattatcttctgggcagagggcatcgctggtggaaaaatctcgacaaaagcctcaggaaaagatgaaaattgtcgttgatgtaagttttattttaacctgaatcaataatatctttcatttaacattgtcttatttttttctttctgatttaatatttcaggcagtaagaaattaccgctatgatagtgacccattgctagctgactgtggcatctctatagagaagcaattttactcaagttgatggtcgcatccttgatacccccaaaggtaaaaacaaaattcatgtgattgtctgcataagtatggccatgtttttggaggtgattcggaaaattggatttataattgagacatgcattattttgcatagttgttagtgtttggagggaaatgtgttactacatccatattgactattggtttcatttttcctattatacatcacagttggagtttggtaatgatcgtggctttgccccatctaatgggagatggaactttaacaataaggtacactttcgtagttttaatgctcactggcctttgacatgtattttattttcccagtcttttgatatcaataaacagcggttcttatagtaattttttctcccaagagagttactttcattctctatttataatgcacacatatatatatatttccagactgttttgacgccaattagcattagctgttgggttgtggtcaacttctctgcgcgctgtgatatgagtaaaatttcaagggatcttattagctgtggaaggaagaaaggaattgtatgttctatgtatcgattgtaaagttcttgaactattttgttttaaactatctagaacagactgattttttcctgtacagcaaattgatgggccaaaaacattaattgatgaagatcatctatctcgccgaggatcccctgttacaagggttgaaaagatgtttgagctgattagagacaaggttccaggcccacctgagtttatcctttgcctcttgccggagagaaaaaattctgagatctatggtgcactttctaatattatgtgatgcatatctttataccatgtgatatttattattaatattaatgttaatgttaatatttttatttttattttagggccatggaagaaaatatgcctatgtgacttcggaattgtcacccagtgtatcgccccatttaaggtcaacgatcaatatctaaccaatgttcttctgaaaatcaataccaaggtaaattttataagttagaagtgttttttttacatagtttcttttttatttaaccaaaataacatgttgtgcttgtttttttttcctctagcttggggggattaactctttgttggcaattgaaaaaccttcacgaattcctgtcataaaagataatcccacaatgattttgggaatggatgtgtcccatgggtctcctgggcgctcagatgtcccttcaatagctgcggtatttaaaatgttattttttcttgtccaaagcatcagtgcctctttatttggtatttgatagtcttgttgctttcaggtggttagctctcgaagttggccatgtatttcaaggtatagagcatcagtaaaaacacagtcacctaaaatggagatgatcgatggtctatacaagcccttggaaaatggaaaggatggtggaatcataaggtattgaagtatatgtaatgtcacatctagcttttagatttgttgtgatatatccaggcttttatgccatgctccttttatcatctgtgtgaatattaattgtgagcattgtcccagcaacatttttaatattttgactgtattattctttgttactttcatgttttattgtttgttaaagtgcactacactgctcctgacagaattgtttttttagaaaaaaaaacccaccaagcttcatttatttggatatgtcaattttcaatcgtcttaagactggaatgaacctttgattgcagggagctgcttattgacttctaccaaacaagtaatgcgcagaaacctaatcagataattattttcaggtatcatgacattgtgtaagatctattggtcggtgattttcagtattggttatttatttctcatatgactagtgcctgtgttattttgataaaattattagacgcattgctctatcaaaatgccaaatttttaaccaggttgaaatgaaattgtgcaatatattgattgatactcttcattcagatttttaagtatttagtaatgaaatcttgcttccattattgttttgaaatcttatctttcacttttttgccccctgaatttgttatatgtatttcttttaattgctgaagacagtttttataacacttgagcatattgattttctttctagggatggagtaagtgaatcacaattcaatcaagtcttgaacattgagttggatcaaatcataaaggttatggacaaaccttgatcaactgtaattcaggattcgatatatcatatgaaattttattattctatgtatttaccctttttttagaaaaaagaaaaattctaaccctattgtttctagcaaatattatattaagctcttcaatattttctgtactgatttctgtatccagtgttttctgccaagtgcttgctttatacggctaatagtagtctctgtagtctcatgtctttcctatgacatgtagtagctttttgtgttacaggcgtatcaacatctaggggaggaaaaccttcctaagtttactgtgattgtggcacagaagaatcatcacacaaagttatttcaagctggtggtgccaacaataatattccaccaggtgtgtttgtgcttttaaataattggtacattattcctttgagtaaagctgtactatgttttgtaatttctgttttcgtctctcaggaactattgtggacaatggaattgtgcacccaaggaactatgatttctatctgtgctctcatgctgggatgattgtaagtatcttgtatcttaggagagtgttgataggaatctcctatcagttaggcaagaacagtagccaatagaaggaaatatagctgatatattgatattggaaaataaagagaacaagtttgctgggtatttgagcgacccagctctcttccaagaactaatgctcacttaaccaaatgattctctaccctaactctcatataccattcttatttaagtgtgttgtgcatcagtcacaattttattagcctatcatttaaatgttttgtcggtttaattaacttgcatataacaatgaagttttttaggttgcataatgagatttgatgtttagtctggataagttggttgtcggagatatttgcatgtgttttgaactatcatatattcctgactgtcatactattcatttttcctgatttgatctattaaatgctgatcaaattaaaaattggatcacattgtatgcttctttttctatacctttcattttctttattggctgctacaaaactcagggaacttctagaccagcacactaccatgtccttgttgatgagatcgatttctctcctgatgacttgcaaaaccttatccactccttatcttatgtgtaagctttttatcgtttttttttttgaaaaaaaaaaaaaactaaataaagtaaaacaa

SEQ ID NO: 185978 - DNA, 2142 bp, Cannabis indica
caacatagctcgtgttgctgctttgtccttctcggacttaaactacaacaaggactttcttttttattattgtgaaaacataacaccatgactatcaatcatcatcatcatcatcatcatcatcacaatgcagctccaagatttgttattacaattacaataatgtatgaaaagagactaaaaagatcatcaaataaacaaggaagagttgcataacaggctcaccgatcgatttgcagcattcgttttcactcccttttcggttttaaagaagccctcttcttctcttgtaatcactaacagtcaaagtcagcacatgtctccgtccatcattttcggggacttgacaaccgactgttgattctattctctgctttcttgccatgaatcctgcctgagctccttgtggtccaccgaatttatgaagcatagctagtgagattggcaactcgaagttgtgcagcacgttcgtcactgtcccttgatccacaggggcgagcgtgtcaaccaacttgccagcatctgctgcagcttccaaggctgctgcagtagcttccaacccgaaatctgttggtaaaactgcaccacctcgaccattacttgctgcaactttaggtactgttttattaacaggaatcgcttcagtttcttcccctttcgcctcaccaggagtggaaacataataatttctcgaccttgtccatcttctcgaaaagggatcataaccagcttcaccagctttcaaagattggttaataggtttgagttcagatgcattcttgaaattctcaactctgttctttctattcatttcggctagtctaatagccttagcatcactctcttttactttccgagatgcttctaattccaccaatcttgtcttgatcctctccacctctatgtcatcactcttgctttgtgcaacttctaactcccttctcaaccgatctttctcgagtgcaacgttcaatggtcgcgacgaggctgattttttctcttgtaacatttgcttcacagtagctgctgagtacacaaaagaattgatctttttaatagcttcctttttttccaacaaatcttgtttagttggcattcgaccgccactcctctcaacttccctaacccattgcttaaattcttcctcgatcggagcagagtcagaaaccatcgccatctgccacctggctgcagagttttcattcccccaaacacaattcagatacttatgagtgtttttattctctagtttgtactgtctatcgggatcggttgcatcaacattcctaaccatacaaagtctgtaaattggcccggtttttgacctaccaataccaacccgaacaaagcaacctacgatcaattcctcgaaaaatggctccataaaccactttccaagttttgatctccgaattgtgatatccttaacatcttcgaatgttaccccgtctgatcccctctcatcatcactgtccattccaccatcacctgtagagccttcatcatcgcttcgagattggcgatcactgtcactctgacttgagctactcaaacttgttgttgatgtgaaagatttcctcttgttgttcaagaaattcttatttcccgagcttcctctcgacgatgtatccctatccctaagtttacggtgagcctcagggtcttgttgcttcaagcgttttgctcgtaactcattcaaagcatcatcttttgcagctgccctgtcagcagatctagctgatgagcgaattcgagacgatgataaaggagcagtctccttcctagattgcgggatcttccctttgttatcccatttcggtctcaatttctcctttaaattcttatcctctttcttagatgctctatctaacaaaatcatttctctttgaagttcagtcatctcagcaagctttctcctatcatcatcatccttataaagatcactaccaacatcagattcatcactgtcaccttcgcgatcagaaccaccacgatcatcatcatcttccccttctccctcgctaccttgatcatcatccatttctgaagggtccaacctcttctttaaaggaacttgagccccagaaggctttctacttgcataaccgccaccacgatcatcatccgaatcatcatcatccc

SEQ ID NO: 185979 - DNA, 1648 bp, Cannabis indica
aaaaaaaaataataataaagcttcaataaaaatttattaaatttttcatagaaagatgaattaattaaatatatttattctttcttaatatttaaagtttttatttttaatttatgacttttttattaaataattttgcttctatggaggtaaatcttgctaatccaagtaatgttcttttctatagtttcattctagagatattgcataacattaacacttcggagatggaaaagcttctgatgcttctatggaggatttggtaatgaaagaacattagagttcaagaacataaattgctctatgatggtatgactcttccttgtacattagaaaatttaacaaaatttaatgaagcttgtgttctcatttaggttaaattgttcttacaggttcttcagtgtatccttttcttttttcaactttcaaagtaaatggaacataaataacttgtagatggtaaaatctgcagagcaaagtataataagggcaaaatgaattccattcacttaatcaaatgccataatacaattaaagcaatctaatatgcttgctacagacattataagcaaggaatgagagtgccaaaaccagaacgagctttatactctaatgtacaggacaatgtcatgaactacagccccaagacatctcaagggagatggtttggtggagaagacactcatggatacaaaaattgaattgaatagtatgtatgttttctagctgctatgtctttgtttcagttgacgatgagcctggtctcttgtcacgttgaatagctcgagggacaaaagttaaaccacgagtgttgcggcggccaaagctgatggatgaaggagatgaatctgaagtacttagtttggatacagcagaaacaagattatcaatcgtttcattttcaacttccatgttcgaagtatctgtcttcttatgaatagcttgtttgcgttgctgtttctgcctcagctttttggatgcatgagactttttgaaaaactcaaatgaagtggggaacttgtgcttgtccaccaaatgctgatgccgacttttgtagttcttaaacttaagagtgcagctttcaacaaggcattcatactaaacaccagcaaataaagcttcagaatcagataccaatgatgacaaagtggagatcatttaatatttgaacaagataaaagtaaacaaacataccatggtatagcctcgtgcaactttggcctggaagaaagagtcatgtgcttcagatatgtgtatgctgagaagtcgtgatgtagggtagactctagagcacactgaacatgatgcagtatgccttgcattgtaatgatcttcaaaatcctccaatgaagtcagatgtgcaccacaaccagcaatgggactgaaacactacctgtacaatccattagatttgagtgacttcaatagttagggaaagcaaatacaaatatataaaaaaaggctcataagagattctattatcttatcacacatttatcatcagttaactaaaccagagaacttgcacattttacattttgtctcaattcaatgtattcagtcactaatcacttgaaacaatccgaaaatacagttcaacaaataccatctaagatttaagctttctgatgctgctcacataaaaaaa

SEQ ID NO: 185980 - DNA, 7258 bp, Cannabis indica
ctgttaaagcatgcaattgttgaatttgtccattaattttgaatatatgtttacactagtcctttggacttttctatctgcaggaggaaagggaaagattggtagtcaggagattcaagtttgaagatcctcggatagaacaaattcaagacctggaggtttggactatagtagtttctcaaatttatttattttgtatctaatttaatgcagaatttatttaacatgcatatttatgcagaatgatttgatgaagtacttcagagaggatttgcatagacggcttctaagcacagattttaagaagcaaattgacgggcttgagatactgcaaaaggtttttgaatgcatcactggttcattttttttttgtatatcagttcatattgtttacattatatttgtgattttattgcaggcactcccattgattggcaaggaaatagttgaagttctggatatactactgagatggtttgttttacagttctgtaaatcaaacacaacatgcttattgaaggtatgtttatttatttacttttcaagttttttcatctctttgatcttttcttctctttgcattttcttaatatctagttctttctttgacttgaataaaaggtgctggaatttcttcctgaacttttggacaccttgaggaatgagggacactctttgaccgagtcagaagcagccatatttttaccatgtttgatagagaaggttcttgctatttttttcattttacttttgaatggagcagttcttggaattttagcacgtacattgacaaatactgtgatgtattttttgccgtttgcgagtgtgtttaattcttttcacattggataataaagtaggttttcttacgatcactgaaaatgctgactctgtttttttcatgcagatgggacataatattgagaaattacgggaaaaaatacgagagctgaccaaacaaattgtacagacgtattctgctgcaaaatgcttcccttatattttggagggtttgcgttcgaaaaacaaccgtacgcgaatagagtgtgccgaccttgttgggtatatattagataatcatggtgctgaggtaatttctttttctttttattttatgcagtcttcaccctccctaccaaccccattgaaagaaaggatgctaacatctattctcttgacagattagtgggcagttaaagtcattgcagattgttgcaagcttgacagccgaaagagatggtgaaactagaaaagctgctttgaatactcttgccactgggtataagattcttggtatgtcatgattcattgattttaaagtattatcgatttgttttagattttaaatatatattcattgttcctttgaggcatcatatttctttctgcctcttttgtgtggttaagttttctcagtttgtaatttgttatgtaagttgccttgtattaggtgtcgcatacagtggatgtaaatgctgttagttttaatctctttaattatacagcttttatattgctaactagtaatgatcatttccccccattaggtgaggatatatggaggtatgttgggaagctaaccgatgctcagaaaagcatgctggatgacaggtttaaatggaaggttagtatatatttgagctttgaatttaaagtctacgataaacttttcaattttgttatggtattatatgagctgtttctgttttccattccatccttttaatggtatcgtatcttctaggttcgagagatggaaaaaaggaaggaagggaagcctggcgaagccagagctgctttgagacgttctgtgagggaaattgggtatgttttgaagcttgccttttgtatctttagtggtgtctttattaattgatatttctaatttgacattctctatgatgattatcaacattttaataaagtataagatcttattttctgtcaatttttgtgtagttttttgcttctttatcgaggagtcagtctttgcttttgtccaaatctaaagcttgcttaatcgtgtctcttttggtactcatgcatttcaaagtaaaaaatatgccagcacttttgaaaagtctattcatagttagttgtaacataaacagaggtcacattggtgtttccccatatctactgttgagctgcgatagttagattttcaaattgttgctttgtgctgccaccaatatttttgaacatgtttgaggctatttacttttttttctatagctaaaaacatctataaccaggatctaggcagtcctatttatacaagcttattagatttagtttgttaactttgaacttttatctattgtagttcggacgtagcagaacaaagtggagaggttatgcgatctgtctctggtccagtacttgcaaggtattattagaggcattgtgatcctttaattgttttctcttatattttcaacaagtgatacaaattttacttgaacaattccatcacatgtactgtgcttgtggctaattttcatatacctatgatgtttttatcaggaaaaactttgggaatgctgagatacatgtagagagacaagttatgccccgtgttcttgctggtaccaatggaccaactgattggaatgaagcattggatattatttcttttggttctcctgagcaggtacttgtggtttatatgcacttttagttggatgaaatactagttctgagaagaatctagcttatatcttacagttgattagcctcctgttttggaaggttaatgctttaggtttttaattttgattttatattaaagtcaatcggagaatttcagatatcatgtggaaaaccaaattgataaagtaaaatattgtgtctaatttctggttttccataatatggttggtgggcctagtagctagttgccaaggcattcagtccaatctttcattttccccttccctacattctattctccttacagctctgttgtgtttaaaaatttgtaattcttacattgttttgctataacaattccgctgtatagctaaaaaccacaagaaaaaaaaaatcaatgtctggcctcatttgatttattatgaaagttttcttttgtgagcaactgtttgttgtttctttttccctacttgtttgttattttatttatgtataaaaattataaataagtataatagtaagaaatttatatgcctttttgcagtctgttgaaggaatgaaagttgtgtgtcatgagctgacgcaagccactaatgatccagaaggtagtgcaatggatgaacttattaaagatgcagacagacttgtttcatgccttgcaaacaaggtaaccatacttttatcatagcacttaaatctttccatcaccagactctagttttttactgtgggtgttttttttgggggcattatataggtattgattatgagtctttttttccctttaataaaacaggttgccaagacctttgatttcagcttgaccggagcatcatctagatcttgtaaatatgttctcaacaccctcatgcaggtgtgtttggcttatgttgttgaatgtcttaatgcttgatgctttctattaatctttctttttatattccttactttaatcctaacaagttgatgtgcaattccaattgattgtcagacatttcaaaacaaaagactggcttacgccgtcaaggaaagtactcttgatagtctaattactgagctccttctatggctgttggatgagagagttccacatatggatgatggcagccagcttttaaaagctttgaatgttctaatgctaaagattctggttaggatttacttgtcattacatttcgtccatttgttcttatcccaattatgcatgtacgatttctaatctgatttgctattcaacattacaggataatgcagatagaacttcgtcctttgttgttctcatcaatcttttacgtccattagatccctcaaggtggccttcacctgcatcaaatgagacatttgctgtcagaaatcagaagttctctgatctggttgtcaaatgtttaattaaacttacaaaggtaacttgttgtttttagtatgttttcgcctttgttcccttaattcctttttttttgaaaatcttctgtttgtgttccaaaaaataatctgacatatttttacaacttggctttcctgctgcataggttcttcaaagcactatttatgacgttgaccttgaccgcatccttcaaagcatccatttatatctgcaagacttggggatggaagaaattagaagacggtatgcatttccatatatttatttggaagaacatgcagtcagtctattacttttgactgatagtttttagtgcttttattttctcctttcagtttataatttgtgtttgcatactaattgttttcttctctttcccaacgcataaaaatgattcagtgccggtgctgatgacaaaccattgcgcatggtgaaaactgttctacatgaacttgtgaagcttcgaggagctgctattaaaggccacctttctatggttcccattgacatgaagcctcaaccaattattcttgcttacattgatcttaatctagaggtagaagtcgagctaaacaattcactttatttttattgatcgttttttaccgtcctctaacataatattaatatctgctctgtaatttgtcagactttggctgcggcaaggatgttgacagcaactgggcctggcggtcaaacacattggggtgattcagcagctaacaatgcatcatctgccacacattctgctgatgcgcagttgaaggtatgtagtgacctcggcttcaataacacatttttgtgacttagcatgtttgttcgtttcctttttctgatacaatatgttgatcttttggttttatttatttaaacctgtagcaagaacttgctgccatattcaagaaaattggagataagcagacttgtaccattggtctgtatgagctctaccgaatcactcaactatacccaaaagtaagatttgtaaacgggttttataaagtaaacaatacatattccttgacactactttttttgtttatctgtataaaatgttgtgaaatctatttcaggttgatatattctcacaactccaaaatgctagcgaggctttccggacgtatatcagagatggcttagcccaggtctagcatcacgactaatatttttctcttttaattaactttcatgtaaagcatacacactcgaaagttgaaaccattaattaactttgtgcactgaaattttcttatggattctattacagatggaaaagaatgctgcggctggaaggacaccttcgagtttaccgttgtcaactcctcctccgtcagctttaagtcttccttccccagaatttacacccctctctcctgtacatacaaattctctaaatgatgccaaatcattaaacgtgaaatccgatctcactaacttcaatcttccaccatcatatgtcgaagatggtagagcaaacaattccatttcttctagaggtcatgccatggaaaacacattcgctgaccaaagaaacgagagatacttggctggaggtaactactttcgcttgactattttatactttttttgcgtgaaagagacctaacaatggaaacttctcgtaaactatgcagttactagtgggacattggatgcaattagagaaaggatgaagagtatgcaattggccgcagctggtgtcaatcatgaaaccgaaagcaggcctaatgtttatatgaacgacgacatgaaccacggattctccgaacaggttcaccatcatcaacaacaacaacaacaacatcaacatcatcatgcatcatcagaacatgctaatatagacaatcccattcgcagcaacgtccttccgatggatgagaaggcattatctgggctccaagctcggatggagagactcaaaagcggaacacttgaaccgctgtagagacttgactgattattattgtcaagtattacctttacccatcctattatcaccaccattgattcccatttttcttcttctgtttacggaggaacgggagcagaaggtgtcctgtctatgcaattttattgtataaaaagaaagaaaagaagtgagtatggaattagtaaaattctttttgattattaatgttgtgcttatcagagttttaggagagttttaagtacacttagtagcaagcaaagtagcactatgatgtgctatattgcgtgttgagcaatttagcattatttgtatatttgtaacaccaaatttcattgctttaatttaaaaaagcaagtgtacgccacctttctcagggccatgccaaattttacatccttttgaatttttggttttgttttatcccaaacatataccatatatttctcgttttgtatgtatagtgaggtcttgtcttttactctccaaacctaattttattgcgaagttaaatgcaagtttatgatgatgtatatgagtagagttaggttagtctatatttttttttgattactcaagacatggagtatatgactccttggttttgatgattattattgtgtgtggattctttgatatcacttgctatgtattttgaagctttacatgaaatttcttgttaatattgttatggattttgttgctatttggttggtcttaattaaaccaaatgataagaagaaacacataataaaaatgaaagaaaaatttaaggtgaagaggaaaacataaatagctcaaccattctaaaatatatgcatgaattccagattgtatactgtataagaaaatttacacctccacacgatagattcatacttttattttactttactttattatatgaaattattgttatatttaatgtattttttgagcaattgatttaaattatttatgttattgtttactatattgaattttaataaataatttttgaaaatacaataataaaataatttcaattttttcaaaatagatattatagttattaaagatattttgtaaaattttgagaaatttaaaataatttacaatttaaaagtaatttttaaatcgtttatttgatatgagtataaaataaataagtatcatttgaactttatttttgagattaaattttagagtaatttatcgatataaatatttaagtttaatttctaattgcaaataaatatcaaatgttaagttattatccatattttatttttgtattagtatatttgaactatttt

SEQ ID NO: 185981 - DNA, 4913 bp, Cannabis indica
ttttttttttttttgtgtgtgtacaagccaatttattctacagtaacagaaatgtgaattcttttttttctttttttaaatcacagagaaaatattactattattatgtgcttcattcacagaccagcttaatcagtttcaacttaattatgttacaaattccaactctcggtctctcactgatccaaacttgtcaatattcaaaaatgacaaaacaaaagctttttttttcaaaatcaagatttacaacttcaacattgtatgaaattaaatgaagctttttcccccctcaaacccactaaacaaagaaggaagagataactctcatatgtactactgttttgttttactaaccaaaatcacaatactaccgagcacttgggcgagcaaactcgtcaatagacaaaaaattctcagttccaataatgtcaagggagcccaagttgagagaagaatgacctgagtttcttgatgtgtcatctgagttaccttctctcactgttgttgcttctctttccatggtgatggcgtcctgaacctccttcagaacttctgagattgatggcctcatgtatccatgtggctgaacacacatcaaagctttctcagctattttccacatggattggatgtcatactcgttgcgtaaggcaggatcaatgatgccttggatgtcaccactctctatgtgtagctttgcctgcagtacatattagtgtataaagaatcagaataaactacaatggaaggaagaagagaaggaaacactttcttagacttacccattggactatgttacgacaattaacgccaaaactttcgttagatattgcttcttgacctgatattagctcaagaagaatgacaccgaaactatacacgtcactcttatccgttagttgctgagagatgtaatacctgccatatcaatgagaagatgaaaattttatacagacaaactaaaaaatgcagagagttttgttaagctgacaaatttcaacttatctcaagcatgttgtgcaaattatcaaaaaactaactcttaatgaaatatggcaaacagccttactcaggatctagatatcccacagtgcccctaactatgcttgagacatgggacaccccatcaacagcaagtttagaaagaccaaaatctgaaaccttagctctcatttgtttgtccagaagaatattactggtctttaaatctcgatgaataatggctggagtacatcctgtgtgaaggtattcaatccctgaccaaacatggagaaaaatataacgtataaaaatcaactggttgggaagttctaaaatctagcctgtgtaaaattggaaaaataaagaataaaccagaaaagatcatagtgcttaaaaaccttttgccgaatcttcagcaatctcaaggcgcttgatccagttgatacttcgtccgcgagttagtggccctacaaaagagcataaatggttggtccttgcaacttgtgtagattctattgaaatttataggtgatcctaccataaagatgttccttgagagttccattatgcatgaactcataaataagcatactcctttcatcttcttggcaatacccgagaaactgtaccaaattcctgtggtgtatccttgaaagaagagttacctgttccaaagaaaagctaggaacaatccttcaggaaaggccacaaatttataaaatgtaagagactcagacaaaataaaagaatatacctcatttgaaaactctcgctttccctggtaagagttacttgtcaagaccttgactgcaatttctctgtcatctttcaatttcccatagtacacaactccgaaacctccagacccaattttcttctcaaacctttttgtagcaacttcaatgtctgaaagtgcaaagcaatgtgcagattctgtgggagtctcgcttttagaagcaactactggcttttgaaccgggagggaatgtccaggttgctctgcaataagtacaaacaacttcatcacattagagtcaattgaaacttaacatccatttccgcctggggaatggtgtaggatcctaatattgtcatggaattgtacctttatcacgatttcttttactccctttgtgcaagcataggcaagacacaatagtaactatgagcaaaacagcagcaccaattgatgcaccaatgattgcattcttacggcttccacttgagctccctttacgaagatctttgtttcccgtaatgctacagataaacaaagtaggaaggcaaattaatttgtagaaccatttaaagtttctctacaaatattacttcaaaactgaagaataaacttctgaatatttgtacaacaagttatcatttttttcaccttcatgtaatctagtcatgtgactcatgtccatagaaagaaatactcacttgaaagtcatatttttgttgaaaagaccctttgggactgatccggatagcatgttattttgcacatacctgcaaccatcagattcacccagttgctgccttatattaactatgtcaatgacagtttttcattcaaaaaataatgaatataagagttgcagaaaacatacatttccttcaaattgggtaggtttgttaaagaggaaggcagcccacctgtcaactgattgttttcaagatgactgtacagagcaaagatatgagttaggtaattgttttgaacacacccattctaagaaatgaagtcaactcagattacattatctgtaagttcacgcatccagtgaaatcaggtattgaacccgtcaatgaattcccatctagccatctagcagttaaagacaaacgacaagaaaaaagtaaagagctaaacctcaaaagaattgccaccacccacaaaaacaataatgaattcatacttacaattcgactagtccactcaattttgtcaagtccaaggggatattccctgtcaagttcttaccagacaacatactgccagtcaaaatcagcaccaatgtagttgtgattagattagacgctaaccataatctactcaaagagttaaaggactaggtacccaattaaatcttcaaaaagaattaactattacattgcaactattctcggttgtggatctgaggtacaatgaacccaagaccacggaactggtaggcatgggtcaccgccttctagtgcccagtcagatgagtagcgtgagactacattagaaatgataggccctgaaagttgtagaaacttcaggattagtatgattgtatagcttagaaacaattactaggaacatacaaacaaaagcaatacgtgtagttaatatttgtagctgatttcaaatctagacatcagaccaaggcatccagtatccaataatgcacttaccatctatagaaccttcacttttctccaaatacttattaatctccattgcattcaggagaggaccaagggaggagtctactgttttcccaaatctaaaagataatacgaagggaagagaaatatttgtaaatcctggctcgtagagacggtatttcccttgtgcattttcttcaatattgacaatagctttgctgatatcaggattgccggggagcactagcctaaactttcttgactcatccggtttaagatcttcaatttctgcaaagtaggtcattgcccacccactaccaggaaaaccatccaagttcaaacggtaagtcaatgacccattgctaccaactacagccgtctgcataaccttttcaggtggtctctcatccctgttagcatcaattggcaatttcgttgacacttttgtggttccaggtgcaacatcaaccagataattggctttcttcacagagtctgactgccatagtctatcaaacgggtcatcaggatacctgaaattaacaggtacagattactcacaagacaagttctcctctaaagtataagacaagaatattttcttccattaaagttgaagctatcattctggcgaagaacatgtgaaatataaacatattaagtttttctggataatccagatttaaaccaaacatactctagcgtacctaacaggagcttcactgtctgcaccaaaatttatccttgcagaaacactgaggtagtaattatcttcaaaatcggtgtaataagccgaaccattgaactgtcgaagttcaagggttgatataaatggctgcccagttgtagcattggataaacatacgctgattgtaggagttgaagccaagaatataagctccctagtctctatatcatcagcatccgcaataacaatatttgaccaatgggttgccccaagagagatatcaaacttgggataaacattattgttgtcaaagttaccatacaagaatgttgctcttataaggtatctggtcctacttgtgacattaagtatgtaacaatacttccttgaatcagcaggaaagtgtctcagagtcatatattccctcctggtctcgtttgcaactgctatactcgctgtctcgccataagcgatattgtcaggactccacattagcccaatatcatctgtgaaagattcattacctccacaatccaaactcacaaaacctagctccaacaacagcagcacataatcagtacccatatatatatatatatcttatatatatgagatacaacaataattatgtaaacgaaaatccatacttccctagaatcctaaatccaatatccaacaagttattaataactttaaaagagtcaaaattactaaatttgcttccttttcttctctatcttgttttatttttatttattattattattatttttatttttttatttttttgcttgaagaagcttaagcgtagttcagataacagcatcacatatgaaagattttatatatgaagaccaaatttcattattaaaat

SEQ ID NO: 185982 - DNA, 1537 bp, Cannabis indica
tcatcaacatgagattatcctattcaattgtatactttagcttgttttctctattctaaataaaaaaatctaatgtactttaaatttattttgcttaatttagatctccattattaactaattataacaatctaatcacgtatatcaacttatatatatagctcctatacattggaagtgtttttttttttttctttaagtaaaaaggtaagaatggtcttgaatataaaatatattaatcatcattagtatgacatattttgaaaaaatactcaaaaatataaatttatacagaaaccggacttatatcatactaatgttggagttaagataaacgtaaataatcccaaaaagttggatgacaatatatataaaggaaactatatatagtcttaatttgttggtagaaagtctttgttaatcttcctttaacttctttttcttcattagttagtatgtaacacactcaatggcttaaaatttctccttattgtgtacgtttcgaagaaacttccgttaatgtagttgcaatcgtacacatattgtacatatatatatatatttaataatgcagacaaaaacatgttaattattaattaagtcgttcttatatttacaatttttgttttcttttctcgaaattaaagtcatatacctaattaatataaatgtgcatcaatttaatgcaatctattcggaatgtacagtcgtttttaattattaggggttccatttgtttcaagtaacgaagacgtatataattaatgatgaattaaaggaacaaagacatttagtgatgaagaaacccacttgaacaattaataattcagtgtgaacattaattaatttattatattagtcatgacatgcattcctaatatatatataaatataacgtatatgcacatggatgaaatgtgggtgtaatttatggaaattacacgaaaatttctaataagataaatattaatattaatgtgggcgcagaagcaggttttcgtttcatagacttataaataatattaatgattattaattagtggtgaagaaaaaaagtatgtacaagacaacaaaatttaactagaagatcaaaattagaaaatggatatttattatggaaaaattctactattttttttatatgattgataaatatgaattttgggttgtatgactgatcaagactgtttttataaaaatatgaaaatcattttggataattacagatacattaagcgaaaagaaagactttttttttgtttggctctcaccaattaatttctactttgccttattaattaatatatttttcattctataattattttctttattctaatggatgctgaaatcatgaaattgtgtgtttgtaggtacttgacaatttcttacataactagtccacataggagggcagtgtcttggtcatttatatatttatttatatacatattataaattaattggtcaatacatacacgtacgatcgatattttcacaaaatatataactgaaatttattgtttgattttttttt

SEQ ID NO: 185983 - DNA, 3452 bp, Cannabis indica
gagaacagctagactacctccataacagttgggctttattcgggtcattgacccgatccggctcggcctgataacagttgtgtcggtcattcaaaaaaaaattaaggaagggggctgagtcaagcccgacccggttatcttgggttaggcctgacccgccaggctgaaagaagtggtcgggccaggtcgggcggaatcgtgccgggtcgggtcaatgtcgggtcgagcccaactcggcccgattgacattcctatatatgtatattttactctttataattattttctaggtacaatttgagaagttctcatcacattgtgaatttgtcaatttgagccatgttgtgggtcgacaaataccgtcctaaaaccctagaccacgctttggttcacgaagatgttgcccaaaacctcaagaagcttgtacatcctctctctctctctctctcttttgccgtttcagtttctctgttagggttttgattttttttttctttctacttttacaggttactgagcaggattgcccgcatttgctcttctatggcccatctgggtcgggcaaaaaaaccctaatcatggccctcatccgtcagatgtttggagcaagtgctgagaaggtattttttccccccctcgtttgtttattgggaagttttaagggaaaagaagttgtattcatcttgtgctttttaagaattgttcagagagagaagaaaataactatagaagctttcactgcgataagtgaacttaccttcatctttgtttctattgcttaactgaaagcctactatttacataagtatataataattttctacctcttgtttttttaatactcttcacattattttggattttcaaaagcattttcttttggctgcaggtgaaggttgaaaatagaacatggaaagttgatgtaagctttcttttcttgattcttccttttgtcatgagtataactattgatttgactatttatatttagcttatatttgatagactaatacaagtacctgatactgaatttctgtttttttttttttctgatgaactgactttcggtttttgattatgtatcttttgtttaaaaatatttcatacctgacaaatatcgttgagaatattttcttggaatgaatgcctagatggtgtaatagatttttagaaatatattaagattcgttttacatttgtcaatagtgacaactcttttttcttttggctaaccagaagttatgaccaaaatatttataatccttgtaaagattttggaattttgttatcatttatgttttgtgtctaatgtttgaaaatataatttttatgtaaatgttttacttcttttgtaagccaccataactgtcagtttgttctaggataatttacttggttacattatctagttaagctattaagctgaatgctttgctatttcaggctggaagtagaactattgatttagagctgacaacattgtcaagtaccaaccatgtggaattgaaccctagtgatgcaggatttcaggacagatatatagttcaagagataattaaagagatggctaagaatagaccaattgacacaaaggggagaaaaggatacaaaggtagtattgagcagttttcttcattgaaaattgagtgtagttttattttcaatatgtcaaatggtcattcatggatctttttattcaacaaattaagatatgtttttggaccaatccctgtttgtattctttccacttttctaaagcattttgctggctgtgctaacagagtacatgttttgctcatggttatttgtcttggtactattctattaatcgggcagtaccctcatttttcttattgttctcttttgtttcttctccttgccttgtttctttacctgagataaactaataccctaaaagtacttttttacttgacaacattagctgaccatataacatagggtagttgtatacatgtagtagcgagcacatgatatgcacatacacacatatgagtatgtagacaaacttatgtgttggtttaatacagtcattttgattgatgacgtgtcatcttctttgatgacagttttggtgcttaatgaagttgataaactttcaagagaagcacagaattctcttagaagaacaatggagaagtatagtgcctattgtcgactaattttatgctgtaacagctcttcaaaagttagtgaagccatcaggtctcgctgtctgaatgtgagaatcaatgcaccatcagaagaacaggttggataaattttctctttgtcataattactagtttgtactgagctaatttattacatgcatagtggtttatattataaaagacataggactataggagttaactttaatatggtatggagtgacattcacaaacacacacatatttatatatatgatatggcaagattctagttgagaataagatcttaaaagtatcttgttttgggggattatggtgtgttttcaaagtttaaggtagatattacaaataattttgcatcaagtatctatagcagatatacatcaagtaattagtagtgatagcaattagttactatttgaatttagtttcattttataattgtgtaatgagttattgatgtgtacataataagatatgaactatcgctaaaggtatgtttggttaggagtaataaaaatagaggaatggggatgggagtagaatgcaacagaccaaaatttgacatgaataattttttttatctgtacattggaatgatcttccctccactcttaaatagaatagctatcccaccaaaatagtggtaaaatcattccaatattttataaagcaacaaaggtagaatgaaaataatttcgattctatttcttttcattccattatctccaactaaacatattgtaacagttcctagaaaataatcctaatatactgaccttagtgataggtttcgtgaattccatggtcatctaaattattgcactgttgtatgttaatgattttcatatttatacaaatagtaggttgaacatgtgttactgtaataagaaatggatttaagtcaaggtattgacttgaaagtcgtctagactaagcctattggttcactctgttcggtccattcaatcatgagaatcaattttgtgactaaagcttttggatataaatgtttatatatatattttttgaaaaagagatcgacgtcacttgtcttgatctaacctccttccaaattttattgagtctcctcgcgtatggtggaggaaatttatagtaacaaagggttattaatatttatatttactaggtaatatcaacatgcaattttaatcaatcattatgtttgcttagacttgcattgcctggtactattaccaaattattaattcaaataataataataataataaaagtataattcaattctatcatattttt

SEQ ID NO: 185984 - DNA, 1077 bp, Cannabis indica
aattatggaaagagcctgtatgttggctcctttcttggacttcaaaattagacaaaagtaaatagaaagaattttaaaaatacatttctttcacgttttactaataattttatggcctataatgttttaattatgaaaatatatttgtaaagttttaaaattataaaaacactttgttgagcaaaaagtaaaaattaaaaaacaacgagaaattaacctcacaataattataaataaactataaattaaaaaaaaatataaataaactataaaatctttttaaaataaacaaaaaaaataatcttatgataactacaatacaactataaataaattataaaataactaaaaaaaatattttagggaagaagtacttttataaataaataaaaaaattgttaacgtatttttattttttttttttcaggttttttaagtaaaaaatttcgaacaaatgaaatgataatggtcaaagatacatgtggttggtatataagtttagcatctccaaaaagctgaatttctttgagaaaatttaataacttgtaaaagttttccaatgaacatttttcctcttgtaaagcaatattgaaagtttcctaattttattctaaagagaacattattttagtgtcaaattatgtgtacatatattgtggcataaaatttcccctaacaagatattttttaatttggaaagattgtaaactaacaatattagttgattgtggctttggctatatttacactaaatctaccgcagtaactacattattaataagtgtaaccagttgaacaagttttatgtgtgagagtgttttgtctaatcgatgcatgaagtgactaagcaaccccatacctttccactcatcatcaccgctctctattttctttgaactccttctctcatacaatgtaaccacactaaaactctttccttttctcaatttccattctcatttttgaagaattctcactttttataaagaaacttatcaatacaagattatcaagaacacaaagagagaatttgagttaccaagagcatgtttggtctaattttctgttttttgtttt

SEQ ID NO: 185985 - DNA, 5444 bp, Cannabis indica
taaatatagggtctcggtcccgtgctcctgactcattttgtaaaaacaatagattctatctaaaaagagtagagataggttggaagcccgattatccaatccaaagttacactaagaatgaagctcaaagatcaataattagaggtatcaggatctctttcgtcattcacatatacactcgatttgtttttattattcccctttacaaatccattatactgtatatactttattttttataaaataatatctaacaaacaattgaactttaaagaaaattttacacacctcatcaatcaagtaaaatgaaaaatatagcttagtaattattaaatacacaacaacaattgatctcttttactcactcactcactcacactcacttagacacaccaaacatattagttaaaataatttcgtaacttttgaagtaagttttataaaatatcatgaactaaacatatcaagttatcacaaagtatattctcacattaatgttgtaaccccaaatcccaattaaatgacaacaaataatgttacataataacaaacaaaagcataaactagttgctaataaaaacgactgcgttttgtttttgttgcgaagtcgtattgatttgctaaactcaaaagttttgcttttggtgtccaggaagattggtcatttcacgggactcatcactagtggaagtcccaaactcactgctcggatattcctggctagtcaaagccatttttctaaaccttttcatgtcagcattatatgcactcgcatcatagtctgagctctcactcgatgtgtaaattgagctatagcctggtctcacaccttcgttcaaatcatccagcgaaacatctccttctagggcccgaacaatctgttttcaccaaaaaccccaaaaccaaaccaaacatgtctgtgttagagctcacattattaatgtgtaaaaagataataccgtataccaatttcattaccaattggttagcttattaggttcttaattttatttttttcactttctttctagaggcattttatcgaacatgttggtacctgactcattttggggcgctttctggccgaatggcggatgcatgcggcggcagaagcgaccatgcgcgccatctcatgtgggttgtaattgtcttccaatcgtttatcaactaactcgtcataaacaccagtctcaagggcaacttgcataagtggtctagcctgtgtgtaatcacaaattcatgcatgtgtcaactattataacaaagagaccaataatgtaaataatgtatacagaaatttcatggtgcaccccaaacaaaatgagtatattgatggcatgcatctttttcgtgcataattttatttgtcaaaaataaaattcaaacaatttattgtttttatgtctttttattattattattttatactagtgtcatcatagagtgtttgagttttataaattattctgaaattttataaaaatatctaaaataattataatataagaaaatcgtaattaatatataactagatatcgaaaacacaataagaacattggtatactcatttttctggagtgtacccttaatctatatagttatatatattttaaatggtaaggggatttgatcatgtgtagttgaaattacccaatcaaccaagctatcatccattgcactgttaggatctacaggtcgatgtcctgttatgagctccaagagcataaccccatatgagaaaacatcagatttatctgttaatttcccacttgatgcatattctggagccaagtacctgcatcatcaccatcatcatctcatactttcatacattaattaaatcaaacttattaattagttatacataaaaagatcacttaataattaattacccgaatgtgcccattactcttgtagatacatgagtatagttatcagaagaaagcttagccaacccaaaatcagccacctgccatacaaaaacaaaattaacaatggtaagaattaaagtgagtttttaattttatttcattttaagaaaaaagaaaatgaaagaaatatataccatggcttcaaagttgtaatcgaggagaatattagcagttttaatatccctatgaataattcgtggatggcctgaacataccaacaatatttccaaagtgagaatatatttatatatatatatatatttaatagaagtaggaatgatatttatatatataaatatatattattacaatcttcatgaagataagcaagccctttagctgatcccgttgcaattcgaagcctagttggccaatccatacatggaagacctttccctgcattgcatgcgaaaaatcaattaaccaaaacatcattatatattcattgcaaaattttacatcaaaaaagttaaaaaagtctaatttttcttaatatgatgacaatggtgtatgaaacaaggactttaaatcttatagtttaccatatatcgagtttcataactctttttctgtattttttttttttaagtttattagtgtaggtgaatcccaaattttatgtttttcagacaaaaaataatttagagtattttaatttttatattttaaaattgttttttttttatttataattttacaaaaattaattaggaaacgatatagtaaccaacagacgaatctaaatagtaactcaaatctacatagtaatccatataataattattggaacaaccaaaaaaattaaaaataatacatcaaataattttttttatatataggaaaaattaatcaaaatttcaaaagaaaagttataaacatgaatgggaccaatataggtggtaattctataaattaaaaagttatataaatgtactcccaaatcgttttagtaattggataaaagttatattaagtgtgattaatttgaaaaaaaattataaattttatagatttttatactatttgtatatgtacgaaaatatagcattggaaaaattaaataaaggtaaccagttaccctattttaagaatttttacctttaaaccatacaaataaaattcccattaatctaaaaaaagaaaactatagtagctagaatatttatttataaatatataagaattaaaattaggtactcaccgtgaagatgatattccaaggtgttattaggaacaaactcataaaccaacattctctgtccaccggcaatacaatatccgacaagtgacacaagatgtcgatggtgtactcggctaatgatctcaacctctgcctgaaactctctctcaccttgaccacttcccgattttaggctcttcaccgcaacttgtttcccattaggcaaaacccctttgtgcacgtacccaaacccgccttgtcccaacaaattctcctgcgaaaacccgcccgttgccgccgcaagctcgtcgtaagtgaaggtgcttttgttgaacccaagagccagtgatggagaaggaggcggcagtggtgggtgtcgtggtcccgagtaattcgagctcatctcgccgctattcatgcctggaggaagtggcggaggcggtgaaggccatggaccgccaccccctgaaccgccacctcccgaaccgccacctcctggtggcggattaagccttaccacgtgatctgttccttgtgggcccatgttccaatttgtatgaggttgattgttgttgtaataagaagcattattatctgtttacccaaaatgaaaaaaacagaagatcatcaaactaaatgtacgtatgcatgtttagggtaccaactaatatgagagttgtattcatacaaaaaaaaaaaataaaaaaattaaccaattatgagaaatgctaaaacaaaaatgttgtgcattttgagagttctattggtgctagttttcagaacaaattactatcaattttatgtattttgatttaaaatataatatgtgggatcctctaaagagcaataagtgttcaaatggaaaaatccaccgtatatctccaaaagggtacgctatcttagcatttaggaggattttgttagtttagttttgtatgtacaataatgtaccactgtatttactatggctatttgtaaatttacaaaatttcttgtatagtttcaaaggtaattaaggtaattcaactagttatttactacctgtacaacaaaaattgttgaaactagcattttcgaacaaccacttggatacaataatagcatttggttgggaggaatgaaaatataagaataaggataagaatgtaaataagaataagaagggaataaaatttaaaatacatacaaacaaaatagataaaaaaatcattaaattttttattttgttatattggaatgatcttttcttactttttaaaatagaataatcattctaccaaaatagtagaaagaacattccattggaatacggaatgctattctaatactttaaaatacaaccaaacaaaaaaatagaatgaaaattgttttatttccattccattctatttcattacctcaaaccaaacgccactttaagatattgtctttcaatattgcgctgcaatcatatcacatcttaacttaactgggtatgttattgttaagctttcacaattttggtttgtatattcataattatagaacgtgttttaggaggtcccaaaatatgttttcaaatatgttgacttggttggggaggtggtgattttgtgagtattaaaaatttactagtagtatgagattatttaaagatacgtattgtggtattattaaaaagatcaaacctcttggaccttgagaaggatcagcgccataatattgcacatgatcacttttcctcttcttcttcttcccaaaaactaaacaaatggcgaccaaagccaatataaaaacccctgctccaaccccaactcctattaccaactgctttgttgagcttgacatctccgagctcgacgagctattggacgatgaattcgaatgagacggcggagatttaatggctcgcggtggcggtggcggcgaagatgaagaagaatgagatggcgggggtggcgaaacaaactcactgggcggcgggttcgaaacattgttgttaggaggtggtggaggagatccatcgatggaggaagacggcggcggcggcggcgaagaaggaggtggcggtgatgatgttgttgcatttggaggcggggaacttgtcggtggtggcggcggtgttgatggtgtaggtggtggtgttgtcaccaacggtggtgaaggggacaccggggacggcggtggagtggtggccgtggaatttgaatccggggagggagcagtcacagaagatgatgaggaagacatcatctaaagtttgggaaccaatattttctagttcacgaaccttcacctcccctgcaactgctcatctcaaagatttgatgtctctatatacatatatatatata

SEQ ID NO: 185986 - DNA, 1441 bp, Cannabis indica
ttttttttcttgtttttttttttttttaaattattagtgttatatgtcaattaatgctacctccggaagcggagtttttttttcccttcttctcttttgtggtatacaacgaactaagtacgccgtgtgtgtgtgtgtgtgtgcgtgtgtgtttttcttctttttatttttgtgggtgggtgggtggcgctggggttagaggggcagggcgttagagaagttaggaagtgtttcctaaaaacaccaaatagttgttttagtggcaggggctttaaattttgatataaagatcttgtttaccgttgcttaaggagtttgtaaggcttgtggagggtgacaactgaacagttgacatgttttttattatctcatttgcttgccatgtttagttggttcttagttcgttaattgattttcttattgtttttatagttgaattgaagaagccaagctcatgttcagttcagctttccaataacaccaactaccatgttgcttttaaggtatgttttaattgctcttgttcaagataatactacggatttggtattgatggtatccagattgcaatgtgatttaagaatgatgatattggcaggttaagaccacctcccctaagagatactgtgtgcggcccaatgttggtgttataatgcccaattcgagttgtgattttataggtacacactgttcaataggtttagttgtttcgctttcttcttttatattttctgtcttacaaataatttttgtcaaggatgtaagtgctgcagatttatttatttattttgaacaaaatccacaatcattcacttttgacagctatgagcctggtgaattaactttctgcatgtcatgagatcatttggtgtgaattttcattgctaagtgaagtagtatgctccttgtagtaatttctttctttcttttatgtaaacttagtcacaatgcaaatgccacggacaactccactcgacttggagtgcaaggataagtttttaatccagagcacagtggtttctgctgagacaacggatgagtacattacagctagcatggtaatttctgctgttgttgttgttgttgttgttgtttctcttgatgtctcttttagtttctcatggtttttataacagtttgcgaaagatggcgggaaactggttgaagagaagaaactgagagtgattcttgtcagcccacctcattcgccaaccttgtcaccaattaatggagccttaaaccaggggatgggtgatgattatttattttctaaagatcactctttaaatggagttggaaatttatccaaacaacaaacggttagattaactcttttatttcattttgatgtttcaatacgcccgcctcctcacatttgacacataaaacgttgctttctgttttcatactcattctctcatgcagaatgctttgagtttcg

SEQ ID NO: 185987 - DNA, 5954 bp, Cannabis indica
aaaaaaaatataaatgaatataaaaataagaataggattgggatccagggattgaatcaaatttgaagtgcatattgataaaaaaaaaatcattaatttttattggtctttcttttctaataaaataatcattttgtcaaaataatagaaccaaacaaatgaatgagatgaatattatttcatttctattatattctatttcattacttctaaccaaacgttaccttaaggtgggatatactagtacatttttatctgtctcgatatttaagagaattttttagtttaatttttttttcatagtgatgcacattatagttatttaagacatcttataaaattttaaaaaattcaaaataatttacaatatataaagtaatgttcaaataatctattttacacgaatgtaaaataaaaattacgcatgcaacacattatttaaaatgtcttaaataactataatatacaaaactattaaaaagaacattagactaaaaaaattccctaaatgcggaatttaacttgttacttttataagaaaattaattctttgtataactatagttttttttaggttctttactgttaaaattaatttgggatgtatttgagtttattatacctttaaagataaaattaaaacgaaattggttgatggcaacttttataatataaaagttaaaaaaaaatcatctttattattaattaataattaattcctagatgaattataatttccacttactttaaaaccaaagtttccatttttattgctcatttaaaaatattgtttttctttaaaaataaaaataaaaatcatatctttacatatctcattacttaaaatattaaatttcaacggttcttttaattcttcttaatcaagaaatgtttctttataaataaaaaaccccctaaactctttttcccaaattcacagtcaattctcaaaattggaaccctaaaaaaatgtatagcagaggcgatttggtggaagtttgcagcaaagaatctgggttcgtgggatcatactatgaagcttcaatcgtatctcaattgaggaaagatctgttcgttgttatgtacaagaatctggtggaaggggttgtaaatactcaacctttagtcgaaacagtgagactcgatgaactccgaccggtgccgccgccggcaccggagaatgatgagaaagagtatgggtatcttgatttggtggatgcttgggataatgatggttggtgggttggaagaatttctgggaggaaagagaatggtgattactttgtttacttcgaaatctgtggtgatgagattgcttatcctgtttccagattgagagttcatcttgattgggttaagaagaagtgggtttcttctgataataaaaaggtaattaaaaattcaaattttgatgattttgggcttaatttagatgattttatttattgattgattttttgaattgaagattcaaactttaatgattttttttgttttttgggtttaatatagatgattttatttattgattgatttttttaattgattttacagggaaggaagcagaaaaggaggagattgaatacaagtgaaaacaacaacaacatcaactgcagcagtgttaattagtttgattattattataactatgtaaatgatagtatagtatacagttgaagagatttgtttggtggtgttttaatctttagttaaaatctattgggcatattagaatagtgtgtaattagtttttttgagttgtttttgtttttatggttgtgaaatgtttcttaaagaaagctaataagagaaacttttattgaagtgtaaacaacaaaagtcaatataaggaaagagaatggttgatttcaatgattgtgtctttttcttcacagctcatagaatttagacccaaagtcttgtttctttaagacagtgcagaatagggcgggttttacggatttcgggtaacccgcccatatttttctacacccgaacttggctcaatgtgtagccgggttgcacctgaacccaccctagaatttctaaaacccaaattttctatgttttttgggtttggatcggccgggtttctcaagtgaacgggttttcgggtacaaatatgctgtcccaaatttcatattactattcaaaactaaatcataaaaggaaaagagagaaagttagagtctttgttccatggattaaaccataaaagaaaaaagagagataaagtgggagtctttattggattccatggatttgtttgaacacatcattgataatcaaagttaaagtcattatcttcatccccaacatcaaatgttggattaattgagcctttatatcttcactctcaaaatctgatgttagtttgttgtgagaccaataaaacacacaacaagataaaaacttgtctagttagtactaatagtattgtatatgagagtaaacactcatcctaatttcttttttctgaactacatataaatctgtcatcaaagtcaaaccctttgacttcagccctttctgttctgtatttacattagcataactctaaaaactcactcacttaaaccaaccaaaccaacaaacacaagtttttagatccaaactcaaatcaaagagtctagatatgtgtagttcctgtgtcggccatactctaggagacttccataagtacgatcccatatcccgatgaagagtgtttctgtgtcgggactgaatgatatgccagagatctcaccgaacaaatcaatttcatgttccttttcgtagccactcccacttttcacatcatagatgtggacaaaatctgcagcctccgccattgccatgtactgaccatctgatgtgtaacgaatagaccgaatcgctccaaggttaccctttagtactgcaatcgattttgagaggttgcgaacatcccataacctgcaagtcttgtcttggtttccagttgcaaatgtgataccatccgggtgccaggctgatgcgaaagagaaatctaagtggccacgcaagtgtttcactgtctgcattatgcaaagtattcagctttcggatttggatacattgctattagtattagcataaagttagatacgaaaatcgagtacctttccagtttgggagtccactaacataccctgctgattgtccccgacgactacaagaagttcaccatcagggctcaaactagtatgctgcaaataaagacacaacaacacaacacacaagtcaggctttcaagtctcgcccaatcatctcagtcgagcatggtgaccgatgtagtaaagacttcctctgtgttttcagtgattacatcggctcctagagaccaaaaagattagcaaaaatattatattttcaagattattgtagcagtgggtttagagtttagacacaatgcaaagggattcgaatctcacattcactgcccaaggaaagacgaaagacttagaaagatgaaatctttccatatcgaaatctctgactccacaatcattatttgctgatgtgaagtgagctgcaccactaaaaattgaagacaccaatagttacatagtcagcattatgagttggtttttggtgttgttagtgggcgaaaaaagaagaaaagggttaaaatatttacctcggacttgtatagatctcaatggcatttgttatggcattatcagtggtgacagtcttggcgcagtagctaactccaggtcgatcaagatgctgtatttccaaacgaaaatctaacaattcttaagagtgttcaaacatgtctttttaattgattatagactcaaatgaaattcaaaatcttcaaagactcagtcaatgcataaaattataaccgagatcattttcaccttgcaaataaactaaaaaaacggtttattatttttactgaaaaggtatatttgtaaataaaataaattcaaagcgtaaaaatgaaattataatcaagatcattttcaccttgcaaataagttctccttgaagtcctccagcaactaaaagattgtcttttacagcgaaagtactgatttgaggttgtttaaatccttctagccgacttccgggatgagtctacatggcaaaacttagtaagtgaatttgacaacaataatgaataagcttttagattaatttaattataagggaaattaaataaaataaataaacccaacacaaaacaaagaatgacctcaaagggtgctacatgtcctgaaagattgagaacttcaaacatggtggaagttaatggtgaccaatgaattatgagatgattccaaaaaaggtaaacatcatgttttgaagtagtccacactaaattcctcaactgcatcaccaaaacaacaaaaataattgtgttgttgttgttttacttcggaatgaattgactaacaccattctggaccttgtattttatcaaagttaccgatcaacccctatattatattaaatgacaatttagagtccgtgtgcaaaaaagaacataataatacaatgagctcgattttggttttcctaaacttaaaagattcttttccctaactctaacaatcgtgattcaatttctattctactctgttaggccttaatattagtctgattagcataactaattagaagtatggaggctaagttatcaagtccttagccgctgtgttcagtgtttctaaatttgtgtcttctaatttggttgggtagttaggattatttgttagtcttgtgagaggggaggaatctttcggtgtgaaatatttagagtaaaatattactcggggagtttaccaagtttcttgtataactttgtatttgttcttcctcttatcaataaactacatttctttcaagaattaataattgagcacaagtgtgtatcatattcctaacttgaaaaaaagtttgaccaaaatcaaatttgaggtaacattacattccattttgtaaaacacaaggtctaaattgtctaaaacaaaacagaaggtctaataggtaagttttgcaaaacacaggatccaaaatacaaaattttgtatagcaaacctgaaaatgaagtatggttgatttcactgatcgagtatttcttctgaaatcatagaatgtagaccctttcttggtaattttacagtcctgttagagagtatagatagtattaaatagtctatactatgaagcaagcaagctatacacatagctataatgttaagacataataacaatatttgataccattgaagaggtgtgtccagaaaaaggcatattttcatagttgttgtattgttccaacctagtctgtctatattggtctctgctaaaagtaagtccctcccaaggaataccttggatatcttttcctgctctagcttgcttagcagttatatcagttgatttagtattttgctgcaataataataataataaaaacaaatacaaacaaacccaatcaaaccaaaagagagattaaagttaaaatctttaatctttaactattagttaagttaaagcttaagatgactcaccacaaaatcgaagtcaaagtcaccatcagaatctgagaagtcataatatgcttcttcttcttcttcttcttcttctctttgaaaatgggacatagtttggtctgtcttaaaagggtcttgaaaagcctatcataacatgcaaatgcaaacccaataataagcatatcatcacaatcgtataataacaaacaacatataaagattacgatatgcccataaaaaaaaacatttcttgtctctgattcaattgaaaaaaaaaaagaaaagaaaatgaaaaagttacctctttttcgtgtttgaactttgaagaaacgatttttaagaaattgggtctctgcaaaagtaattagtaattgattaaaacggtgactgaatccctatgtctcagggaagaagatgaatacgtgtcaatcaatcatctaatacaaa

SEQ ID NO: 185988 - DNA, 6426 bp, Cannabis indica
tcgctagtcaggcgccatgacattgccgtatttcatggtgctttgttaatcataatgtgcatgatggatttaatagatgttggcagcagtgttggattagatctcacaacatgttggaagcaatgtaggattaggtctcacaaatgaaaattattattttaaatggctatggtccactacattgtatactgtgcttggtttttttttttgaaagcgtatgtttttatgtgggcctacatttatgtgttttgaattgtagctgactttaaggattatctttcaaatcaagtattgaatttgaaggatagggagcatgcagcaggcactacttgattacgctttaaatgttgttatagcttttgagtaaatgcgaagggtacttattttttgcaccttaatgtgggatgcaggtactacttaatttgcatgatgttggataatttttcacccacacattatctcagaatgtgggacactgggactaaattatttacaattgtgtggttagaatagaaactgtgatgcatcacttagcgccatttgtgtttttctttctttttttttttttgtttgaaaaaaatgagtgttctttgttacttatagctttttattccacttggagaacatcattatctctttgtaattaataaactttttcttaactgtaaaattatgcaagtctgaaaatgctctcttaataattaatgatagatgtgaagtttataacgagagaaacctactaaggaaattaacaaactcagacgcaaggattattgttgacatattgttaaactgattgtattgtatctaataattaattatgctttatcttggaggatatttccttgggtaaatatttaatgttaattttacttcttctaggttaagaaaagttactgggttttacatttgtcttcattatcatttctatattgcttttgcttttagtactgactctcctgggccttggcaattatgcagattggccaaggaacttatagcagcgtgtacaaagctcgggatcttgacacaaacaaactagttgcattgaagaaggttcgatttgctactatggatccagaaagtgttcggtttatggctagagaaattcttattttgcgtaggcttgatcaccctaatatcatgaagcttgaaggcttaattacctcaagggtatctggaagcttataccttgtatttgagtacatggagcatgatcttgcagggcttgcatcaagaccaggagtcaagtttacggaggcacaggtttgttgagtccttctagcgtgataaacttaagtgcttaagtatttgactattagcatgaactactatactgtatctttaatatgctaaagtaacttttatgtatactgatgctgcaagaacactgcttgacatgtattgaagaagataattccttttgggttgaatctttctatgtggtaaatagttatcatataaaaattagttatctttaaatgttgttaaagttctatgcaatctttgtgatggtaacttccagtgctactctggattttgttcctaaacttatcattatgtatcaagttgttttgtgttcgttgcttgtattttatcaagtagtaaagacattaaatcaaatatttggtgatattcttacaaaagattaaaaaaattcttacaactgtatctctatgcttatcttgtggtggtttcagtacaggtgagattggagtgtttcttatcatccatacaactaacatgctcatctttctctttgggctgacagattaaatgctatatgcggcagcttcttcaaggtcttgaacattgtcacagtcatggtgttttgcaccgtgacatcaagggatcaaatcttctgattgacaattatggaaatctgaagattggtgactttgggctggcaaatttttacggtgttcatcaaaagcagcctctaacaagtcgtgtcgtaaccttgtggtatcgaccaccagaactcttgcttggatctacagaatatggagttgctgttgatttgtggagtgctggttgtattgttgctgaattgtttgctgggaagcctattatgccgggcagaactgaggtacttctttgtcttttggttttttacccactggtctatatgcaattttttgtgttttatctatacattataatcctgttgtaaccccttttaaaagtaatattatcagtagtaaaatgcactggatatgctttaagaaatgtggtatttcggctgttgagttattcattctcatgaatatccacagatattacaccacttagagttttgagtgctttaatgttacctagtggatttatcaaaatctaacataagatacacattataagcataccgtaaatatctgttgagatataacagaacagaaagaaagaaagaaagaaagaaagaaagaaagaaagaaagaaagaatgaaagaaagaatttcgtttaactacgcaagtgtgttaggccagtcttactctatttctgtttttccagaaaggaacttattattaaccaaatccagtatttgtttttggctagttttacattcattctgtaaaatgctcttcttttgattgattaggactcaaacagaatcaacctattatgctaattgattgttcactagagtctgtttttttctttttataggtggagcagctgcataagatcttcaaactttgtgggtcaccttctgaagaatattggaagagatcaaagttgcctcatgcaaccatttttaaacctactcatccttacaagcgttgcgttgctgaaacattcaaggacttcccttcatcaacattatcactgttggagaagcttcttgcagtagagcctgcaggccgtggaacagcttcttctgcactccagagtgaggtatttggacttttagtaatcatttagctaaaacctaaatcccgtttatttgcatgtggtaatcttgctttatattcatttggttgtctacttgaatttttggatattagttttcacattgtttgtagtgctactcatttcattccttttagttcaattcttagtcctaaggttttcttttcagttcttcacaatgaagcctctcccttgtgatccatcaactttgccaaagtacccaccaagcaaggagtttgatgccaagcttcgagacgaggaagctagaaggtgagctgttctcatttgctggttcttttttctggacactatgcataagacattcgggttatgggctttaccagtcatgctctgcttttaaccaattagatgtaaattttggctatatcgtcgtgggagaaaaatcttttaagtattagtatcagaatctgtgtaaccaaagctttgatttctttatacctcaagcttaagaggaaatgattcatgaaaagaaagataaaattattttattagctaaggagttggggcatgcaaacttacaataataactcttgattcttgtaaatattggtgaacatttaactgaattagattatcagagccaccaacatgtgatcttttctatgtttttacggctcacattgctataacttttaaaaagaaaatggttcgcattactataatatttagttgaagactgagattcttttgtttgcatttaacactttcttctttcattttataaccaggttaaaagcagccggtaaagaagtaggatatgagtcacttaaaaagggctctagggtctctaaggctgtgccagcaccggatgccaatgctgagttgcagtcatcaatacaggtatctttaaatggtctaaagaaggttatagtacatgattacttttgctgaaatagagttgcctttatgttgaacatctttattttgttgtttaccccagaagcataaaggacagcataaccctaaaagcgtcagtgagaagttcaatcatgaagaggagggaggctctggtttccttattgaacctcctagagatatgtcacgtaatggtatcccacaatctggggcagtctatgctattgagtgccgtttggatctcacaatatggatgcaagggctggccagtctaggaacggtgcagagttgaggtcaccaagatctaatgtgcatcgtggagcagttgagttgtccagattttccaattctgttgcagcacgaagtgaatcatggtttgatagttctggagagaccagtatgacttcacactggcctgaggagcgtattaatggtggatatagtcagctgaatggtggtgattcttctggaaaacaagaatggtctcaccatttgctggagaggccaatgtcttcacataagaataaagatgaaccaatgtcagagaaggagccttctgcggtaagacatttaactgagaccactcttttccttctattggctgtttgaggccatccttattgggcagaatatatgaacatctcaattcgtatgcttgtattttatgccacaagtgctgattgatgaaacctatcatgttcccattaaaagcagcattagaaaagacatttgacaaaaaactcagaaacttatattttgagagtttgcttttaattattctctcacggccagttaaaacctataacaaaattgttttgctggtggtttactgtttaaatagtgttttgctgctagaatattcctcattttgtctttgactctactatctcaggcttatgcttacaagaagaaccgaattcattactctggaccattgatgccagcaggaggaaaccttgatgagatgctcaaagagcatgagaaaaaaatccagcatgctgtccgtaaagcccgtgttgataagacgaaaaccaaaaaaacacacaacggccctggactgatcacagagtcgctacttcaccacagtagaaatgacaaggggtgattgatgaggaaattcatgtttccttgatatggtgcagaagctcctgcagaagggcatataattttgattttaagaaagatatagggagaccttttcggtttctgaaacttcaccgcaggggggcatttgtttatggcatcgaaaggtatgaatgccataaaaagcacagctctagccacgaatctgtttcaaatgatcctgacgcaagtctttgtggggtaaatgaaatctttctgattatgatacgatatatttattgacatacttggtgataaatgtcaccttgttttgtccaaagtactgagagacattatgtacagttgaacgaacctcttttgatatcaaattttaacccgttctatgtaaaggatcagcggttgaccaaaatattgtaggccacaaatcataagatcagtttcttaacccaaagtacatcatatttaacccgttcaatcattgctttttattattattattattatttctaagaaagggggtctattaatgcttttgattgtttggaagaacattaaagttaaaggtgctaattagtatttgtcacaggaaaaataaaaagaaaaacagttcactcatctcactatgattatcagaagaaatacaaatttagacataaaattaaatactaagattctcttcaagactgagtactttggttgctacgagaaaaattaaatagttgtttgaatggtcattttctgtttcacaattaaatataaggccgtatgattattatagctgagaatctgaaagtgacattaatctatttagaaatgctggttcagagaagtttattagtattgttttagtgattttttattttttatttgtatcaaagtgggatttaattggacttgtttcatatacttccaaatatattaactgggacaagtagcaacaagaatatgactaactaacttcaaactaatagacagtccaacgatccccatcttgaaattatagtattaccttttgtatattaaattatttttatcataaggtaatgcaccaaacaccatgattcttttttctagtttcagagtgataaaattaattatattgctggaataattaatcatctttccagttcttatgaaagaaattgcaagtaattttaagattattcttttgtggtttttattattcttattatttgactataatttcgctgatatcatgatttttcttaaacgaaaagaatctccacagtccttgatgaagatagggttttgcttaaaagtttcaatcaaagcgatgatagattataatatgtaatcaaatatctacaaaccattttaagttgtgatgccacatatattcaaaaccaaaactttttaagttggcaagatttgccttttgacattaaaagtatgtatgatcatttatagtatatattataatgaaccatatttttgtcacatatatagtttttcatcatatatctaagtctaacagaactttttcaagcctcacgaaaatgaataagcagtactcaaactaaccctaacaaatgattaaa

SEQ ID NO: 185989 - DNA, 1877 bp, Cannabis indica
ttttataccaaatttacatattatacttttttttgaaaaaaaatgaaaacaggagaggaaggtcctggatggtcaacaacatggaaagcttcattgtgggctcgtcttcacaacagcgagcacgcctatcgtatgatcaaacatctaattgatttggtggatccagatcacgaagctgattacgagggaggactctatagcaacttgttcacggcacaccctcctttccaaatagatgccaactttgggtgagccacattctgtgttatgtctctgaacaactctgctcctgatggaatttgatcgaaactgaactgtatcacatcagctttttttatattctcacattaaaaatctaactcaatttgaaagccttgacatgagggacttggtgataagttataagattaacaatgcaaagccatttttcatgtttttgtgtttttggtggcagattttcagcagcaattgcagaaatgcttgttcaaagtactacaaaggaccttttcttacttccagctctgcctcgtgataagtgggcaaatggctgtgtaaaaggtctcaaggcacgcggtggggtgacggttaacatctgctggaaagaaggtgatcttcatgaagttggtatttggtcaaaggaccaaaattctatccaaagattacactatagagggagtacagtcatgaccaatatatcagctggcagggtcttcactttcaataggcaactaaaatgtgtcaaaacttactgtgtttcaataggcaactaaagctttaaatttaagattttgagccttctttaaattaaagagcattttttttcttcttttgaccagtttacatttaattctttgttagcctgtgagagtcattttaatgaattattagactaatgactcgtccgacaataattaattgaattatcatttgtattaaacattaaacataaacctttactcgagaagaaattgccattttttttttttgctgagaagaattttcatttttgttggttaagataccaaaaatagtgtgaacttctaaatggtaaaagatgtctcgtttactatgacctatgatagttgtaacgacggttatatgaaatgctaaactagcattaaagattatgctaaggaaaaagctttgctttcttctttttccccgcatcaacatctccatcttcagttatggaagatggagaatgggtggaagaactttcaaagagttgagttcaaccctaatccactctgaggactgagggttaatgttcatggcatctcaaggtcaggttcaaggatcccaagaagcactagatcggtgtgcttcccatcagaaatggccaccttggtgatatagtttgtggtggcatcgcttttgaaattatcttgcttaatggtaggtagaaagaaagcaaaacactaaaaatagagtgttctacaaattgtgttttaaaaaatagaacaaaaacactttttcgaaattttcaaaacaaaagacgggattggttattattttttaaaaataattttcattttttattttataaaatacttcattactttgagatcttgatatgaacttaaccctgacctaactcaaatggtgacttcgacctagacccagaactcaactcgaatgaatgtagaccctggccctaatcgaataaaataaaataagttaggaaataggagaatctttccctttatttttttcctaatttgtgtggcgtctattactttatcttttcccaaaatttagtaaataattttatgagaatcaataccatacaattgattagcattccctttaagtaaacatgtcatgagaggtggagtttctttgagatattttctctaattaaataataataaaaaaaa

SEQ ID NO: 185990 - DNA, 5729 bp, Cannabis indica
taagagtgaattcaattcctagttaatattattcctagccattctaataaacacaccattaatttatttgtttattttattattttttttttaaataattccattaaaccaatatttataaactcagtgtcatagtaattgaataagtatagtaaccatgaaactcgagtcaaacattattaaattattagattaatatatttgttagaattttgtttaattggaaccaaacttagtaatttaaagaaactgttttcaataatttttattttagtgatgcaatttgataatgtaacttttttgtaatttttatatttagtgtattaataggtttttttttctattatattgaaatattttaaaaatcctttaaaaagaaaaggcgttttataaacaatccctctaaaaaaatagcattactattagacaccagtgatgcctagcaccttcgcgacatgtcgcgttgcgattggctagcgatactccctaaaaactattatattaaattatatgggacccgatacttagttgtactaatagcgatattgacacataggaaggtgctaggcaccattggtgccctttagcatttctcctaaaaaaaaactatgcacaaaaaatggtttcccttactggacttatccaaatacaattaaataaaggttaattaaacgagaatctatcttaattgtttactaacttgactatcgaaaatcactattttttctaagattttcttatttgatctttgttttacataatggaataaatatcaactataatgattcattctaatggtaaaatttattatttacacttatcactttcttaaatattatatttactatgtgaaattgtttcatcgtgaatataataacggactaacacgatttaattagttcatattaggaattatgatataattaaacataattatgaatttaacacatgtaattatgcacttgttatattgagaagaattagttgagagattaaggggagagaattgataaaagaattggtcaaagtataaaaataggaaacaatatcctgttattttgcatttaaactaaatattcgaatatttggatatttttggttacaattaaatgtctttcaaattgtagccaaaaacatataaaattctagttttcattcctattatattccctattgatcaaacaactaatcctattatgtagtatttactctttaaatattaaaaaaaattacattcaaattaaactaattcttaatgttcatgtaagtatattgaacattaaaataataaatgtgaaatattatcaagtgtgaagtgtcccacacaacttttttctataaatatatttatataagattaaaaaagaaataataatcataataataaattgattggttagattgaaaacataaaagcaaaggaagcaagtctcgtgagtgagtgagtcataaagagagcatcaacaacctctaattaggataggactcttacaatatattacaatttacataacataataacaatattacttaatttgttaagtggtcaaatcatccaaaaataataataataaatacacatacataaacatataaacacacaaacacatgcatttgcttctaaatcattactgtttttttcttttgtttggcatgccacaattccacttacatacttactagttactactagttacttgttctatcatgtatctactattactctattattactattatatactaataataacccctaatttctggattatatatactaacccattgttttcatttctaatattatgactcatttacaacaccctttttagtcttaattattcactatattttgccactcaataataactcctcatattctgttattagtcataataaacacacaccaaaaatgccattaaagtcagtcaaatcttcttcataccaaaatacttaaactatgtgtctatatatgggattgggggttactacttagacacaaaatccaaaattttaccaaaaaagaggtctctctctctcactctataaatcaagacaaatttttattatttttttataattaattatcccttaattagtatatataaaatgaattgtataggtacattttccaaataagtaaactaagtttgaatacaattgagttggcttggcagacagcatataacactagttgtccttctgccatttccatctccctctcttttggtatgtttcttccataaccaaataataatattagtcaatattttttcactaactcatatccaaaattcattaaaagtaacaaaacaacaattgattattattattattattgaaatttgctaaactaactattttaaatattaaaatttgtaaaataatcttattaaatttgcgattatgatggtcgcacaatataaatctataatcacaagaagaccataatgatcgtttatggttacatagtgtaactcatggtcatttttgcgaccataaaaaattattttgctaataaaaatttttgtaaaattattttactaataaaaatttagtaaattatctacatatattattttttaatttttttcaatttacgggtttttatatagaaaaacctctagaaaattgtataaaggctattttttttttggaaaaaaaaaccactcttcttcttattattattaaggatggttatagttggtgaaggagggttagatcacaagaaaaagataacataataatttgttgtgataaggaaaacacactaacaaaaaagtcaactaatatatgctcatccaacggtttgaaattgaccacatcttaattctaaaatgtcattaaataattgccctatactatacactatattactattactacatcattttatcttttatttttcttacctttttgccttatcttttttcctctatttttccccactacgagtctaataagtctattgtctttatgcatttgccaatcaaaattaactatgagacgttatcaacaatgacaattaatatcaaagaaaataagagaggagaagacaagaaagaacaaaaatttatataaggggctttaaaaggcataaccattattattattattattattattataaaaagtgagtgtaacatattctacactacaccccttgacaactatgagataaaaaaaagtgagtaatgagaagaagaagatattgtattaattgctgaagattactaagcaatgaaataatattaatcaaataaaaaagtagaggaaatttagcactgaatgaatgctgataaaaaagggaaagaaagaaagaaagaaagaaaagatagtgcaaagagacaagaaatttttttgggtaggcagaagcaaaaatggaacataattagggaggtggaaaatggtgatggtggtgttggtgttgcttacatccttggctctattgtattttattactttgttactttttctctgtcaagtaaggtagaaagctatgcctctgtggtgtcagttcaattgagagagagagagaaagagagagaggttttcatttcattttgaatccttaaccttaactacacaagacagagtgtcctcttcacacattttttaaagtaaaagcaaccgaataggcaagacacagaaaagagagaaagatggtatcatttcttaacaataatatctcatatcacacatcacatgtataatctaatctaatctaatctaatctaatactactactaccctttgattggttttaattaatttttaataagaattagattagtttgagtctgactgattcttccataagaattgcagaaggtaactccttttacccggatacatcgttcatttcaaggcagatgggatcttttgtgggagcatataccaaccaagaagacccctccattcactcaattttggccccctttacttttactgaggatattttagtcattttattctattattactcatttactattcatattcataagttcatcttcaaatcatttgattctatgcttcacgctacaacaacagcaacaacaactaaagatacaattttttttaatcaaaaataaagaaaagaaagaacacagaattgagatatactaatttgaaaagacttacatttttcatttttcaatactaatgatctcatcctattcactcacctgcatacatagagatattatgtattgtttgtgagtactactaatactaacactactactactaatactactaatgtaagtaaaacaattgagacttgaaaacatatcatagttgaaaaaaaaaaaaacaggaaaagaactgtaatctcaggaaaccaaaaaaaaaaaggaaaaaaatgatgatgatcaatgatcatttgatctatagacaacaatgggtagaatataagagaaaagaaaagaagagaagagaagagaaccccatttgtgattttggtgtaaacagatcttgatgaatcaagcatcagataagacactgaagtcatcatcatccaatggagcaggcaagttgagatctatcaaaccagaatggtgtctgtgctttactgagttatcagtaagagtagtattggtagtggtggtggtggtggtgctagtactagtgatgatgatgataggcttagcagtagttgctgtagttgtagttgcagttgcagaagatgatgatgagttgagttggtgagatctcttgtgtccaccaagagcttgtcctgacccaaaaactttgtaacaataaggacattcaaagattttattatccttaacaccttctttttcttgattttcattcattgaacaaatcttcttatgaccacacattgcttggtgagatcgaaacactttcttacacatatcacacttgtgtttcgcaacaccattgttactgttattattaactctcttcaaccttttcacaatcacttcatcttcttcatcatcagtcattgatttttttaaagttacagtctttattacctgttcttcttgttcccaaacatccctagaaagcatcattaagcacatagcaacatcttcctccggcgaagtatctgaaaccgaactcaccggttccgtctcagttaacggtactgaatcaacaacaacccaactgggtattcttttcaaggcattgggtcgacgattccgtttggatcgccgtcgagttgggtttcttgactctgtttcgctttccctgtcttgaatgacgacggagccattatcggcggcggggaaagagaactcgggatctgcaagacggaaacttttcttgggattctctcttaacccataagccaaagctaaagacttgttgtcatctgcatcaggatcagatgaagaagatgaagctggttctgggtttttgggaggaagaggaagtgtggctaggtgagctttcatatgaccacctaaagctctgccatttgcaaagcttcgatgacagagcttgcatctgtgtctctccattgctcacttacagaagaagaagagagcagaggaagcaagtaacttctcagaatttctctctcttcttcttttagctttctttttctctctcactaaaattgtaataaaggtttgagctttgggagattgggaacttaaaaggagtaggtgacaagcattcttctaccaaaagcacacacaacccaaaaatgtgattgatctgtatttatattttttttatataaaaaaagaaaaaaa

SEQ ID NO: 185991 - DNA, 8354 bp, Cannabis indica
ttaaataaataaaaattaattaaccacaagcgtcatagaaatttcaaataagaaattgtatatatatttatatatgaatgatgatatgaggtaatgaaaatgaaggaagggaaagaaaataatattaataacttgacaattatatttaagtcacactagttatttatatacaaagttaattttagttttggtccctaaacattaatgagtttgggttttaagtcctttttttgtaatgttaaaaaggtctaaggaaaaataagttctaaaattttaggaccaagccaatgtttattctttaataaaagttgaatttttattttatttattagtatcttcttgactaaagaaacatataagataataaatgaaagaaaataatagtgatatggagtgttactgttaatcttctattataattttttagtcaatttttgtgttcgaaaatacatgttaaatatttttttattaaactttttatggcagcgtatgttatgcttacaacatgtaaatttttaaaaaaattcgaatagtttacagtgcagaaaatatatttgaagttttttgaatacacgtaaaaattgaaatatcaggaactctgtttttggtacgataaactatttagaatttttcaaaaatttatagggatgatactataactatgacaaatcgctatgaaaaaaaatttaaaataaagtatttcggcatgtgatttcggacgtagaggttgactaaaaaattataattagccatcctcagtaatcgtttatgttaattatagcgcttcacataggagttatttccaatggagtgccaaataagtagtgcaatgctatattttaatatttttgttctctaatagtgtgctaaaacttgtgctaaatttaatacatgctaaaagttaaaccaaatttgacacaagatataacgctatgtataattttttaatttacattattaatactcattttttaatttacattgttgcaatttagcattaatgacttactttaatttttttaattataatattgctattaattttttaaaaaacgtatttaatttattaattatcattagtgataatgtcaatttgcatcttaattgtcatgcacaattacaaaaaaaatgtgctatatagtatttactattttttgtgctaaatttaacatattttttactcctacgagatggtctaagcttcttgcccttagttttttacttttctcactaatcactttataatttcatactaaaaaagacaataaaatagagcataaaagtttaagtaccaacaattttattgatggaaattgtcccatttgatgtgaaaaaaaataaccacatcaattttgtacaaatttatatcatccataccattttataaaatgtttctaggtatctcacatctcattaggttatactttaatttgtaaatttctttcacatattaaaatatttagattcttcattgttctttatgtcataggttatttatttcaagaaaaattcttgaaccttcggatatacatatctaaacataagaatattcttaccgtaataaatgaaatactttcaagaagtgcagaatggagaagaaaaagaaagtaagaatgatgagtataactcatgaaaattgtaataaactaagcaacatatcccattttcatgcgtcaaagatgaacttatttatacaagcctaaatgaatacacaactttatcatgaatctcaaatcttgcaaaagttgaattaaccttgagtaaagtattgtatttatagcaaagtattacagaaaaggagaaatggagaaaaactagctataatagaaaattacaactaactacaagtggctcattaaatatttacaacaactaataatcaagtaactaaccaactaataaaaaatagtttattggttttcatcccccgacacacacacaattgaaagggtgaggagcacactctgtgcttgcattttaagtagagaaacaaattagtgttaatgatttggtcaagatatcattggtttgatcaactgatggtacatatttgacttctaattatttggccaaaagttgatctcgaacaaagtaaaaatcaatttcgatatgcttggatcgagcgtaaaaaactagattggtagctagggaagctgctcctttattgtccacccaaattattggagttgttggaagagaaatgtgaagttcacgcaagacaaaagatagccactttactttagccacaatatttgctaaggcacgaaattcactctatgtgctagagcaagcaacaacttgttgtttctttgttgaccttgagataacattgtcacctaaaaagatatcataacttccggttgagcgcctgtcatcagggaagcttgcccaatgtatacgaatatccttggagatccaatcagacagttggtttaatgaacaaaccatcatgaatggttccttttaaatatttgaagagtcgcttggaagcatcccaatgtgttttgtaaggagcacgaatgaattggttggacttgttaaccatgaatgctacatcaggccgagttaggatgaggtattgtaaagcccctaaagtgctcttgtaaagtgtttgatcagaaaatggttcaccattggttggagagatcttgtgtgccgaactggcgagactgggacttggtttaccatctagttgaagttttgagagtaagtcatcaatgtatttagattaagagagatacatgcaagctttcgttcttatgacttcaactcccaaaaaagtaatgaagaggcctaaggtgcttgacatcaaattttatgtttaactcaacaatgagcttggaaatttgaagttgatttggaccaattattaaaatgtcatcgacatatactaacaagataataaggttttcacttgagttatctgatcttgaaaatattgaatccttttttgtataaggtttccttaagcttttcattccatgttcttggagcttgctttaagccataaaaagccttattcatcttacactatcaatttttctctaattttagtaaaaaaaaatctaacatggatgaaaatttaggagacatgatttagtacgtgtcaaaattcgaggggcatgatttggtatatatcaaagtctggggagcatagtacataaacaatcaccaaaatagtaaaattaaatggaattagacaaaagtttttaaatttaacaatctcaatagttcagggggcatttctaacaactttaaaaatttaaaagtataatttaatacatattaaaattcaagaatcaaaaattataattatctttcaattaatttaaaggatatcaatatttttctaataacagaccactttctatataaagaaaaataatgaaataaaacaaaaactctttaaataatatggaataatggtattccacgtttttttgtcatagactgtcattatcattataattattataaaatataaagcatagcactatctatatgacaaaacacgtgctcttcttattaatatttttttttaagtagaaaagaaaagaaataagaaataaaggtatacttttccaatattatattgttatcggtataattaaatttcgaatttaatataatttttaaaaaaatatcattaaccaattgaaaatgtcacctgatcttcaataacaatgctcaaaagaaattttttttgaaaagaaattgattgaaggaaaagttaaagtttcttatccaataattgcctatttactccattacttccttatatatatttccttaatttctctctagctctccacaccatctctcctcatcaatgtcatctaattttcttcacatgcctatgacaatcaccatgtcctctcaaaattttcaacatcatgatcactcatcttattttgcctctataacaaaagatatagaggcccatctcaagcaatccatcattgtcaagcctcctttcacagtctatgagcccatgtacaatttggcctttacaacgccgccaacttcagcacctttgctatgtgtggcggcgtgtgaacttgttgggggccacaggaggcaagccgtggcagcagcctcgagcttgcacctcatgcatgtagctagctttactcacgaacaccttcctttaaccgatagatccaatccaaatccaatgattcaccacgcttacaatccaaatattgagcttcttatcccagatgcaatagtccctttcgggtgtgagttgttaacccgtttagataacccgatcgaagatgatcatgcagatcgggttttgaaggttattgtggagatcacgcgagcctttggatcacaagggattattgatggtcaattccatgagaaggtagtcaatagatccaatggtgaggaagaaaacaataatgctgattggatcgattacacatgtcgaaaaaaggaagggaagttgtatgcgtgcgcggctacatgtggtgccattcttggaggggcaaatgaagaagaagaagaaaaattgagcaagtttggtctctatgtgggcatgattcaaggatattctaaaattggtagagggaaagaagaggagagactaaaaagagttgaggagctcaccaaattagctataaaagaattagaacatttcaagggaagaagggttgaagaaatttcaagcattattctaggcccatagattttttttattattatttatcaaatggccaatcttagtgtataatttttgttgaagaaaatttgaagaagatacaataaagtgggacatggcttgtcgtgtgattgtgttgtgacatgcactataataattttttcttcaaggggatcatgcatgcactgacattaaaatatatagagaaacttacaacatcaattattatttttggtttatttagaaatatatatatatatttacgttcatataaaaaattagggataattgcggcaaaagtcctcaaaaacttaagattgatgcagattagtccccaacctcaaaaattggcggtaatagttcccaaatcacattttttgtgagtccgctggtccctctttttaactgctccattaaacccaaataaaatgccacgtgtcaaatttttattggtaatcaaataataaaattaattaaaaaaattaaaaaataaaaaaaaaaaaaaattattttaaattcataaaataactgtttctttttctttttcctcttcgtcttcttcacacacccgagccatgaccctcaccccaccccatccccagccaagtcgaccctcaccaccgccattcccagccacggtcgtcgacgttaaagacaaccagaaaacaaaacaccaacattgtttgaccacaaaaaaaaaaaagaaaaatccaacatatatataaataaatatgtatacatatacacagataagaataaatgagagagggaaccaattagatctaattggaccaccaccaggttctccattacacttaaaaaaagacaaataaataattagaaaaagagatatacttgaaaatggagctccatcgtagtcatccattcctagatctcagccccgtcgaacacgaacggtcaagaaccactagtcgtcggaggagggtagggcgccgacgtttgaaagaacggagtagggaaagagagaggggaacattgcgcgactatggaggcatttcaagttgagatctgaaactccttccaagtcacccattgcctagtgctccagtctgccgtcttcctcatatttgttcgtcccattctgttcgacccatgagtgttgagagaggtgttaaaaagtatgaaaaaggaaattagggagagagattggaatatgaagatgggtgggtggctcgatggtgggtgactgggaatagtgtacgaagaagacgaagaagaaaaagaatagaacaaaaaagaaaaaaagttattttatgattttaaaataatttatttagttttttatattattttaaattttttaattaaaattattatttgagctaataaaaaattgacacgtggcatttcatttgagtttaacggagcagttaaaaagagggaccaacggactcacagaaaatatgatttgaggactattaccgccaatttttgaagttggggactcatctgcatcaaccctaactttttgggaacttttgccgcaattatcccaaaaaattatttgcggtaaaacttgttgatcgtcattgttatactcatgactcaaataaaaaaaaaaagtaataacggtgatagtaccttctattataattaatttgttagtacaatgtaaaataatttaagatatattacaatttgattgtaaaaataaaataaatacgagattgattaatataatgttacaatagcatttatacattataatacaatggtagaagaagaagaacattcattcacaaccttaagtgtagattaatgaggatcaccatgatgacttgaataaggtataaatacttttgtccaaaaacttattttctcctatctgttatcactgagggaattctcatggaaacaactttgagaattatcgagcctcgtgttttctagcaagtgcttgttgatagaaaattttattatctctatatgagcaccttagacctctttatatagtgtttagaatatcactatttaaaattttaactcacaacttcccatggatattatggagtcaatattaagtgtaaatatgagtaaaagagatgtaattcatgcacacaccataactcctatagcatgaagaattttaaattaagaggtgtaacacatttttacacacttaatataggtgataattgtggaggttacacatagtaacaagtaacttcacggagtaagtatctgtcaacctgggcgttgtgctcatctttaaggccctcaggtttgtggttttctctctgagtttgcttgaatctttattatttcttataacaaaaaaaattcccatgacaatttttttaaaaaaacttattagaactggccatgttaacaatatgtcaacctggatgctgggtcccaaattggcccattggaatagttccgtttggtccccaaaaatagttgaatcttaatctttactaaaacgtagaatatgtccagaagatttctcgaaaaacatccttggaattggcttaggttgacaaagagtaaacctcggcactgggccttgcttttggcacctagaaagtgctattttttttcctcaaaagtactttcttcctcattttttatgaagatgaagaagatgcaaaaatttgatcaccgatctaatacttggaagttttccaaattgacaaattgtaaatttgggcgttgggtgtccaagcaccgggtgctctgggtgctcaaaaatgaactttcttcgaatttgattctaatgcctcaaatatatctgtggtatgtgtagttaatgtctaaatgtaaaatttgacccatttgtactaagacggtctcaaaaactgaaaccctagttagggatgtgaacttgggcgttaggtgaaaccctaggtgcccaagttgactttcatggtgcaagttcatgtaatttcagctcctagggcctatatttgattgttccatgtcttcatggtacaaaataataaaagatagtgagttgaaaatgagttatcgaaacccgaacttctattctagagttcctgaagtcaatatgggcgcaagactagggacccttcccatgtcgactgctatgactcgggactactcaactccgaaatatcatctttcttgctacgcatcaaacattgatgtccatatcagtagagaaagttttcgagttaacaataacataatttgtgttttttatttattaatatatgaggtggattaataatatgctgacacatttcatcactagttagactattcagcacttaacatattagaaagtttcctaactaaaaatcaatttatgagattaaatattacacaaaaaaatataactctatctaaaataattaactaataaaaagtccaacaaaagaggacgaatataaatccattttaacaacagctgttcaaatcttagagtaaataataataatattaacaacatttattattattaattttttttttaatttgcattgttaaattatgtcacacaacttgaacataaaatattccaattaaaaaaaaaaatttagttaggcaaaaaataaaaaataaaaaacaatttaaaataaacctgacaagactgggtttacgaccctactttgtatgctttgctgacgtgtcacactctgaatggtcaataaaaaataacagtcgtaacccctttacttttaatttttttactttactactttta

SEQ ID NO: 185992 - DNA, 2988 bp, Cannabis indica
gagagagagagagagagagagagagagattcataaaaacaacttgtgaatattcacagttttgtaaatgagtgcagagttcctgctatgtgcaccaatacttgggcttattagttgatggagataaaagagaatcgatatgtacattaacaaagtggatataaaataataatttaaaggaagaaaaaaaaaagtagaaaaaaagagaacaagaagaaacccattaaatttgtacacaatgtacctcactttggcacataaaagaactactatatctatgtggagtgtcggtttggtgaagttgaaggtgaaggagccgctgaagacttgcatatcgggcaccagttcttaagacccagccactgttgtatgcaaacagcatgaaatctgtgctcacactgcaaccttccaagttcatctccacccacatattcttcctgtaaaaaaatcaacaggcattgtaagtgacacaacagaaaaaggattcacaaccaagctcgaaagtgatctaatctacttggaaggttgtagttaggtcaaaattatcaagaaacagactttgggttagaatggtttactttacagtataatttataataggaattctgtaaatttccccatcctagtaacttttttaaaaaaaaaaactcaaagtaaatgatgtaaaatagcccatataatgtctgctctaatttaatggtattcaaacctaaacctaatcccattctaccctattcaattaggccaataggcataaccactgaaccacggctgctagttttaattacaactttctaactaccaaacaaattaataaaagttatcagagttgttgaaagaagacctggcagacactgcatttgacatcatcattgctaccaatggccacaccttctaaaggcatagactgataaatacttctcttaaggcaatcagacagtgcttcttctggaagtgctgtactcacattacccattctctcttcaagggctaataattcctgtcatggtaatagtaacataagaatgataaactgctagcctaatatgttgagacaagaaagaatgcttaaaagaaagaaataaatctcttcttttctttaattccctctattgttttttatttaaaaagaaaaatccttgggcagcatcatgttgaaaaaaaggttttatatgcaaaacagagtaaataccccaaagacgttattaaagaaaagataatcaagataatagaaaagaaaacaattgtaacctataatactattatagcaataacaaacctcatatgacatgttatcgatatccagtctcatgtctctatgttgatcatagaaactaaggccattaaggaacaaattggtctccagagcaagcaattgctgcaatgatttaagcaaaatagagttattaacaggtcgtcgtcagtcatcgaaaatatatatgtatttgtaaatataaatcaactacctcaaatgttagttcttcatcatgttcaattctctcaagagccaataatacctgcagaaatgattaaacaaattgctgtaagaaaacatcagagaagacacacaattaaataaagtaattcagaggatatgttcacaacactttgcaacttcatattatgtatggaagctctttgacaacagaactttacaacagcaaaaaaaaaatgcagagaagctacctctgcaattccatccatgttgtatcgacgcctattatctcgattcgctaaagatcgactaaaaccaacttctgctggaccagatggtaaaatattgtgcatatcctcactgctactacctgatcgaccatacgaatttgggtgaccgaagggagcttcggtggataatagctgtgatgaactaggactcatgtccatagatatctcacggtgggaccgccgtggaataaccacaggagaaccattgtgtgataaattgtttccacttccttcatttggaagccttgtttgactgttgactgacctccgagtcctaactgatgcaggactattatccctattaagaggcatatttctacctcttcttgaatcagaaatggaaatgccattagaactggaagtttgtccagataatgacccattgatcttcttccctttggcactggaactactttctgcttcagaatttctcttttttacagcttcccttctttactgaagctcgcatgcgatgatgagcaacttgatgggacaacatcagatatcgaattgcattttagacttttcaaaccatacctggttgcaccggcatgaggctgcatgcttgtgtttttcgatctggaagacgcagagggacttcctgaagcagcctggttgctcattccagaactctggttaaatttcctacgagatagtgcatttgatgctacactagagcctcctacttccatcattgagatctcactagacttcactagtcccctttgaatctttccagatggagtgatcgggtctgaaccttctggctcatcctggatactgctagtctctgacgaatctgtttccatatgaggagaaagctttttacaagcctctgagatggatttttttgaattgctgacagaagcatttgtcctagaagaacttccaattatctccttcccactagaagatgcacgcgcaaaaggcttccaaggtttggcttttccagtttgggtagcctttgtggagtttggtcttccattgcatccaattctgttgcagaattgggcattgttatctctgttgttaggagattctcttaaaacagacccctttctagagataacaaggtcatcaggagttcgttttccaggatactcgtccatgtatgagcttgtatagtagttaaatctgtaagaggtaataaaagtatgttatgattggttaatataatttccaggttctgcttccgacataattgccaaaaaataaaatggtcagaatcataaagctaagttgatttctctgcaagtcaattcca

SEQ ID NO: 185993 - DNA, 823 bp, Cannabis indica
cataaataatatatatatataaagagtatatttaaaaattctccaaatgagaagggtggtcctctatacattagtggccctttgcgtggcacaagtttcaccaaaggcgaaaaggatttcgtggacagtaaagtaaatatctacttcaaatacagaactctgatcttattataaggtcaaaggaatgtgttcagtctgtccgtaaatacgaaaaggagaaaaagaattgtctgacgttatggaattttaaatacttgtgctgacgaggacagttgccaaaatctgcaactataaatttgtcatatcatgtttcttctataatattttttaatcttattggaacttgaggataacccaaagcttttcgtattatcgttggtcgtaaaacatgattacacttgtaactgacaaaatatgaagtataaacaattcttaatgaatcagcataaacacccatccacccacttttttttttcctttcttcttcaaaattaaaatcggtggcaatcaagtgcccattaaaaagattaaggtcaacgatagaaaattagcaatagagtaatcaaaaatgccaataaacaactatccccaaatgattcaacccaattatgtagaaaattttggtgtaaacccaaaaataccaccccatatagctttcattttatgtgcacatcttttctcaatttagattttagttgggtttcttgccgttaagtttattcaaatttcttagctcgaatttttttcaatcccaaaacttttcaagcacgcaaggaatgaaatacttggcttagccacgtgcctgatctctctctctctctct

SEQ ID NO: 185994 - DNA, 2376 bp, Cannabis indica
gcgtatggaattcaccttggaactgaaatgtgcaagaagattttaggcagtggcataaaacattgcacctttacactcttaacatggagaaatcagcattggccatactaacggttaattaattttctcatttcttataaccatcaatatcatagaatccagattgtttattaatactcttagaatcctaacctggcagaatcttgggttgattgaagaacgtaaaatatccagaccccttccttggagacgtcctgctaatgttttccgagtcaaagaagatgtccgtcccatattctggtatgcaattctatcaaactttccattttggccataagaggtcagtcgtcagatattgaaacgtgtttttctttgtctccaataatttcagggcaaaccgcccaaagagctacatatcaaggactactggctgggaccagtacccacaaggacgatggggagattctcgcaatcctgcatatggggctttaactgattatcaggtaactctttcttatcttagtactacaaatattaattgcttgtttcattcagatttcagatagatatattgattttctctttagaattgttttctgtaagcagtatcacaacaagtatgttcctaacttcaatcttaacataaaacgtaaagtattataaataaatgataaatataatataatataaacatacatattttcacttgactatagtatatatacaattcttttattagactgattacattttgaagttatttttatttataactaattcaagttgggactaatttcttttagtattcttattaagattttactgatatttgatttgtatatatagtttaatttatcttgtaattttttacggcttcaacattggatctagatcctcgaccttattttaagaatacatttaaatttcaaatgtattcattttgatattacatatatattcacatacaatatattgtacctcgattattatgtttttgaactctcacgctacattaaattctaatttatcgggttatactgcccactatcagggtagggaaaatgaatatcctggtaaaattcccatctctaggcaagactctcaaaggctataatacctacttgtcctttgttttttgaatcatggttcatatttctgtcttgtataagtatctgttacccatatatactcacggtagagcatttcccttttatgtgtgtaaatatatcctttccccaacagtttatgcgaccacgttcacgtgacaaaaaacttgtggaagaatggagcattcctttgaagagcgttgaagatattcatgaggtgcgttttaccatagcagaatgaattgttgctattcttatttgctgtgtttatttgtttaataaatgttgtgttgttttaattatcagcaatttaagaaattatgccttggaaagttgaaaagcagtccttggtctgaattagatggacttcagcctgagacaaagatcataaatgaacaactagtgaaaataaacggaaaaggtttcctgactgtgaatagccaaccagcagtaaatggggaaagatctgattccccagtagttggtaagcaattaatattatcttcataattcaaatgaatggtttgatctcatactttctgagatgttgtttctgtagtactactagtattaattctagtgatctaattaatacttactcccatggcaattggcatggctaacatgagtttgtttgatattaaggatggggtgggccaggaggatatgtttatcaaaaggcgtatttagagttcttttgcactaaggatttgttggacgcccttgttgaaaaatgcagcaggggtttctcatctttcacctacatggctgtgaacaaacaagggcattggttggcaaatgttgatcaaacttttgtcaatgccgtaacatggggagtgttcccaggaaaggagatcatccagccaactgttgtggatcctgctagctttacggtatggaaagatgaggcatttgaaatctggtcaagaggatgggctcgcttgtaccctgaggttgacccttctaggaaagtacttgaagaggttggtttttttcttttcttttcttttcttttctttcctggtatgtgatattactgttctgttctttgatttattaagcttgtgtgtatctcactttttcaggtggagaacagctatttcttggtcagcttggtcgataatgattacatccatggtgatctttttgcagtttttaatgagttctgagttgtgttgtcctttctattagctattattgaaaatgaaaattatgctttgctctttagttggtttgtaattgttattgtcctttgtgaattgtgtaataa

SEQ ID NO: 185995 - DNA, 7749 bp, Cannabis indica
ataataataatatgtataaggtgacgtggccacgtggagtgggacccattctaggtgtttgccactcattttgaaggggtctctcctatccagctgtaaacttacacgcgtgttgcccactcaactcgacgattatgtgggccccacccttttgctaacttcaccacctcaacaatcaccactttacttattttcatttaatttgataatttcaatttcattatcttttattaagttaagtgagctcattatcttatcaattcattttatttgtcggaaatttttatttaataagagtagtgacaaaaacatatttttgagattttttgcaaaagtgtaatgttttgaaaatattgagtatatttatttaaaaaaaaaatatgagtatattaaaaaaacaatgaataattttattgaaattaatgaacaattttacagaatataaatagtcatctatattaagtattttagtgcctattaattatgacaatccaaaatgtacataactatatcatatatatatgagtagcaaatcctttataacatatcgacacttgaaaatttataagaaaaacctagtaaaataaccttctgatctctacattatacatttatcagcaccagaaacaatactatcacaaaatgataatttattatatatatagctaaatgtgtaaagatttcatagagttgttgttgtaacaatgagaacattgtagaaaaataataaaagaaactgtaatcgcattttcttctctctatacaatataacactttcttttgcttttcttctttttcctgggacacatacaatggaaaaaaaaaaaaagactcacaaaaactaacacacctatgaacaaaacaggaactaaccagtggaagaaccaacatgatgatccatcatcatcatataccttagaaactcaggcaattttcttttctctctctttaatcaaataataagtacacaaatatatatatatatgtatatatttgtgaaagaaagaacaaaatagcaacttcccgcaaaccccaacaaaatatatataaatgagtgtgtgtaaattgtaaaatatatatatatatctatatcatatgtatgcttgtatttatatatgtattcactttgtaattcttctctttccttgggcatgaactgcctgctttgcaggcctgtaagaaggttgaaccagttgactagccccaatggatgactttcgtgatagtgcaggtgaaggaattagggatggaatcatactcctggttaggaacaaacacaaaatcattgcttttaaaattagaacattcatattgttaaaacaaaacttagaccattcatcatgtagaagcaacgccgtgtaaaaactattttgaaccttgtgtttaacaaaattatagattggatttcggttttgttaagtaacaattaggattcgtatgtttcaaaatagaatataatagtaccatgagctcaaaatagaacataataatactctaagttagagatgttatgataaagtaaaattggactcaggatattattatatactattttgaaaaatatagaatctaaattgtcatttaataaaataaaatgtctgaccggtaacttttgtgaagtacagaattaaaatggtattatccatatttttaatagtgaaaaagttttgaatagagcttaagtggtaacaacgatgccatactagtgtttttatcagcttttatgggaatgcattagaaaatttacctggtttctgtgcttcttactggcttgggattgattttccttgtttccggtcctccggggccattgggaatgccggtggccttaggaggaggatttaattgccaaagcatgtctggctctgaagaatcactagttgcagcctctaactgatcatcagaatcatcagtgatggccatctcatatcgattactcctctgtgaatcataatcttggctctcctttttgtttccattaatcttattattcaattgttgttctggatatatctttgaagggtctgggaggtagttctgaccaaacatctctgtcaactgtgaactgtctacatcccaacattccacaagattttcctctctatttatgatgtcttgcttgttcaccataatcttatcaacccaatcactgttaactgattccttatcatcttcttttccatttgcatcaggagtactctcaacagatggccaagaagatgaatgcatcaacacatcttgaagatccaaacttcgccttttcaatttcgatgcagaattctgaagatacatgaagaacatatatgagcaaattttttgataaactatgcaatgtgggaaagatgaaagtccagtccagattagcttggcttaaaatttgattaccaataactgtatttggttttggtacatacctcaacgttaccaacatcctctattggttgcctacgccccccggaaaactctttgagacttttccaacttgggtgtgaaggggatgaccctgcagatttcaatcttgatctatctgggctggaagaacgagaatgtggaccgcgctctccctccttcctcactagagctgctttaagattagcaatctgtaaccaaaagagaaaacaaaaaattgaaataagcatgtacatgacacatggtgataagaaaatatcatcagaaaagactataaaatgccttgtttaacctggtctttaagctctttcacgtctgaactatctttgttagctttagcagcaccaagttcaacagttgaaactcgttcagcaaatttcagggtactaattgtttccccaacagcttcggcctcggggctaatgtgaacaaacatgagtgtctttgcctgtcctcctaaaaaatttgaaggatgatcacaacatggggttgtagaggagattaaattgggaaataagaattcaaaaaatcaaaggtaatctggagaatatagttcttaccaagtgagtcttggagcagttgtgtgagtttactgtttctataaggaacatgggaattcttttgagcaagagaagagatcacatctcctaaggcagaaagagatttgttgatatgttgggcctcctttaaactatatccagtcacctccgatttgtcaactctttcacttcctgcaaggtcaaccaaatgcatgcaaccacgtagaacagtaccagatgtgaggtcccttccttgaacatgaacagtcaagcagctgcaaagaaaataacattactatttttggtatagtcacaaataaatgtgatgagagttgccgaaagacaatcacccaattatacctatgagatctgctactacgatcattcatggctgtagcactcactgccctattcttgtgtccaagattcatcaaatacaagacatcagatgttgttgatacaggtacaaggtttgcatctggtacattaattccattttgtgaactgttccgaatttctaatgtatattggagttaaagaaagatcacatatggatgtatgtatgaatatcaatgaatcatatgtgagaatacataaaacagtatgttgtgcatataaaggatatcttttgttaacaccatctgtaataagaagatcccgaacttgttcgttgtagatttcaagcatctgaacagaaatttcatagaaaaaagtgtctttcctctgttctgagagaagaaataggtcatttagtgccctgtagtttacaccttgggtttcctgtgtgagctctttcggtccagtctagattggaaaaagagacacagtccataaatttagagtaacataaagtgaaccaagcaattaacattgtatggatgcagtagtggcatgtctaatttcctccttaccatagtaaaagtttttccagatccagtttggccataagcaaatatgcatacattgtaaccatcaagaacagaacgtataagaggtctagtgtctgcaaataccgcctctgaagggaaaaagaagcagaaattgaataggttatgaccaatatgagaataatgattggaactatataaagactaatcaaccaaacaacctaccttggcttgcacaaggaccaaaaaccttgttaaaagtgaatgatttacgtccctccttgcaatactttgcaggagtaagaactgtgatattgccatcatcaatgtgatcgattgtactcagacgacttgattctccaggcaagaagggtctgactcggcagtacactcttatatttcctgagcaagcacaaaattaagaaatgttgaatctttctgtaaaagtggatgaatgccagtaaagaaaagaacaagaaaaaaagccactgattttacctctcaaatcttgcacttgattgtatagcttgcgattctcttcgaggactctctgataacctgaagcagcataagcaagactacgcaggtgcttacctatcaaaacagaaaaacagctctgagatggacaattccactttacttagctcatacaaactcaaagataatttttttactgtaattagcacctaagttttcgaactcctctttgtgcttcatttgtagaaattgcattccagcttttgtatggtgaagagtatgtttcaaatcctacaacaaatttacaccaatggcaatttaaaatttatggtcaaatagagaactttcatagcagtaatactataatatcagcatattacctgaatatctctctgttgtttctccagtagcatatgctgctttaaaaactggttatcaggagcttcttcgtggttatacatttgagtacaagcttcctctttggtagggctggcatctttttcttccatcttcattcacaagaaaaagaaaatgttaaacctcttatgcagacagaaagcagtttgtaatcataattgatttgcatgacaaatatatacatgtatagttatatgttgggacaaattacacaaaactctttgtaatgaacctattcttatacctctatatcatctgaagcagggtctgcgcaagagttttcggtgccagataaagccatgtctttctgaattgattttgtctggtacatggcataaaaagatgaaagtgttcagaccttaaccttcaagacaagtgagcctcaaaggtcacaacaaggaacaaaagttttagtgtgagaaagcaacttacaagttcactttgagttgctaaccgacgctcaaattcctccacgactttaccaagcatagattctataatctattacaagcaaaataatagttatttctccaacaaaaaacctcagaccaaaatgaacaagtccagagctttagtgatagaagacttaaaattgacattctgggtaaactttatagttgcatttatagtatagggtaagtctcttggtggtagcaaaaaaacattctcaagaaacttctatgatgactcttaaacttgtgaaaaaacaatcaacataaaaggtgcaagaattcttactattggaatctcttcctgcctcttatctgaaagaacttcacggactaacgcattcaaggaacgggagataccctgacaatcataatgcaaaaaattatgatcttgtcaatgataaattctgcattaaagttttgaaaccacaaagttttaactaactgtttcactgatgtcatgaccaatatctccattagaagattgattactggaaatactatctacagacttctctccccatgacaaggttctcaaacaagaattcccaaatggttctgaattcttcctcataaagggttttccaaaggcaggcggtttagtatttccaccaaatttccatgaaccaatcgaacctccttgtttccactcactatatgattttaatgctagaacacagtttacaactcttgctgacattcctccctgtaaataaatttcaggatatgagaaaaatgtaataggacacaacaaagagtacatgaaaacatgttcataattagcaaaagcaatggatatcaacctgctcaagatcagaggcttcaaaagttggaagccccatttcctccacagctacaaggaagtttctaacattttcaaaatactgaaaggcagaaagtgctgccccatcaggaatgattactgaatcagaagggccttctacaacctaaagcacaaacaggaaacttacaattaccagaaaagtattgatttaaagtcacataaacagaatggaacaaagtcagacacagaaagaataccttggttacagctccaggattgaccttgttaataacattgcagagaacaattccacttcttaaaccaagtctgaattcttcttcagaaggctcagctggcaaatctttacccccaacaaccccaattgttcttctcaaccatccagctgcttcataccttctcaatgctgtaaaaaataaaaatgatgacaccatattatgttaccattctctgattctctatatgatcaatacccaatccaataaaccaataaaaaaaagtctcaaaatatagatttcatctaaaccacatttctttatggatcaaagtttcgatcatatagagaacatctcatctcacatttcattaagaaaatctaaataataaaacgattattaaaaaggaaaaaaagacgtacaagcttcttcagccttcctggaagcgaagtcaatgggggttgtacgagaaccatgctgatgaagaacatcttcaactatggaagctacagagaagggcaatacttgctctgttgccatttttacaatcaatcaccccacaaaaaaacccaaacccactctgtcaagtttttcaaattaatccaaaaaacaaaaactcaagcacaaaaaaataaaatgaatgaatgaatcaaagtaaaaagttttgatgcaaattctgtttgtttggtttgaaagaataaaaaaaaaagtgttggaatcgtaacagaggaaaatgaaggagattgaagataaagattctagggttttaaatacaggaggagattggaaatgggaaacagaaaaaatttgatcttgtttgaaaatgttgtttgtaaatatgaagaaagattttgaagaagaagaaaatggccgaagctggttccgaccctcccccgagtcttttgggctttttaacggtttatatttcgcgggtgccatcaaatttaattaattaataaaaataataataataactattaaagaaacaattgctgttttgttgattttcttagctgaaaaacaaaataagaataataaaaaaaatcttattttttaatagggttaatattattaggtaagtttagggtaggtattattagtgtttactgtttagcagtcttcttcggtgtgatattattattggtgtaattaaatacataacttaaaaaaatagcttttacgcaatatcgctaaccaatcatggggtgtcacctatgaaaggtgttgggtaccactagatgctcctctttaaatgagtgtttcggtaaatttttaatttgttttggcatacgaaagagcgtttttttttcatgatcgcgtacgttttaattatttaagactatctgtaaattttttaaaaaattttgagtagtttacaatgtcgaaaataagatctacatattttgttgcacgtacgactattttttttatacgcgtggtaagttactgtttaaaccaaaattttggcacggtaaactatttggaattttcgaaaaatttacaagtggtcataaacaattacaacatatgtgaatgtgaacatgaaaaaaaaaa

SEQ ID NO: 185996 - DNA, 544 bp, Cannabis indica
ctcatcctctggaaagtccttctggtactgtatcatgttcttcacataatccaactttgtcaacattgacagtgtttccagaatgaaactgagattgtttacagtgagcaatagctccctgaatcgagttctcaatctcagaatgcttaacactcccacatctcttcaactgttttaattcttgattattacaaatgttagaagaagaaaaagaagatgaaccagaggaagatgatgatgtagatgatgctgatgatgatgaagaagaagaagatgaactggacttgtatgttgaatatcttaaaaaagccaaagagaatgatcttctatggcgaccaccaccatctacttgatcagtgttactaatctttgccttcttttctttctcagtttgcccaaatgagacgactgatctcttctctgctatgtctttcgaagctgtggatgattcgttggaacaacctgatttcccaaaccaagatttgaggtaagccttggaagctttaagcttcgacccaagtgaggaggaagaagaagaagatga

SEQ ID NO: 185997 - DNA, 11777 bp, Cannabis indica
ttgtggtttatattaatttattgtgaatctgtatttttgtattttttttttgttttatgttttcgtgaaataatctaaaaaaaaaattgtatttaaaaaaaaaaaaaaaacaaaatccgaatattaacagatatctcaacggaagaagttgcttctgcaacgaccctaagctccaactctcctccaatggcgacagtgaaccacctctcttcaattcacacttcgaccacgccttctcttcgcctagtttctcctcattcttcaagaaataaccctaacctctcattctatacacgacccaaacccttctgcctcaccttcccatccatttctctgaaccctgccaccaaacccagaccccgggcttcgctcatcgccttggctctcaagactctttccgacacggagatagtcgccgtcccggaggattccgatcaagttaccgggaaattcccctccgataccggcgtttatgccgtttatgacggtaacggcgaccttcaattcgtcggtctatcgaggaatatagcggcgagtgttcttgctcatcggaaatctgtcccggagctctgccactctgtcaaggtacggaaccctttggtgttgaaaaaaattcattatgattgtactctttggaagctattttggaatttcattgcttggatttgaagcactttgctttggagaattcaactatttgctaagcaagacaaaaacaaaatttcgagtcttatacggcaagaaagtagttatagaaattgatcaaaattgtagcaaaaggtcaatcatgaaatcatgttgttacttgcattatagtttaaattgattgattgattgattctgtgattagcttaactttaatcataattatcttcttaattagtgagtgttgaacagtctagtaagtattactttgtttatataagtttatgtgttcatgtgttcatgtttccttaaaggcttgttctttttttttattccttcaaattcaggaacccccaccacccaaaataataagagtcatgtcgtgtttgcatccatgagggaacaattttgtagtggttaactatttagcattgtctgtctttaaagattgaaaggtttagaggtgaagcatgataaaaacaatagaaaattgttaaccaaattggtgagtgataaacaatgggggtgttcagtaaaggatgctccatgttctgtggaactcttttgtttcctaggattgatctcgacgcagtattatttcctaggtagatcccaagaatgggccgaatttcgaatctcatggaagcaaactatagactcgattaatcgagctatcacaataccttatgagttcagtgggatcatattctatgcattctgtatagtaccaaccatataactaaatatttgtaaggtagatgtgttttcttatcttttcttctgttaagagcacatggaattaggttagaccaataagaatgatgttgggtgattgaatgttttggttaaaacttaaaaagagagtataatatttgcatttcaaaataagaaagagtagcagttaagttatccatttgttaaattagtccagctgaataatcccagtcctcttacacacaacacacatacaatcctcaagtggcgtgatgatagaaataatgagtcaaaactcagttaataatggtcctgttcgactttgttatataggttggcgttgtggatgaaccagatagggaatctctaacccaagcttggaaatcatggatggaggagcacatcaaaaccactggaaaggtacctccaggcaatgaatccggtaatgccacttgggctcgtcaagccccaaagaagaaggctgatctacggcttacaccaggtcgccatgttcaattgacagtcccgctagaggacctcatcgatcggttggtaaaggagaacaaagtggtggcttttattaaaggttcaagaagtgcaccactttgtggattctcacagagagttgttggcatccttgaaaatcaaggtgtggattacgagagcgtcgatgtacttgacgatgaacataatcccggattaagggagacactaaaaagttacagtaactggcctacattccctcagatctttgttaatggagaattgattgggggttgtgatattctgagctcaatgtatgaaaagggtgacctatctgatttgttcaagaagtaggaccaagtttttgagctgtttaggtagtaattaatgctcattaatatgacttaatgagctcgaaaaaaaaaaagaaacattgagtcttaggcttgttatttaatttgtgagctttatttaaatgaattgagaaaataaatgggtttgttagagaaatgactctcgaattttcatttatatatgaaatagggtaaatagtggcataagtacttaaagttttaagtttgtaagcgtcataaactcaatgtttatttttagcggcataagaatttaatatttgtaaaattctcctccaattttttcagtacagattctgttttgaatttattaaaagaatatatgaaaataattgatactacatgtctctgtctagatctaatgatctagaatctagaccttatatgtagtttgtttaagaaaataacagaatttgtactgaagaaattagagaaaaattacagttttacaaacatttgatacttataccgctaaaaataaacattgaattcatacctcttacaaatttaaaattttagatacttatgctgctatttactctatcaaatatatatatatataaatcgctaaattatcgttattagtttgtcacaacaatataacgttcccgctttaagcttccattgggctcttacacccacagattgaatggttcttatacacgagtacgtcactctgactgcttcatgaaatgatgattgaccctgcagaccaacacgagagtttctagcgtgctttgtcctcacttgcacgcttattggaaaaacttctcaggaggtcaccaatcttgaaattaccttaggccaagcacgcttaactgtggaataaccgtggagttttttcgtgacgcgctactaaaaaataagatgcacattgttgatataggtagtatcaatcaatctatttaaactctcttcaaccgtgcagtcctatacttaaacagtttcaaaatcatcccacttgatattttctaggcgctgtgagattgcatagcttattcagtatttctccttacgaatcacgagactatttactgtcacaaataatttttaattaattaatttattatgtaagaaatgagtcaattagaaataagctttatttaacataaataaatgtcaacatattattgaaggtaaaacctctatttataaaagtcaaacttcttgttgggaggagcaaactgatggggcctaattgtaataatatgtttgtaatttaactaacgataaggtcggttgtacaaaccctatataataacgtgtttgtacataaagacaaaaatgccatgacattaggtcggggtaaataatacttatattgcataataattccaaataattaggggcaataacgtcagataaataataaacgaggggcattttagcaaaatctagaaaattggattatctgtaacttaggccatttttttctatgtttggtcaatttgatcaacgcagtaatcaacttcttttcgccattgaaaccttgaagaaccttctcttctcttctcttcgattctctttccttctttcgctcgtatgttgttgtgaagtgtgatttcgatcatggaggaggtcgttgaaatggaaagtgaatcgaatgatggaggaggaggtgctaggtcgttcaagctccacgacaagttggaattgcaggagtttcaccacaaatttgttatcaaatccctacaatctcctactcgaggcttctccattagtcgccttgacgggaatattgagccacttgatggtaaagcttttttcctctttggtattactcagaaaaggtttctggaactgattatttcttattcgaaaactcttggtgtaagaaacattggtaccagaaagaaacccctgaaagggttttgttttcaaattttatataattgcaataaattatcacaaaataatatattaatttcactaaatgcattgtatataacagctgattcttgttctttaaggccatcaaaaatttctaccatatatggggttgttgggacaattagattgttggcaggtatgtgattactcacattatgctcttactattatttgtattgttcaatttccttttttagtttcattggttgttggattgagtattgcatagagaaaataagaactctctttcttttaccttttttgtttcacttaatatattttccatatactcattttgaagccttgctatgtacaaatttaaatggcataagcaggaataacagaatattgcgtttgtatgttattgttagatgttagaattcagaacttttgtggctaattctttgtatttcggtgtaggaacgtatattatcgtgatcacttctcagaaggaagttggtcattttcttggctttccagtatttagggtaatgtctatgaagtttttgtcctgtaatgaggcgttgaagcaatctaattctcaagaagtaagttttcttattttggtgtctctagaatttaatgtgaggctcttgggtattggctaaaaccttcttgtaatgtatttgacagaaaaaagatgaggcatacttcttgagtctcttgaaaacagtagaatcaactccagggctttactattcttacgaaacagatgtaacgttgaagtattcttttgcctaattattttacaaaatgttgtttaagtaactgattgatttcccctgttattggaatgcttcttcgaaatttatcactgtttactcttgacctttctattgatttgatgtactttgtgatcattgtcagcctgcagagaagatggaaattagctgaaggttgggcggccaaacccatttggaagcaggtcagttagtatatttttggatttcttttggaaataaatttttctagatgataaattggaaatgctttgagattttacattagaagcaaagttaaggcctattacactaaaccttgtgtgcaacttgcttggtctcatctgttctagaagtaaatgaacaaatgaggttgcattagagatttgatatgttaattttaatgctattcgaccatcctgtcattgtcatcctctcctgcacatgttctatatgttttttggcatgttgcttagtgaaatcctgagctatcagttttccttctgtatttcaggctgatcctcgatttgtctggaacaagaatcttttggatgaacttattgagcacaaggttagatatttcttcaattatatttggatgttacttttactctcatcacaccatttctttatccactaattctgaaatttaatttttcggtggcagcttgatgaattcatcattcctataatacaaggaaatatccttttatgcttaaaatcactgtattaaatgttgcaatctgtacttctgtgtcgtttgtggatgtatgatattcaagaaaaggacatattcagtttgagaactgcatgttattttccgttaacctagtcttaagcttccagacagcacagctaaaacttaaagagtcgcctgtaacactcacacttatttctaggcggtgtaccaggcgtttaggtaaaattctttgtcagttatttgtgcttattataaagtaagtttcagaaggtcttactgtggtataatatggtaattagggacaagaatgtggagaagaggagccaaccttgaaggagatgtagctaattttattgaaactgagcaattggtggaaactaatgggctgagttcttcatttatgcaggtatgtctagtgaatctgatgaactatcagataaatgctttcacacattgtgtaagcagtagtgcaattagttacttaagcattatttttctgagtatttatattatatatagatattttgagttaaacacaagtatgcatgtattccaagtgtatctgatgtaacattagaaaaataattatgtgcactgtcttgacattatgagttacgtttctgttattttcatgggtgattgttctttttctattttttggactaataatattgcatggtatttgtctacatgtccactatatctctcattatggagttagattcaatgcttaaaaggcagtggtaatgattcaatacccagtccatatggatgtaaaagtttgttcaatactttttttttgcagattcgaggttcaataccccttctttgggaacaaattgttgatttgagctataaaccacaactgaaaattatcaatcatgaacagacggtaaattttaactgaagtttttggtcatattattattattattattctttgtgttgttttagtgattctattattgttgttattgccattgctattattttaatcactagtgttatctaatagtgcgatgagttcctttccatcgattgaattgtactttctatttgaccttttattcctggatttcctctccttcccagtcagaagttgtggagcgccattttcatgatctgacccaaagatatggagatacaatagcactagatctatgtgacaaagtacgttctctttttcttttaatttgcatgttagacccatcttgtactattatgcttcttttttttttttgaacaatcgtactattatgttctgatcatatactgtttctctgaattggaggtcttggaaatatggcctcttttttcaagtcattttgcactctggcctagtttttttccttcctatatatacctatatatattcttcaaatgggagcatgtagccaggagaaattgactgaaatctattttttcttacttctattttaaccattcaaataccattttggctctgagatttgttaaaactcttaatagttgcatgtgccttaaagcaagtctaacgcttgattatgtaataattataactatcatcaagttttaacttacgagtaagtaacattttcaattatagaaaggacccgaaggacagctaagcgctgcatatgcttccgaaatggaaaagctggcagatgtgaggtgataattcattactgttttacagttatacatacatcataccaatcctaagtttgtttccattttttatatttccatcccatagtgtctgttattttgttacgtcagtagaatttattgctttgttgttgtcttttaccacatttacttagttgtcttattctattattctaaactaaataggccactgcattttaattgtgatttacagaagtattgattattaatttaatgcaatactggtcttactgaactttcttgttattttattcatttccccatgttttcttctttaatcctctattcttctatctggtattgcatattctatgaaccaatttaatagaaaaatcaaaggtttacattgttcttatatgactattgtaaaattgaatacctactgagattatcatgtacctaagtataggtgattaaatttcaattgtgctactacataatattgagcagttgatatttgaattctcatgagtggctattcgatattttaccgtaaatattactgctttttattaaaacattgacgcagtacagttccagctattgctattactttgtcttcgacatgatagaaagagtgggtttattgcagatatatctcgtttgactttcacaatgtatgtggaaactcaaactttgataatctacaagttctgtttgatcaaatttcagaggaattcgaaaagcaagggtaataaaaaaaccgttgaatcttttgtataaatttgtacgggataagtatgccaaagtttaggtatacaatcatttgtagtactacttttaatcattactattctagttgagcagatacttcctcatggacgcagaaggaaaaatactagtggagcagaaagggattattagatctaattgcattgattgccttgatcgaacaaatgttactcaggtttgttataagtttttcatctaccattacttctatggatatttctgtaaagcaaagcaatgcagtgtccttgtttctatgttcaagtattttcctgctaaattaaataataaacttattaaagctgaatccttattgtatgcagagttatttggcccagaagtctttaaatttacaattgcagaaaatcggagtactagattcttctgactgcatttctacgtttggtgaagattatgtgaagttcaaaacatgtatgactgacttcttcatttaataatgtcttcttgctcagtttttattttcttggtgaatttgttgccctaaactctttgttggctgcttaggttgggctgagcaaggggatgagttaagtcttgaatatgctgggactcatgccttgaagggggacctagttaggtaaatcttattaacaaaagttaatgccaacatcaaataacattctccctcaaaattaataaataacattttcttgatttgtgatatttattggatccttcatattgcagatatggaaagcaaactctaggaggactaattaaagatggcatgagtgcactttcaagatattacttaaataatttccatgatggaattcggcaggcaagacgattttcatgatttcaaatattagttattactcatttcagtataatgtgttgtttgattaaatgtggactctgtttcttttcaggatgcaatggatctagtcagtggacggtacactattaacagaaacggtccttcacccttccagctgaatggttttgaatcattgtctgtaagtattctttcttcttagatcatttacatttattatgagaaatgttgtcaagaaatttagagaagaggcctataggtacaatgcccctggatttttacttctcatctttttattcatttgatcctttgcaattttaagaatcctgttcttatttagtgttgataactatctatatagacaaatttgattttagttaagagcaagtttatggttgggctatttttgttttttttttcttgagtgaaaattcaatgaagtattattcatgaaatattgcagtatctcccagttgcatcggcattgttagtcgggggtttgacgctgacatctttcacatttcaacaaggtattgttgtttcaagacttcagatccaactaaaaacctcatcatttggatttgatttgattttctttctactctttaacaattttaagacttccatttgtataatgtagcgggacgacatgcacagcagttcatgagttctgtgctgtgggctggagtggctgctggagtgatggctgtagtgaaggctaatggaaggcagttctgttcgaggcctcgcttgtgtggccttctgtaaggagtgatgtgtaatcttatgtagttcgaaaaaaagctaaaacttcggttaaaaaacaccaattcgagtaatggaatcatttgatgggttccgattccatgttacttgtgatagaagtaagagccaactgaagatgtaatgatttagctatctccaatgttgctctttttacttcaaaccaaacctatcatggaaattgtacataatgcaagttttttcttcttatttaacttaaaaaaaattgaataaatatcaatttcatcttttgtttacgatgaacactttttgcctttcaatctttatgcattttcatatagaatgtagaaaatttatcttattaacctctgcttgttgtttctaatcatattgtggtggaaataatttgataagaaaataattttataaaattttaaattactatttatttaaaattatagataaatagctgatgttcttaatgacacattagcaatgttaacattttattagtcacataagataaaactttaacaagttctacattttggaatagttcaagagagcttttaagccacgatttagtaatgataatccggtgcaataaaaatcaagatcttgtattgttttctcttaaatacttataaatactcaaaattttataacacattttgtaaataaattaatatataattttaataaattaagataagtggaattggtcagctgaaaattcggacatttactcagttaaaagtgtttatagacttgctcaatagatgaaagaaaggctgatcatggaatttgaaaattccaatttgtattgtaactaccttcttactcatgttcagttggtttttgttaggaatgttgtgctgttggacacccaattacaactgaagtcgatatataaaaatgagaaactcaaataaaattgaatcaaaataatcatataactgaacaagatttttattaaagcaaagagattacaataatttttctctaaaataaggagacaataacctctcttattataggaaaaaatactaacaactacaaatgtttaggacaaacttctctctctcaatggtgagacgcacatatttatagctctcaagcttgacaaaaattatgaaattctatattaaaaattttattagtaataagtaaataattcatgtttttatatataatttaatatttttacattaaatttatgtaaaataattattcattgtttattattttttttttcagatttcaagtttctttgtactatataaataatcttgtgcagttaattttactattttaaataagtgtagatcgaaaatctattaagaatactctaaaattataataaaaatatctcaaaatcaatttattgaataaagtaagctatgttgttatatatgtgtcaactaaaagaagaaaaaaaaatgttaacgagtattatactattgctattgttttaataaaatatctagtctaatataatttaatattataatttttaaattataatatagaatataatagcaatattcaaataaaaagtgatgtgtattatacatgagctaagttaaggagtaaattgagatagttgtgatgattaagttttgtaaatagttatccgtacactaaacacgcaaacccatgctaactaagtaaaagacaaaatccaccgaacgacaactaccctttccgtttgcagtttgattactctattgactggtaactggtggagactaatgaatctctctaatcactagggtatggtatgggtgtcaaacccaactctttgtcattttcttgtttttagtcttaaaatccactcttcaaatcctcctctcatttcatttcctattcttatttggttgagagaatcacacgcttttgaaagggaataaacacgtttaaacacacacgtgctcatctacataatataattaccacactctctcacacactaaacgacaagctaaccgcaccgaacgacacattttactcccgcgtttaatttcttctcttatctctctctctttccatgttcgtttcccagtcggtgctctaaaagaataataataataattgtaattcaatctaacctaatctaattaaagaaaattgctaaaagcagttctaatggcgtagttgttgttactggtggcttccacttgtctccaaatgaaacactcaacttgtcaacttctctctctacactctgctccaatcccaaacctaacactctaaatcttaccgaataaaagataattataaacaaagaaagaaaaacctaatttcctttccaccgt

SEQ ID NO: 185998 - DNA, 1613 bp, Cannabis indica
gttaaaaaaaaaagttaaagaagaaaaaaaaaaactctagctagctatagttcactatatttttgagcacgtacagttctttcaatgaatagtgacccatcaactaattgtttgctacttgctagtgacttgtcccactttctcatgggctctagttgtcaaggtgttggaccctacatgctacggaatggtcggatcttatgaaattccaaaccaaatatcctatatgacaatgttatgcaagaaaatgaatactaatcttatcatgcgttaaaacacattctttgaagaaagatctaagaatcaatataaaacatcccctataatataatgagtaaacaactttgactttcaaaattattagattaaaatcttgagaaagacacttcacaccaacggtatacgtctcacctcaggaaaagaatagagtccgatgcccactctgcaagctaaacgctctctctgtccaaggaaccgcttatcaaagtggttaggctttaaattaatttcaatggtgttgttaataaaagacccatctcatcagttttactttcatggtaccacactttttctattgtgcatattaaaactaatcatgaaggccactttttgtacgagaaaataacaaaagagatactagagaataacttaagccaatcacccaccggctcaaagtagatcacaatctataccctgctgaaaattcacagaaatttacattctatatggaccagggctttattggatttcctttgacagtaaggtattaaagagattcctttacacaaattttccacaaaaaaagtagaaactaagggtaacatccattattgcaaagaaacaaaagattttgaattataatgtccttttcaatcataaattgcaaatatatataataaaatgtacaaaataaaggtaatgtaagctgatgaaggcaagttgaaatttaccaacttttcaagagtcttcgtcaaccacacttctcttataataagatgactctttatcttcagttgcgagtaaagaatttatatatagtaatctaagactgttagttgatctggtctcccatatcaaattcagaattatttgtaaattggggaagtaaagtctgaaattgctcaacagctttcagctctatatcaccagaaaggtaattaattaattaattgaaattcgaaaaccaatttcatataatatttacttgatgtgagcagattggagatttcttaagatagagtaattagcatatatagataactacatgatgagataattgctcactctttcttttgtgtaccatgtcaacatactaatgcataatttgaacggatagtattcattgtatatattttattgttttgttaattttactgttctaaaaatagtattgaaaagaaagtacttctcaaattttttggatgcttctgaatctattgacagtctttctttctttctttctttcttttttttccacactggtagctccttttcgaaaagagtagctggtgtcaaattagttaccaattagttgaaacgatgtaagaacagaagttaaaaatttagaattatttcatcagcttatgttaaaatactattttacattccacact

SEQ ID NO: 185999 - DNA, 3731 bp, Cannabis indica
ctctctccctctcactcttctcacatacaaattacaactatagagagagaaagacaagatttttcccattgattcatctctctctctctctcatcaagcttcatcaaaattaatgtatgttctttcttttaactttttgaattgaaatgtttcatggtttgtgtttataaatataatcttattatttttttcattttttttttctgtcactttctcacagattttccttccatagaaaaaaaaaaaggatgtgagtagagagattgtggtcatttttctccattttcccacaggtaccgactcctcaaattcatcatcttttgtttggttccttaagaaaaaaaagaaagaaagttttcatttttattttttctttcttttatgttattataattatcttcttaaaatgtaactgaagatttaaacatacattcttcttaagctttaaaaatcaaagctttagcttacattcatataaaattctgattttgggttattatggtgcagaaattacccttttcattgagctttggaatgagacattagaaaactcataaaggtttgaaatttatgaaattggtatattcctataatgataatcttataccatttaacctaataataataataataatttgtgggttattatgattattcttattgtagtatcaagcagagtgtgttatgggaattgagtgacaagacattattcttattattattaatattattaatattaattattgatatgaacgaggatagacaaatggaagtgcattacatagacactggctttccttacacagctactgaaagcttcatggatttctttgaaggcctcacacatgtccctccactcacttatcctcatcctccctctgtccatgatcaggtatgtatatattatatacacacatatatataatggggtttggtttgtggttatgtatggttgcttgtcatgcttttgggggcagtgattaatagagattaagtgaggtgttttgatggtggtggtattagtaatcaatgctttggacatgggttgttgtactgacacacattgatttttgtcttttgtaatttagtatggtttgtttgtataatatatttaaattgtttgtttctcttttgtgaccagtactgtttggaatagttctgtgtctgtagtacaactaaatttattatcttcctttttttctttaactaatatttaatgattaaataccttgtactaattgtaccaagaaaagaccaacctttgttaaagttttgttctttgttttttggtgaggttttgatgtagcttgttgttaaataaatgtgtatttgtccttgtcattaatcattagtttgttatgtaaaacaagtttgtgtcttctttcatatgtagagatatttgactaagaaatagacccttaagctttgttgatcgaattcattgtcttagcatggtgagcactcgttttaaattatctcgtgacctcccattatcgaaatttcttgtcgggtaagttctgacctgcacgaaaagcgtaacgatctaggcacggtcttggagagaggctcagtgaaatatacatgtctgtgaagatacaaactacctgcacttggacaaaaagaccctatgaagcttcactgttccctaggattggctttggacttttcctgcgaagcttaggtggaaggcgaagaaggcctccttagtgagatactactctgaaagagctagaattctatttcgtatagattgagataccactcaaattacgctgaactaattaaaataagattttaattggatttgatcggttattagatgatattgtcaaaattcaattaaaaactgatctaatcctatccttagtatgtcgggaaggtatatgtgtgagtgagtggggtgtaatagtaatagataatggaattgcattttgataatgggattttgttttggtgtgtagtagtgaaagtgaataatgttcatttgatatattataatgaaaatgttacactttgaatctgctgtgtgtttatccaggaaagtttatactggtcaatgaacatgaatccatacaaatttggattctctgggacagaaactactacttctacttcttactatggtcattatgaggtaaatgatcatttgccaagaatggatatgaacaggagagcttgggaatacccttctatgatgacaacagaggaaattccaaccacagatcactcagtacaacatttcgaggatggatcgtcatcaggagatgcggatgcagcacccgttcatgccacacttgaagaaagttagtctatctattcctaaatgcttctcactcactatgcacttcatgaactttatgttccaacaatgtacgagatttcgagtccttttcgagcacctacaattcaattaactcgagcattgctattaggcaacccttataaagtgacacccttatcccaatattgaattgcaccagtagcgattacctcaatttctcgttatgtttattaatgcttattcagagtaaagtttgtaatagtaaaattattgttgtgctttttgtagatatcccaaatcaacagaatagtaataccagctcttcccaggtatgaatctcttggcttctgcacacccacgtgggatttcttgtctgtctttttgtttagttgacacacataataaaaaggaaaaatctgtacaagacaagacctatttataagccttttttctcttcatgtcttgttgcagactgtgtggcaagatggcatagatcctgacaacatgacctacgaggtatactacatttgtgtataaaattataaatcctattcacaaacatagtaaagttgtcaaaccatgactgacagttctattgtcctatctttctttgttactattcaaaagtaatgcaatttgagctaaagtatcaatctttaaagaaagctcttttaatgttcattgttgttataatcatgcctttgtttaggaattactagacttgggtgaaacagttggtactcaaagtcgaggactttccgatgatctgatcaacttgcttccgacatccaagtataagtttggaagttttttctcaagaaaaaaatccggggaaaggtaaaattgtaatttgctcgattgtttgttttctggtatcgatcgaaaattgataatttttggggaacaggtgtgtgatttgccaaatgaggtacaaaagaggagataagcaaatgaaattaccatgcaaacatttatatcatagtgaatgcattagcaaatggctcagcattaacaaggttcaaactttatctcaatccttcataatcttcactattttactttatgtaattcccgaaaaattcttactttagctcgaatttgtttaggtatgcccggtttgtaacatggaggtatttggcgacgagctaagttgagggacgaaagcttcaatttataaccgaaaaagaggaagaagaaaacttcaatttttctttttaaaagttttagtcttttttctttttcttaaatctttgtatacatgatacagggctaggtaatgaattaagggtagatagtctcttgtcttcttttttctttttcttagtacaattgatgtttaattacaaattccttttcactctaacttctctgttgttgatgatgattatgagcttcataatatagaaccaaaaaatagacaactttatgagcattcatatttgttactttt

SEQ ID NO: 186000 - DNA, 2598 bp, Cannabis indica
cctccgccacaagtgagattttttaataaatttgagtggagatcagtctataacaactggtcccttactctttttaaaaatgaacgaaacaaaacaataaaagcacctgttgcaacagtggatttggctgttgtgctgaaaacggcttatgatttcctccggtaagtgtttgaatcatgttactatggccttgctgcacttgatggagccgctgcaaatatttctccctcagatctggtgcaacttcagttcttccacgaaattgtccctgaaaatggaattagataagtacacaaacaacgagatggtcgatataatctatattctaaccaaatatagtaactttccagccaaataataataaatttcttatggaatacagcttaaagcacttatatgtgaaaaccagagatagcaaagacctagtatcacccacaacttcaagaataataaaaagtacatgttacacttaataatgtagttcattcaaacataacataaaagagtgtcacttcagattgtattttgtccatattcaatagatggatttgtggacttttagacactaataaatttcaccataacagccattacagaaaatataaaaataatccatacacagcctaagataatttgaagacatattggagtgagaaattaatcataacagctatttgaaccaaaagtttttagagacattctgaaggaatttctcaagatcaggcagcctctttaagaacaaaggatagctttgcaagtgaaaaagaaaaggctaacaaatgtggaaagtgaggtgggtaccatggtttcgcaatggtgcttttagagctgtatgcaggatatccattatattgtcaaactgaacctgcttgtgtgggttacatcagagcatttcaatttgtataaaaacttgattgtttaaagaagacgaaagaaaaaaggtcagtatgtgtttttcatgacaacactccaacatgcagcaacagcgcatctacttatcgtgttaggttatacaattttattttatgttaatggcctattattactactgagattctgccttttaattccccacatcagctgagaagcaataagacatgttatgacttctgaactttataactacaccatgttgaccaacacatcatcttaattcctgaactagcctttcaaaacaatgatgaagcctttatggaagaaggcttaatatcatactaaaatgactataatggtgtataaaggttcaaaatgacagaaattcaaagctaccttcaaatcttaaatgcatggccatattagaatgaaaaaaagaaaacaaaaaggaggcaatgttaacatactggttcagctcctgtcttccattgcatgctagaaacaccagatggggaaaaaactctgccagctaatgcagcagcatcactaacattactagaatcaagtgagcctgttccatcagcctttgtaggcaagaacatcctattacttataggggaaacaagaggttgcaccatgccactgctcccaactctctcatcacctcccaaaatgtttctcttggtcatatcagatgggacaacaccaagggtgctactaccaggatttacattaccagaattaatagggatgctagatgaaggctggcttgaaagactgcctctaccaatgccccttccaagtccagtgtctgtaagagatggagatgatctgcgaccaggaaagcttcctatttcttcttcctttacagatgtagataaacttacaggagaagatatagtagccccagcactctcagtaaccctaacagaacttgaaccttgcaggtttggagaaccaagcgaaacaccagccagattatgagttggaatattcacaggtgctgaagctgtatgagtatgacttccagctggagtggttgcagttgaagaacttatcacactacttttgggaggcggagtttttgcgactgtatcaacagcactctcctgggaagttggctcttcaactggttcttggacagaagtagtttgctgatgagtggaagatacagtggcctacaaaagaattaacattaacaagtaattaaaacagtatcaagtgaaatgaaaggcgggaaaaaaaactataccattttaagtggaaaaaaaatacaaaaatacaaccccaatttagtgcattttaaaacaatcaaaattaccaatgttagatattcttctagacagtattttttttcttgcacaaatgaccaaggacactaaaattatatggttaccgaatttaacaatcaataacagcaacaaaaagtagatagagaaagagagagataagcgagaaggaggagagagaggaagggggggggggggggggggaaggaagagcccttgagattaagaaaaacaaaaatttacaaaaaactaagcaggacaaagagaaaacattataacaaagatatacaaaatgtagtcgaaggcccaatcaaacatcaacaacagaacaatttctggtttaatattgtcaaaataattccatataatatcactaaagactcaacagctcaaaatcataaatttgcaagaaggtaattatataataatatcatag

SEQ ID NO: 186001 - DNA, 926 bp, Cannabis indica
agccacttaatcttgtttatattgagcaacactaccatcttgtattttcttttttctgaaaacccatctaagaggaagtagaaaattagtttatgggggtatatcttaactaattacttaacaaactctatatacaaagcatattaactaagagataacactctatctaacactaaaggctgagttattggcaatacgatcgagaatggtacgtaacattttgctcgagatcttaggccgagaaatttcttgattgaatctgattgcaataaagcagtggtctattaatggcacagttaatagttgtttagattttgatgcaatcatcaatgatatttattgttttaattttgcgaatacttgtggtaaaatatgcttggttgttagagaaactcatattgttactcattttgtccaaattagctttattttctaaagcttgtgctttttgtgaagaaattgtccccaatatggtgaatgataccattgtagcatacctaccattttctttgtaatcttcttgtggatcaatttaaactaatgtacagaattaaactaattaaaactcaaaacaagaaacaattaataatgacaatatcaacaaattcaaaaattgaggagaaaataaaatagaacagaaaaattaaacgaagcaagaaaaccataaaatctactaagaattacactggttcaagtccgatagattatcgagatctatgactttaatccagttttgaaaaaccatcgtaaacttctttcttgattaagcaagaacacaagtacaatacaaaacccgaaaactcaatctctttttcttctctatatatatctctctctctatacctcccaattgaaactctcttcaatcgtattctcagtcatcttttacaaataatgatatagtggtggtatttataggtcaagga

SEQ ID NO: 186002 - DNA, 1869 bp, Cannabis indica
cggttcagtgggacctataggaaagttgatattaatatattcacgggacctgattatgattttctgtactttccgtgaaatctattgcattcgaattttctgtacttttcgtgatttgatattaatatattcactatgggaaatctaaaaatcaacgttaatgtaacaggataaacattaaatatagtattgatgtatttttttcttttttttttagattatacctaatttagattgattggaagctccagacctatttgttaaagatctaccctttatgaatttgaaaattgataggattagttttgtgcaaataaaattgaaattcagggttgaatttgaatttcgaactaatttttttgctctttcggtgatcaatttgatttttgtcttcttcttgagtgaaatcgctaaaattaatggtagttttcctcctgcttgagttcatttcggttgtcttgataggttgaacaataaaaactttcgttggtgatatctttgtttcgtgcaactgaagctttagaagaagaagtattattgtaatttcttgtttgtaagctgtataattgtttaaagggccgacccactatattttagcaatatagttacttttttgtatattcttgaagaaaaaaaaaccccctttttttaatctatttgagatttaaataaaacttaacatgtacccccaaaaaggattgcaatgatactctgtgtttttgacattttgctgacaatgtacatcataattatttaaaacttaaaacaatttacaatgtaaaattagagttcaaagtgtatttcacaagcgtataaaaataaaataagcacaagtgcaacaaactgaactaaattttgatatattaaattattttgaatttttaaaaaatttgcaaaatgtcttaaataagtacaatatacattgtcatataaaaaagattaaaactatttaaatgtcaaaaacgaagtaagtgcatcagttctccacttttcggaggtgcaccataaaatttcacatagtacttttactatcaatttttacttagatattaaattgcaagatataagaatatctccacaaattactctaaatggaactataaactaaaatggcagctacaatttactataactgtaaagtagctggcccaacagtgaaccgaaaaaaaagatacccacgttcaaaaacctgagttggaaatcaggcaatgctacagaactattttgccattgaacatttgcaagtgctgaaaatctcctagttgcacatacaaaactttacaaaatattgacaatgttatcaagttatatatttcccatctagcttcaaagatctcagacgatacaaaatcaatttcttatgcacgccagcatagaataagatatctaatgatgaagaaacaacatacttgttcaaaatcttcgaagattgcatggtggattcattgtgatcattagtctcacacattgacatacttgtcaacataaccctgaaaaacaaggagaataatgatcagagaatgaatataataatgacagaaaaaatcatagtgcaatcttaaacatcaaagagaacctatagaggattatccaatctaaatccaaacaattatctcttgattctgagggtttttcaacaaaatcttctcccagtataccatgtcgtgtacaaccattttattgcctgattggaatttattatgtagaaagtttaagacaatttcaatgagattcattggtccatcaccaaacacgtcatgagaaaaatttccataaatcaagtatcaggttaaaaaatcttacggccctcttgttttcttttcaacaacttcattatatcactaaacagaaatattttatattatggtt

SEQ ID NO: 186003 - DNA, 9188 bp, Cannabis indica
accataattttcaatttttaaaaaatattaccatgttaccaattgtcacaacacttacatttgcaacaaagccatcttgttgtaacaagttaccaattaattccaaattaaagtaacaaaagacaacaaaacatgaagaactaaaaatcaatgataaaaggctcaaaagccatcttgacagttgaattagagcattttggtagttgctcatttgaaccaaataccaaaaaagaaatacttttgtagtccaacaatacaaaatgctaaaattttgtaacaaaaatcatcttcacttaacctatttagtctaacttatttcttagaagacataatttgttttcttcttttcttaatctaactcgaagttggaaggtaaacccgaatggtgtctcgcttcttgagtttttggcgacatgttggacatttcttttgagtagcaattgccgtctcgatgcatatcttgcagaaaatgtggccacattttgttgaagtttcttcggttagttggtccatgcaaatcccgcaaatgaaggaaggtgaaaccaccacggggatagtttggggcgatggtggagccacgggaatgtcagttgcctacgattagaaacatgtgaaattagttctcaaaatcttgaagaccaaaaaaacgaaacatggattgaaatttgcgttcgattaaaatttcaaacagagggatctctttcgtccaagaaaacttaacgtttattagaaggacatgtttagctaatttatgaaccgcaatattacaacgaatccatgaacaacaatataaagttacaactaatatgagaaagacacgacaagttttagtagcataaagcaaaattaatagataagggtaaaaatggcatgttggaaactcatcgtctatctgaaaaggtatactttcctaattcatgaataacaatattaaaattacgactaacatgaaagacacagtgcaagttttagtagcaaaagacacgaggagacttgaaagtgaactattttagtagcaaatagtgtctcatatccacaccgcctttttctttaacacaataaggagacttgaaagttcgaaatcccgattctcaaaatcccatatacttcgtcaatatgtaaggatatgtaagtgaagtttgaatagctgtgtcaaattcaagttgattatgtattttcgagttaaaatgtgtgtgtaactaatctatatgtatgcctatatgttcaatgaatgaatactataatagtaaccaaagaccttaaacaatattaacaaagaaaggcttcttacaacattctgagttttgttgaattcttcaatgttctggccaacctccattctgaaacatctaggatcatttggataaatccgactactaagttgtgaaatttcatatgctgtatagaatagtttcaaaaatcaggtcaagcacactctagttgtgaaatttccaaggttattagaaatgtgaacaagaataaatgttacaagaagtgtttcttatagtctaaaatgattaactagtgggggaaaaatagctcgcaaaatagtcttgtgacaatcccgtcattctatcaagaattctcaatatcttgtcgagaattctcgataattatcgaaacaaaataattgtgcaaagcgactataaaatgaagattattttaccatttaaaggtctcatattgttattggtgtaattaagtatcagatctcacataaattaatttaataattattatagaatatcgttaaccaattacaagacgctaactctaagtggtacttatagcaataatttttgccaaacattttattagaaaaaaatttactcgaatcaaatacaattttaaactacatgtgagcaaaaccacaataaaaatgaagaaaaatatgtttcaaataaatgaaataattgaactataagttataacaaagggtaaaaggatttatatgatcatttcctctattgccattcaattggaatttaaaacaaatacaaatgaaacaaagtagtaatgataaaaaaaaacatctaacaaacacaataagatatggatataataaatatttaatattaaaattttattgtctactttatcggaagatactttcttatgtcagtcgcaacgttaacattaatgaatcaataacaagaccttaaagcaaaaagaaaaagatgttcacctgtcctaggaatttccactccattacgccttctccgaaaatatgtcttggccaaatcaagataaagaaaacacgaacacgaacacaaacacaaacacaaaaatcagctagaagcaaaatacaagaaatgacaaatctcacaactgttaattaagatcaaacctctcgatatttcgatggcgaaaggattacaacattttcagtactagccacaacaacaccattagtggtaggagcttgttgttcttgagattgaaaatgaccatttccttggtcttgaatttcctcactaggaggaaaattgttaaggtccaagttcaatgatgtgccatttcttgacatgtttccttcttcactttcgattgaattcataacgaatccaactcgaaactcctcaaaggccaaagctcttcctacacaacaacaaagttcaattcttaatcaacaaaagataatcttaagtttcatttggttctaagaagtaagaaacactaatagaaaaaattaatggttataaattgtaacatcaattttttgttatgacagtatacattgtagttataagtaaccgaagttttcttttttataattctaaacaatttagaatactgaaatcggaattcaaacagttgattcacatgcttataaaatacaagataagtacgtgtacaataaactgtttgaattccgattttaaccctctaaataaaacttctgagagagttcactataactacacatattattttcatatcttgctcaaggattataaacacatatcatagtaaaaaggccctatataaatataaacacacatattattttattactttgctcaaggattcaaaacttgatttaaccaaataattgaaagtaaaagtaaactaagatgcaaatataaggcctcaaaactacaaacaagagcacataaataaaatgataaaacactcaaatatcacttcaaaacaacaagaaagaaaagtcctttcttttcatcaaaaagtcaaagaaatactcaaaacccacaaaacccaattccaagttccaaaaaataaccacaatctattgtaatatagagatacccaaatgcctcaaagtaaagaaaaagccataaaattacacaaagaatcaatgaaaatgaaaaagattgaaactttagaagaaatatcagacaatgattaccttacaagaagagaagaagaagaagaagaagaaaagtgtaggaatgaaagaggagaagagataagaagaaagcatgtacctttataggaggagaaaaaggaagagagttattaagaaacataaatgtgagttataatatatcatcatatatgaaacatgaatgaatgaaacggtagctaatgaagaaatgaaatggagtgagtgagtgagtgagtgaacgagtttggaaacatatcactattcctccttctcaccattcactctctcactctctcaagtcaaacattgttagtatattttcgatatttttggcagtttatgtgttttttttcttttttagtgtgtgttattctatgtatttacttaacctttatttcaatcaaaacactaaaagttacactaaaattacatttcttattgttatattattttattaaattaataagattgattctatattgggtaaatatcaatttgaatccactataaattggaccttgtattttttaaaatagtactgaatactactctgaattgattttcttataaaataaaacttaataataacttgatacataagagttatgacaaaattgattaagttttctacatctgtttgtactagaaaatatcttcaagttagtcatattaaaaaactgaaaaaattgagctgtgagtcctatttgtattatttgagaaaatacaagatctattttattatttatcaaaatagagaatccaatcgataacttttacaaaacacaaaattcaaatggtattaacccttttattgtttagaagaaaatatttattttgtcaaattctacatttctatttgataaaaagttaaatttgttaagttatattttgtttctcttaacggacgttatacaaatgcagataatatttccagctcagcttgcagaataaataaggaagttcaaagaataaatttgtttctattgttttaggttattatacctccaaggagagttattgtggatttttaaatgccacctttttgtttccttaaaaacaatgcggacagtttttgccagcttagcccacagaacaaatgtggaagttcgaagactaatttttttctttttcattggtttggattttgttttgagggaatttattgtggttttttaaatactatcttatgattcccttgaagtaatttaaggtcatttaaaacgtgacttacttttctaaattataacacaattttaaaataatttaacaatctatgtcttatcaaaaaaaaaatatcttttatatattaaaagttacccaagcactataaacaactagagagagagagagagagagagagagagaatgtacttaaattgtctttaaggttgctaatgacaatgttaacccaatttttcacttgatattgcacgtgacagcgacacgtagcgactcctaaaaaggtatttgttcactatgtgttacttgtttacccaagtagcacagatgttgaagcttcatcattcgcttggaagcccaagcgcgatgataccttcatgcggaagtccttcatgaagagctcttgattgctctacaaaggtacaaagatatataatgttgcaagagttggggaccattcctatggcacatgtgcctacctatctctgatagattgggtagatatctcggaacatatgtccccttatgtacaactgatagtgtgaaataatcaatcttgggaactagtggtgtgctaccacactatcaccactttcccaaggaacatgatcttccacagtacatcagaaagcataaattctggagaatgaagggtggatagtatgtgtgataagcaaagttgatccaactcaccatgtagttcactcaaacttgtgcatttatctatggtaaatgaccacattagttagttaatcatgcttccaaatgtaattttaggttgtagtttacaagccctaacaccattctgcctataaataaggctagggattttatataaaacaaagtcatgttgtgcatgttgaaatgtttcaaattggaagcctttcaatcaatactattgactcgtagactaggtcagctctttagtctatacatgttttagtgcaactctaatattagaaactcttcatctctcatttcaagttcatatattgtgttgttgtaacaatgttgcccataataaactcatcatcgcaatactattgactcgtaaactaatcctttacaagctaatacatgttttagtaactcatctaatatatattggaaattgttttagttaacattagaaactcatcatctctcatttcaagtgcaactctaattcataaattgtgttgttgtaacaatgttgcccataatttaactaagtttgcactttcgactgataatgagttaacatcgcagtgcaatattccgccatctattttgaataatgttcttaaagatttttatcgacgaacattgatctaagtagataagcatgttctttctctaacaatgcacattgataaaatgaaacaccaatatagtgtcaaattttgttcaaaataatgacattgttgtttgatagaaagattgaaaagaattcagttaatataatataaatactcctttattagcaaatctaactaaccccaagattccaaaacaaatacctactacacctcttcaacactttcaaagagttgtattaaggttgttgtgtaagaaatgtttaagaaaccccacccaattgaatatttgaagatttgaaggagtaagtaagttcttttaaactatacaaatacaaaatccagctaaccaaaacctatcgagttatagatatagcaaccctcaccgaacaacaatcgtcttcttcttcttcgtcgagttatatatatatttcacaaaataatggtataatttccccccaacacaatacctaatgcctgcaaaagaaaaacaaaacattagttaccgaaaagaaaaattattcgacgaataaaacacaagttgggaatgtttaagaggtgtacttggcaattatgagttctcatttagatgctggtaggaaggtagatccttataatgtctttcattctaagcttgtggcgacatgtcgggcacttgtgctgaactttaattgctgcctcaatgcattttttgcagaaaatgtgaccacattttgtagatgtttcttcactcattggaccgatacaaatcgggcaattgaaggatggtactggtgggggcggtggcggtggtggtggtgctactatctcagatgctgcaagtatgggcgggtcattctttatctgcattaataaactttcactgtcagatttaggaccttaaataattgatacagatgtcatcattgtacttgaatgaaatttaaagagtcgcatttaagacttctatgaagaacgtcagaaagtgttacaaaaatgtggtatacaatgcgttcgagcctacaaacaacgaaagggctaagtttattttttttgtttcggcaatgttcacttccatttctcaacagagtttcgaagctgtgaagaatgtcaaaaaggcacacaagaaaatgacctgatcaactttgggactctcttctgaattcatgtacagctcccagttcaaaactgcttgatttctcaataatcttctacgcttgttgcgctgaatcggatacgaagttgaagcagctgcataacaatcaaaattcacaatgttaagtttgggcaggaaaaggaagcaagccaagcaaaaaatgattcaaaagaccgaaaaagcctctatgctgacagaagcatgaccgaggaaagaaaaagaaaagagtaacaaaaaggaaatccaacaagggtagctcaaatggtcagacatgtggtttgctcctacaaggttcgaggttcgagcccctcctgggtaccaacatagcaattgctatagtttcctagtccccgaaatattgtagggttaggcagggaacctagtttcgaaagaataaaatctacctaaaaaggaaaatggtagtcttatctagtaagtattgtaagttccattctcaaaatagtaacatagtagaaataagagagagtataactaacctgcacggctagtgttcacttcggttcctacctcggccacctctctcacctcaaggtttcggctgggattgtttttcgcctgttcacaagattctcagttaataacaatgaatgtaattatagaaaatgaacaatgaaatgaaaagggaagtatcataaacatacttcagcaaatattcttgaggaaattatagcaacatcatcatcgatgacctcgaaatccttaggaacaaccggatgagatcttccgaaatgatgatgatgatgatgatgattatgcacattagcatgatgagatcttccatagtcaaaagcaactggtggattattaagatccaactctaacaacattttccctctttgtaagtcactcatatccccttctagaatctgttttagttctaattccaatggtgtcaaattattgtcaaaactaattgaacctgaaaatttataagaaaaataggtcaaccaaaaaccaaatttatgttaatataattgctaaaaacaaccaaacaaattctcacaaagctaatatttagctatcaaaacaagaaaatctgctgaaattgataaaccccatagaaaatctacaacatacaatcaatgataaatgataacacaaatttatgctttatgttcttcttatttgtttcatgagtacctaaaacctcatttttatcaacaaaaacaagaaaatttgctgaaaatttataaaccccacagaaaatcaaccaaacattttaacacacaattgttaaaatcaaccaaacaagttctcacaaaactagttcctaaaaatcaacctaaaaaaaaaaattatatctcaaaagaaaaacaaattaattgtttcaagagttcctaaaatctcatatttttcaacaaacaattatgataaatgatcaaacatttcaacaaataacatgcctacaaaccaaacccaataatagaaacaacaattacacagatcaaaaacaacattgaatacttagatttgacatgatcatcaagaaattcaacaaaccctaatccaaaaacagaatcaaaaatcaaaacccagattaacccctttgacttttcaacatccaaacactaatcaaaaagtccacgtacctgaaggatgatccatttagagaaaaacccagatcgaatttcaccttaaaaaagatcaaaaacgttgatgatgaatcaaaaaatcaaacaaaaacaaaaaaccccaacaaacccaaaaaaaaaataatcaaatccttaagaaacaagttaagaataaagaagcagatgatgatgattcaaaaaaatactagagaaccatatcatatcatatcatatatatatatatatatatatacacatatgtataaatattagatcttggattgtgatgatgattttaaagaagaagaagatagcttgaaagtcctaataaggcataaagtcactacctttatttctctttccgttttttcttttgagtttccttctttcctctctttccacgtatgttcatattataattttgaaaaattttcttttatattttagtacacttgtttcgaaattttaatttaatttttctttaatatgatctaaattgtctatattgtaattgttaattttatttttggcatatttaattcacaaaaatattttattattttctattaatttcggctggtatgtgattaatatagtttcttattttgtgtattcaaacttggaaggaaaattgtctagct

SEQ ID NO: 186004 - DNA, 2631 bp, Cannabis indica
ttaagacgattcgcaagcacctttgaaataattttaattgatatgattattattatgattgtagtttagtatttgaactagaaagtttttaataatagacagtgtaactacttcgaattcttctgtgtttatgaaaatttgacgtaaattcaattactgagtgactttccaaatacagtaccgtgcgatcatgcgcttggtataggtttaatcaaacggtagtatttttttttttttttttggttgtaaaattattaaaatatgctatttcaattaatattatccattattctttatacgatcgatgtttcttcgaaaaatagaatgaattaatgtgattccaatataaatcattttactcttattgatttttcttttaaaaaaagcattatatcatagctagctagctagtactcatataatatgcataaatgaaattgatgaaaccggaggagattggtcaccttgaaagaaaggaatctaaggttcttaagatttgcttttgctaaaaccaaggctgacgagtaaagcattcaaaaccctttcaaataaattaaaaaatatattatataaaactttggtcactatatagatcaaccctgtatgatatgatatgatggggattattattttggtcatacgggtcagtaagttgatcccaaaattgttgattacaaattcaaatctgcaggcatcttcttctatatttatatatatacatagtcatacacataaatcatcatcatcatttcattctcaaaagagacgcccaaagtcgagacaaaataaacattatgtatacgcgggtatatacacattcatatgtatataaattgagaattattttgattttattaccaaaggggctcggaaatccatgcatcatatatgtatatgtctacatttacataaatatatacaaaaaaaatataataaatcagttggtcatcgatcacaaaacatcccacatgggtaagtgtgtgtttgtgtgtgacctatatagaccatgctctatctctttctctttcctttctttttctctttgtgatatcatcagctttcacttttgaaatgcccaccatattacatgacattctttttctctcaatagtatatatatacataaacaaatatataaatgatgaatagtattagtatactactactattacttactactatactactaattatagaaaaaaaaaagagaaattaaaagtaaagggatctgttgatctgtggcctcgatcacgttctcccacatgagctcaatcatgcgtaactatatatgtacttcatttattagttctcagtttctaataattataacagcaaattccatgcatgcctgcagattgaccccactttcaccttccattcaaatcagtatttatatcatcaatattatttataatatatattatatattatgatgatatgttgtaatctttaataatattgggtaactcaatatatagtatcccatctgtgtttcggtgaactccttccatctacgaactttgtagtaatagtgtacgttatactcatctaagatatggttaataaattttaaaaaaaaaattaaattgtttataattggtaaaattaatttcaatatttattatatttttttatacgcataataaataacctgtttaaatcttatggtttatattataaactattcaaaaaaatttaaaaaatttataaataatcttaattatcaatataaataaagttctattaaaatactcttttagagacaaaatttcctataatattattatatatcaaatgatatatctatagctaattataataatggtggctatactaattttgtgagcgtttgatcctgatgtgtattatgaaaataacatatccatatatctcagtttgaatattataatgtaatatatttggaagatagatataaatttatatggtacctaagggttttgcctcaatttactggtatatatatgatgatctctactttcatagttataattcactatacacaatcaatcatatcttttagctttacaatactataaaaaggaatttttggtttaattgattttaaaatgacatataaataatttgtgtcatttgaaataattgacgtattttttattttgctttaaaaccgacacaaaatatttttttgcttaagatataaaccaaagcaaagtgaaaaaacttttacttcggttcataactgaagcatagtagtatactatgcttctttattttttgtttcgtttatagaaacgaaaaaaaaaagaaaatttttttttaaaaaaaaaaaaaaattagaatcaatatcgcaccaccacactactacaacctaacaacaacaatagctaactaccaccaacacatgttaaggatgtactatgtcatatatagtgataatatcggatctaagttacatgatgtatattggtgtgtcctatcttttaatattatctaatagctaaataataaattcatgaaatttataaaattgatttgacggaaaagttgcaattagtagacaaaacaaataatttacatctgacacgagaaaaaatcatacatagttatacaaagtgtctaagagtcattataacattttttttaaattaa

SEQ ID NO: 186005 - DNA, 966 bp, Cannabis indica
tttctgtttttaaaaacaaaaagtattattttagttatgatatcaaacgtgcattaagttagtgaaattttatcttgttgaaaataaatttgttaactttcaaaaaaaaagagttgtttaattgaaattaggcttaaatatttacatataataatagcaaaaatagaaccaagctttgcagtgagatagagagcatcattctttatctgattttgactaatgcaaaaagccaattctaaagtgaaatgtaagatctgtagtggtggagaagagaaggtgaacagaaccatgtaatttaaagctaatttcataataatataaatataatcatcattataattagtatttgtgtcatgaacacttataattacaaaatgtttatgtggtttagaaaaaaagaaaagagaatcatacacacttagtatatgaaactaataataataataatatttattatatatatctgtaattttactcaatacaatgaaagcgatattcctccaccaaaaaaaagaaaaagtccaagacaaaaccaaaatcaaataattaatcataaagagagaataagatcatagaaatgttgaaaagaacttataaactattattacttttagctttagttggagatttggttgttgataggactaaataaacttaaatatatataaagctaaaattaaaatcaattaagatgataagaaaaactttgtttaatttatgtagctttgagaacaaatcaccttatcaccactcatatataataatctgcactcattatcacacctccgaggaattaacatgatattacatactctactattatcattattaactattttagtgctaattaaagtaattgtttcctatttagattatatatgtggatggatacaaatatataggataaaaggttgcatataataaaaacccaaatacatatatcatttagaagcatgacatgaaaaa

SEQ ID NO: 186006 - DNA, 3159 bp, Cannabis indica
gaaatcaaggttgaaaatctagacgatcaccaacatgttgagcaaagtcatcatacggttgagcttagtcctaatgtccatattacttttgctcaaatgtatactaagtttgatggtgtccaatcgcgaatttctgaaataggtaaagacatgttcgattatattttgaatacaaacgaggctatggatcattattttttgtcggagcaaccgaaactcgaaattaaggaaaagtggttgctggagaaggagattttaatggaggagggaaaatgcatgttgattgagaaggaaaatatgttaatggagaaggaaaagatgttaaaggataaggaaaagatgatactagagaatgaaagtaagttggatgacaagaataacgtactgcagagtatagggaaagaagttgttgaggatgaagactaagaaaatggtgatgtaggagatgtcattttcaaataaactcaaagtttacgttttcatttcttttgttttatgttttccttagtgttgttaccattttctaatatttaaattagtaatgtgtttttaacaaaactacaagtgttaccctatcccatggtaagacatagtaattggtatctaatgtgcttcaccatttccatttaaagttttaaagtaaatgggaaaataaattttaaatttataaaatatgcacaagcaaaaagattggatatagaaattgcaaagttgcatttacaagagacaaagattattatttaaccaatttcaaatctacatagagggcaatatttgcttgttaacagccacttgataatacaatcatcatgatatatgtgtgtgcaaggtaattttttagatttaaaaccatcctgaacattctcaaaataaattgaacataaaatttgatcttcttttatttcggctttttccaaactttgaactgactgttcaatagctggctcgaaattgattgtgtcatggtcggcatcatcttcatcttcagtttcagaatgatcactgtctgttattgattgaaaaccaatagcgttgatgtacacatttacagcaaaattgtgatttgtgtcaacccacatctccttcacgtaatcaatgattttatcagatatattaaagaatgaagggggaaggacatcttccagcaactcctcaagatattctttagcttcgatactaccattgtccatgaacgacctacgtggacaaatgatattgcccattaacttaagagggtctgggctgtttgtagaacttgaaccttcaccattttgaggacttgtgtaagttgcaaatagatgaaggagtaagagagaattattacccggagcactctctaaatctggatcaattatgcatcatcgtattataaatttataagctctacatcacctaagatttcaaggggacgcatgttttagtgttgaatatacatagtacaaagttttttattttttactttgataatgacaacaaacataacatttttcccattataaaggtatttatattgtccagttgattttgtgtaatatttaaatattaaatttgttatatatatactggaatttaggataggacaaagatagttaatattataatccaatgctgaccttgggaaggaaaatagtgttacacatttattctaccaataaaaataattaaaaataggaaaggtttcaattttctttcaagagtacactataaataatatcatatttcaaagtaattgaacatagccatatgggaagttgttatagtgctataataatgaaacattgatataataaactaattccattctttttattgtggaatgtaattgattaagtgaaacattaaatataagattggttcatattataaatacttatttttattaacactattttgttattaaaaagaccattggaaagtttgtcaacaatgtatatgattaaccccaacgaaaatgatgttagtacttaactaaaataggaatttatttaaccaatttgaaatctacatagagggtaatatttgctagataaaatccttatgatatatgtgtgtgcaaggtagctttgtagatttaaaattgtcatcaacattctcaaaacaaattgaacatacaatacaaccatcttttatgtccccattttccaaactctcaatcgactctttagtagctggaacgaagttaattggggcatcatctacaccatattcatcttgagcttcaccatcattatccggaatatcatgataaccaatagcggttgtgtacacatcaatagcgaaattacaatctgcatcaacccaattcatctaacaatacttaatgattatatttgatatattaaagaatgaaggagggagaaggacagatcgaagcaactcgcgcagtttatctgtagctacagtaccgtcattatccattaacatcttacgattgaaagagacactacctgaaatcttgacaccattgttgtcatcattcattgacatgttgtgaagactatcttctttgtaagttgtagttagaaaaacgacacactgacaacgatcgagttctctatataaagtcgaattaagttgccaaggttcaatttcaagatctacatcaccgataattttcataggaatcagatcgttaaatggaaatggaagcatatgtataactgtaaagaattttaaaacaatgatgtgaggtgtacacaagtcatcttaaatatttataatgtcaatttttctctatgataatatttaatttttttttcaccaataataaataatttggtgtaattacttttaatttttttaaaaaaaattaaacatttaaacaagttgttggacaaacttggttttaattgtatataatattaaattaaaaaaattacattgggaaggaattttcaatgaataatctaaataaatgattgaaattttttactttgggaagatagatagggtcacatcatctctaacacatcatttaagtttaagagatatttaactttagatattcatttgccttcccaacatcttatctttaaaatatatattcttccaaataaaggcttcaaaaaatatttaaaaagttttaatcttcattttccttccaacatcatttaactacaaatttaaatcttgatttcccaaccaacatccttcgacttc

SEQ ID NO: 186007 - DNA, 2134 bp, Cannabis indica
atgggagcgaaaaattcccaaagaaaaaggaaccaacgtgtaaacaagccaatagtagaactctgcatgggaaactgacttatctgatagagatgagtcaaatttcaggaacacaaaattatacatatttacatccattgcagaacattttgatgttttttatcactatcctccataatttattactatttgatgctgtttcagataaatttcaaacttttccatttcagattaatcgtctactcttggaagatgaaactgctttggatagccatgattcagagtaccaatcaataattaaagagttttgtgcttttctcagtgactgcaaggatgtgttggatgaggcaactacaatgaaacttttagagaggtaattgttgacaggatcctctgtaagttaatcacatttttttttaatgagtatgaaagcaatagctacttattttctgtcttagtgtcgatggaagtgtatgttagtattttagttgcttttctccatgcatgcttacaaatgacaggagtttttttttttcttttaaacatttataatagctgtgcataagcagagactgtatcaaccattttttttcttacataatcacttgatcattttgatgttgtttgttatatcaaagaacactagaattaattatttagcaatattttgcagttatggtcgggttgaagagttggtgttttttgccagtttaaaggagcagtacgaaattgtaattcatcattacatacaggtgcttcatcattcctttctgtttaagcattttaattttgttgaacgttgtcactataaatcgcatttactaatgttttctactagttctgtactttaatccgtaaatacacttacacatacacaagtatcaacatctacctctattttttattgttcaaaaaaattcctttttaaagtaaatttatcatcacttaaaatctagcaaatatgtttatattcatttcacagctgtgatatgcaggattgtgttccttttttctttctttttctgtataggacttggtacttattaaacttaaacactattagaactatcattcttttccaatgagcttttcagttcacttctatatatatcctaggccaatttgtttaagttgataagtattttcatatggtttctggcattagcaaggagaagcaaagaaagcattggaagtgcttcagaagccatctgttctcttagaccttcaggtaatgatatccagaaatttcaattaaaattgatttttaccacatatatacttaatgtgaacttgtaattgctattgcagtacaagtttgccccagacctgatcatgcttgatgcttatgaaactgtggagtcatggatgacaacaaacaaactcaacccacggaaactgattcctgcaatgatgcgttactcaagtgaacctcatgcaaagtaatttgcaagcaacgtgcattttcatggacatttttatgattaaatgcaaaatgcacaccaacggacttactctttgacatttattatcagttacatgcttcaataaattgcttaaaactagacataaatcttgggaagaattaaaaaaatgactccttagttcttttgggattaataagtagaagttcatttaggtttagttttcgattcctcatggagaccaacctagcaaatagttaagagtttcttgcctcccccaagattgtagggttcagcagtaaaatgaggaaattagaagttgcgttttgtgctttgatttccttctttgctgtaaatttaatattttaagtatttcttggatagaaatcttgaatactaatatgctaaaaatctcctttgccgtgaattcacatgcaggaatgaaactcatgaagttaccaaatatttggaatactgtgttcatcgtttgcataatgaggaccctggagttcacaacttgcttctcactctgtatgccaagcaggttgtcattcatttactataatttctaagttacttttctttgttaaaagaaatgcttttaagcttgcacatggtcaactatattgcattccaacaagtgaattatgggtcagtctatcttgatttttgaacatcctaagtcatgtatgggtctctggttcattttttta

SEQ ID NO: 186008 - DNA, 3446 bp, Cannabis indica
ttgtaactagaaagaaattctatatttataaggaagaaaaaaaaatattattttcaattttacctttataattagtgaatactttcttaagacaatatatatttggtgttttttttgatcatatttttgtcaaatagttttgatacattttttatatctaaaataccaaacctttttataatttatttatttctttttattactttactttataaaataaaaagataataatgttttttgcttaacaaaaaggaataaattaattgtaattatatataatattaaatggaccaaaacaaagtgttttgaattatgatatcttttgtggattacaaatttaccgaggtataatccttaatataaaaattaatattcttatttttttatatgaccctttttctttttagtctttttacttctagtttcaataataacatgcatatataataaaacattttaattaaattttattgtaatgaaataagagtaaaatggtgttattaattttctttttgaccaacttttgcttctttttttttggtaaattaaaaaaaaaaattttggtatttagctaaaatacatattggtttttacacaagttgtgcaaatatgacctttttctttttaaagagtatttaattttaatatataattttaaaagggctagctagctactctaccggttgacgataaataagggcaacatgctacaatttcactttaaactaacacaaacgtaaatctactatattaatcaaatatacaattaataagacattaatttggtcgtatataataaaaacacaaatgtgaaaatttgtgttagaaattgttggagtaacggaaggcattcaaattggtctttaacaacattaatcaactaagagataagaagaatggattaaagtcctaataacactacaaaagaatgaatttaatacagatttaattgaaagataatgataattaagattagatagtttgcaggcacagcctcaaacagaaaaatactttgcaaaagaaaaaactgacaagctactactgctagcattgatttacttccttgtaactgcatagttttaaattttgaaaagaaaaaaaaaagtaccaaaataacattgaatatttacacttcaaaatatgacagttcatacagaagttgataaaaagttatgggaatttcatttgtgtgtactttttaggtgtaaaaattatggatatctctaacattactctaatatggaatcataatcaccaagaaccatacacccttattaaagaaaagtcaatagagttaataatttgactaaaaattgaaaaggaatcctataatatgatttatcaggtgctacaaaatgttagattacaagcatctttcctggaaaatcttctcgaggttcttcccatcgatttgcgagtggtgagggaaatcgaatggcatttccaccggagaaaaccaggcttcgctgaaaactcgggtgacctcttgatgtaccacagcattgccatctggtgtcaggtgcaaaccatcactgtaatgaagaaaaaagcacacattagttgtacatccatctagtttcatcagaatagaactatacaaatttttcattatggtgataaatacaactgagtattacaaagggagtaaggatgcttggagaactaatgcaaggaatttgagtgagagattgaccctgtcgacgattaagaaaggaatacaaaccttaggaatttcttcttccaaccttctgtttcctgcatcttggtccatagatcgatgtagcgaattcccatttctttagctagttcaacacactgctttgcatagactcctgttacttcatttgtcctctcaggtaattccctagcattttcgccgtataaagatctgttaaacccaaaagcagcaacttagttcttttctttttaaaaaaattgaatctgtaaagcataagagtttccaaaatagttcagtgatttctggacaaattaaagggtaattcattcagggaacaaaatataacacaacctgagaaaagtgaaaaggaaaagaaacaattactgcaggccctgaagctgtattggtgttaatactagcctgtgagttaagacagaattatggtggttgagtagaggtacaaacaaagctcgaaaacagcatgacagaccaacttaaggttagcattggcagatgtgaaactacacataagttgatggacccgaaaaaagaagatatggaaggcatgacattcagcagcattggcacgagtgataaagcagcaacactacaaaaaatgtacctcgcaaagtcatctcgcccttcctcatcaacaggaggtggagtaataagcacaatcaacacagttggggagcattcctgcaatcaaaattactggccaaagtgagaagaagaaagtcatgctgttatcacctacaaaccacatttgcagtgcatgaaaacacaaacaaaaaaagaaaaaaaaatcatatagttcattgaactcagtagtcagtaggtgcaaactacattttcattggcacagaaagctagaaatggtttttacttctgcccttttacataataaagctaaaataaaatctaaaacacttaagtttgtaaaggaatcaaggaacagaatctgaaccttcaaatgaagaactatttttctgagattctccttgtactcatcaattggaacatgttgtcgttcacttgtccttcctaagatagctgcatcattggcaccaaagaaaattgtgactgcggcgggaggctttgcaacattctgaaaaagaaccagtcttatttatttcttttgtctcaatttatttaattgaaaagtcttaacttaatcttaagtatcaccatggcaaagtaaaataacaattgacacaaaataaccaccaagaactgtactattttcccaaaaaatttgcaaccacagcctagtatgcatatcaataaattgtgtacatcaatcctgtcaatactaatcatcaaagtttaaattctataataaaaagtaaaaacttcacatcctaattccaagcattgcattaaaaaatgcctcatcaacaaaaacccattgtacatgtacaaaatcctaatttgctgccataaatgcatgattgttacaagagggtgtaccatcccataaataaatccaagaatgaattaaaaaaaaggaccattcaccaactcaaagatcaaatccaaacattcatggagtactagtgtatagagagcttaccagtgggaatagatgatgcagcaaaaacaaagcccatctggtgttgtaaccaccatatccacgaactaatacatcagcctataaacaaccccaacacaccaaaatcaaaactttaacaaataattgaaaatcaaaattgtgggtcattcttgttttgtcttgtttttcccagattaaatgggcaaaaagaaaaag

SEQ ID NO: 186009 - DNA, 4990 bp, Cannabis indica
cgatgtttattaataatatactctctaataaaaaaaaaaaaactatgatcttagtaaatattaatgtatatatataaaataaaaaataattttaatgctaaaatctaaccaattagtcaaaagccacctctttagtagtcacgtgccatgtaggaggtagttcacttttgtggttgtttgttgtccattgattaaaggagcacattttcattgctaatattattattagtttttttttctagaagtcaaaacataccatagatttgtcttaattaacttaccttaaatattggtttaggggattagtatctttgacatgtcaattataaactaaattttaaataataatataataccatataagtttggtacttgatttttttttctaattaaaaggggatcacgtgatgcaggtttattctccatatttcaattattttaacaatctcgaaaatcacatgtcaccttatgcactagttttttttaattatttcatagagatgtttaaggaatatcacaaattttttttttatattatattatatgagacatgttctttgagaagcaaagtaaacttcattttttttatgagacatgttctttgagaagcaaagtaaaaaaaaaaaaaaactcacccaactcttcatgtttgacaagctagttttgggcaacaccaatcttattatggatgagaaccaatacaatattataaaattttgagaagtagaaacttaagcatatcaatatcttataatatttactaattctatgaattatgccaattctaattttaatttgcagactagattaatatactgtcaaaatatataaataacaaacaaccatagctaaccatattgccttagaatatgtttggtttaatggaatgagaattgcaataaaatcattattaccattacattgtttgttttcttttaactttgtaatgactttacaatgtaatgatcattacattatatattataatccccattacattataaaacataattagacaaaacatgtttttacttttatttaactttaaataataaaaataataaaattaaaaatatgttttgtcaatatactttttactttattcaattacaatgctcattacaatgttaaaccaaacatcataatactattcccattacaattcttattctattatattactatttatattaccattaccattcctattacattacatcaacttatcacacacatacatggcattttaacacttgataattcaacaagtgagacattttgtgtgataataataatattcttactattattagagaacaaccattgtatcatgggataatggtccagccaagagtgatgggttacatttttaccagctttaattatatgacagaataagtgagaagggaatgactaaagtcatcaactttcttaaagttgggtgaaaaggattttggttttggaccacattattaatattaatagcaaatttataatctttaaaggaggtttgaaatttgagattggattgtgtatttgaaagctatacaaatcacagacaatatgttcaccacacaaatataaactctttacatgtgaaagcaaaacttattccaatgaaaaataaatcaaagttactgattatttattgtgaatgaaaaagaaggaaaagcaagtagtcttcataatttcttcttcccccaaatgataagcaaacttgtctttgatagatacatacatgtacaccagagtctgtatctatgctattttttttaactaccaaaataatcaaatatctcacataacaaataacaaagtgtaaagtaaaagagaaagaatgcacaattataaaatacacatatatgcattggaaagagttgtagatgttaaattcaatttacaatgcagatgatgatgatgtcagcatgtacacctgtgttagactagataacagtaacactcaacaggtatatctacaatatctcattgtacttacttatccacaatagcttatacagtttcgattactctagtaatgagctccatagaaacgcagcaacttcagttgtttcaccttttcctatgatgatcaagagaagaggaagaagtataaataacaatgagtactactagcactagctttcatttcgaaaggaaatattgctaaggatattgagaaagacctgtagcttttcttcagattgagatgggaaatgaaaccctgttgagcagtttttcatacttcgggactcgttcatccatgctcggcgtgcatcgctcacttttatcttgtacttgaacatctgaaagtaaagatcatcatcttaagagtcaacaaaaaaattctttaccacctagatttcggtttttgattatttatatcagagtaaggcggatattaatagatggaaggtgtacaaactacaaacctttgaaagaggaactgttggtttctcatcatggttatcgatgagcgctccagtcccctggcactccggacagaatacagaatgaatttgaggccttagagctttcatatcaccatcgttttgtatttcgttgttcttagctgcagtttttctccgagatctccgtttaacttttacactatctggctgatttgtgagcatttcaagttcacatagaagaacccaatgtatgaggcaggaagtatgaaataaatggaaggcctgcatgcatataagtcaaaccaaaataagaaaatagctgactttgaaaaaaactcggctccacttgagacctagattttggtgatataaaaaagttaagggcaaatgaaaagttgaaagaatgaggaagctattttcctaaagaaccataaaatttcctgttgaaatatgtatctttcccatcaatgtgtggtgattctaaaaactccaaaacacattacattttccttccacaatgtttatccctcatgttttatcaagtctaatcacaagaaaatggtttatgttctttctctcaatgaaatccaagctccaaacagactcaacagatcctaccagtaataacaaatgcatagtagaagaagtaattatagtgatgactagaaagaaacatatatgagttgtttggtaagtagacttaccccattcacgtttcgactactgcaagcaagccttccagtcttcacattcatgagtgttgctacatcttttccaggaagcatcttatgttggcaaatatcacacattctttcagaagctaagcgtcgttgtcgcctcaattctcgccttacagccttgttagaaataaatctagtttgcagaagctgatcatctaacattaaacttgatactgcagaagctgaagaatcttccccacctgaatcataatgattactcacattatcactaacatcctcaggatcagaaaatgatttcctttttttactgccttcagcattttgactttcggatgacggactcgagcagagcaatgctcttacctcatcaagaaaacccattctacctaaatttaaattgttataactaaaggtaacaatagcaaagtcatgctcaggaacaatgaatgaaccctcgttcactagattattttttcccaaccactcgcaccatatcctggttagctcctctgacatgctacccgtctcctgaaatcttgcagcaactagtccgtaacccacttccctcacttttacatttgtaatttcatttccaactcgaacacaagggatcgaaactgcacaattatccccagattcagtcagattctctgaagaggaattcaagttaacatctgaatcaatgactgcataatctagatcctcattttgatgtacaaaatgatcattcctagatttcttattagcaaggttttctgtattttcatcataactaactatagctagactgtccccattgtcttgagactccaacaacctattttggtttccatttccatttgtaattgtcatctgttctcctttctcgatcgaattatcaaagaaaacaacaccatcattaaacggccacgggtttggtctcaagagagtagccttagcagtagacaacctctcattatgaagattacccttcaagtgatcaaacagtaccgaatcactgtgacaaggagctaaacacaaagtacagaagaaaatgaacttctttccatcttcgcgaagttcaacatacgtgtgcccttgcgatctcacattacgaagaattgttcttttcgcttggtccttcagattacacaccttaggaacttccaaagcattagatcttggaaaacttaacacaccctttccagccatgcaaaatttcccgccaaaatatataaattcaaatccctttattcctctaactctatccaaggttgaacttcaaattcggatgttgaaaacataaaaagttatcacaagtcgacataatcaacaatccatcattcacaaccagagaaagttcttataaacactcaagtctgtcaaatgtcttaattgaaactcttgaataccaactcctatcaaacttcttgatcaaagacccaattcaccaaccctaaagggttcaatttcacaagaacttccaatacaccctaaaaaagaattttggacactattagtcaataaagtccaacatatgatgaatgaactgcaacctagcaaaatccaaccaaattcaccgtaatctactgaattttttctaaattggtttacaagcaaaaagaagttcataatcttgaaaacaaagattatcttataattgctttaagaaataaattcaacaatattaaacttcaattttcctacatacgcacaagaatcttaactcatttctacattaactaaaatttctaatcaaaacatatacagaaatgaaaaaataagtacccaacaaaattacctgatgccaataaaccggcgaagtggggttgggcggagaacccaaattgagcagcagaagatcgataattgagggcttttgtgagaatttgagaaagcaac

SEQ ID NO: 186010 - DNA, 3598 bp, Cannabis indica
tctcttcccctttcgccatcctctttatccgattccctttcatctaacggcggtgcccgctctccggcaaggctccgccgtctgatttcccccatctcatcattcatctctggtaagtctttatttatttaattattattattattattattgttgttcctgtattgattcatcttattgaaatttttggatatgtttcttaatgttttcttgaaattttgattgattatgtttgtatctatggcctttgtccgctacctttttaattgcattttggtgatctgaaaagggtattgtaaaagaattgactttttttgggtgaaaataaagaagtatatatttttttatatgtatatggaggaataaattatttattcatatattgaaaattttcactttttcgaatgtttttgcctttaaattcttccaatttttaatttgaagagaagccattatacagatgtaggttatatggatgcattttcatgaagctttatttcatataaaatatttgataatttggttactactttgaccataacagttagattcgttttgaatgatttctcaggtgatatctacaactggagattaacaatgcaatcatcagaggccttctcaaacatggcaatgttagccactagccaaagcagagtaaataagagaattaaagcatctcgggttctgcctgtttgattatgatttgttaccacacaagcatttctgtccttgtaattttgccaaactttgagttaggctttcttttaggagtgaagctctctgctgccgctgccaccgccacttctggtgttggaattcgccaattctcctccttgttttatgcatcctgatgtggacaagcttgtacataaccaacaccagatggcgcttgcaactttcaaagttcctcctagaagtgagtactgttggaataagcatttggaaagaaaaccttccataaggagacgtgtatttgtgcaaactgaaagtggatctgtattgggtatagagctagatagcagcgacaatgcccatacggtgaagaggaaactacaagttgcccttaatgtcccaactgatgaaagctcattggtatatggtgatatggtgctgaaggatgatctaagcgcagtgagaaatgattctccgcttcttcttactaggaacttgttgcacagaagctcatctactccatgtatgtcgccaaatgcaagggatctccaacagagggatcaaagtggtcctattgagatattaggttgctcatttcaaaatgctagaactgaagaactagtgatggatattgtgaaggcaataaataatggcattgatccagtccctgtccgtggtggtcttggtggtgcatattactttaaaaacatctatggtgaaaatattgctatcctaaaacctactgatgaggagccctatgcccctaataatccaaaaaggttttgtgggaaaagcacttgggcaaccaggcctcaaacgttcagtgcgagttggagaaacaggttttcgagaagttgcagcataccttctggactatgataattttgctaatgtgccctctactgctcttgttaaggtcacacattcaatatttaatgtcaatgatgaggtcaagggtaatgtgcatcgaaatggtaggcaggttagcaagattgcatctctgcagcagttcatttctcatgattatgatgctagtgatcatgggacatctagcttccctgttgctgctgtgcatagaataggaattctagatattcggattctaaacacagacaggcatgctggtaatcttctggtcaggaagcttgatggggtcggaagttttggacaggtggatcttgttcccattgatcatggtttttctctacctgaatgcttggaggacccgtactttgagtggattcattggccacaggcatcaatcccattctcagaagatgagcttgagtatattgataaacttgaccctttttatgactctgaaatgcttagaatggagctgcccatgattcgagaggcatgtgttcgagtattggttctctgcacaattttcctcaaggaagctgctgttttcggtctttgtcttgctgagattggtgcaatgatgagtagggagtttcggggtctcgaagaggagccaagtgagctcgagctaatctgtatggaagccaggaaactcgtagaggagaagaaaatgcacaaatttgaaacaaagataagagatgaagaagactttcaattcctcatagacagcaaggaacatgatttggatttgatgtcaaatatgaaagagttatcggtaattagaacatgtcattccacatcaaaaggacaaaatgacagaacattactttgtaaactagaggatagtgtggaggagaaagatgaagggtgcgaagaggataaggtgtctccaaggtcagatgaatacactgacattgtgaaggatcacgtgtcaagtgcttcaaaactatcaaagttttcaaaaagcatgaacattgatgggaaaatcaggcgacgcgagggtgcaaatgcaatgcaaaagcctagctatttagctggtccatcgttgcggaacaagagtgtgaatgaacagcttcctgtgagtagtagttttgtgaagctagcagatttgaatgaagaagattggatgcagtttcttgatgactttcggggactgctttgcccggcctttgctaatagaaaaactgggagctttggtcagaggcagagacagagacttggaacctcattctagatttgaaagttgatgtagtatcggataaagtaagtacagacttataaagacttgtaaattgtggtagccagagtctgtagtttgtaccctttaggcgtgtatagggttttcctgcaagagatatggatgacaacattaggagttggatactattgggaattatactaagccacatgacaatagtttgtgtctgttggctagtggagatgaaaactttgttttcttttttacccttttttcgttcaaccagtgctgtcatcagcagttagattacgttggaataaggctgaaaagagggaatgccaccccccaaaaaaaatgaagtatatatatgtatatattgtaatgttgttggagatgctatgtatgtatgtatgtatatgagagcctctatggtttttttatgtctcttttgcaatctgtttgtgtcttgtgccatgttcctaccctatgcttgcatgtcataaaactttaatatggataaattttaatatccaattggctatcaatctagttttctttgtttatgttcttgggattgataatgtcttatgggttgtattgtatggtagcagattcaggctaattaatttactgtcactgatcttttgtgctcattcattcatccatttcaagcttacataaaataaataatgcttacagatttattatatttggatttttattattatccaaaaggttgtcaaactaatggttttgcaggtccaactgtcatctgtctatatatagtgttttatttttgggaaagatagttattactgttgggattggttttagttgagaaatgatggaactgccaatatctca

SEQ ID NO: 186011 - DNA, 2209 bp, Cannabis indica
ttatccatcatcactattccacacccgcaatgttttacccactctcgtaacctttcaccctaaattcacgcgcttttctgccaacaatttcacggcgttgacattcatacaaaactaaagcgcgtggatcactaaatcatgttccccacgaaaaagaaaatttaaaatttcattctatctggatggatcagattctttttccaccgtccgattgattaaatatcttactctttcaaaattaagtctgcagattctaacaatcgtcaccgacaccttcttctacgtctctctattttctaggttccgagaaaatacgaaagaaaacaaaatccatgattatattttgaaaccattttaaattaattttaaaatgtggatgaaggtggtagatgagttagtacgatgaatgactcatttcagctaacttaattctttatttccttttaaaccaatttaatagtcgaattagaagaattcaaatgactttttctctattgtttttttctcacttaccaaacagaatgattcggtgaaaaaaaaaaaacagttatcgtcaaaaccgtacttaccgcgtcccaaactcaagtttcttttaaatataatttaatttacaataataaaaaaaaactatgtaataatggaaaaacataattacaatttcccgttttgaaatcatcaatcgtctcttagccggacgacaacgacgtcgttttcgaaaacgatgacttggttgaatttgcgcaaaacttagaactctgagactgcattttacccaaaacgaaatggcccaaagaatcgattttctcaaccaaattctcatcgcagagaaactcttcactgaaaaccttttctacctgtctctcaaaatcatgaacaaacacatgggttttcgctgcaccgtctgttttactcctggccagaattccggcagtgaatattgccgacatccggccaggtgccgccgggaaatagcctcttggtccatcaacgagaataacatcccatgggacttggtatatgtggttgggcaaatcgttaatacccagtttacaatctgagaagagaaggttctgaacagggcggcactcatcacgagcctgagatttggccgccgcgagtagggtcgacgagtccttgaccttagtggtgtattgaacgtcgtaggcttcgattcccgggtgagactgttcgaatttcgagactagaaactcgctctcgtcgaggaggacagtacggccgttgtggttcagggcttgccagagaagtgattcgtgggttagaccgaagacgagaaagttgcagccggagggtgttccgccacagtggcgtagtgcggtagctacggcgttaatctcggcggaagtcatggctggtccgaagccagatgtgttggacatggcagcgtagtgaagtaacgcgtcggcgacggcacgtgggagaggggcagttgaatcgaggccggggaaggaggaagatgaggcgtggttgcggagtgcagcaccggtggggatggtggaattgaaaagggttatagtgaatgctaaagtgaagaaggttacgaagaagatgagccagagtcggtgggaaccggcggtaggggtttgcttggcatggatggaagggtggagtagtatgagcttggtgttgttggcattggtcttcatttttggttagactgagagaaagagagaaagagaaaggaagagatagcgcctatagaaggaaggaggtgcttaaagttttatgaagaattgaattgaattgtttaaagtttgaagagagagagtccccccaactctgatgtttctctttctccctcttattttttattttatttttttatataaatattataaatgggagggattttgcttttatttacttgaattttgttagtaagtaatagaatctgaaatttaattatactaatagcattatgacactgaagaagatattaagtactagtgatattttttatcatttcttatcttttataatgagtgtcattggttaacaacattctttagagactttttttattttttacactttaaaatattttttttttataattttacagaattttacgtagaaacctgtattgcaactaacggagcaacttaaatcgcaatcaaaatcgtatacgaattcacatcgaaatcactctaaaaacccaaaccgtgaatttaaaaaaaaataatatataaga

SEQ ID NO: 186012 - DNA, 8750 bp, Cannabis indica
cctataaccgatcatgagtgcttactaccatgggttagaatttgggtgctttctcgaattgcttgtgtttagtctttgcagttaataatcatggcattcatttcaatgagtttaatattatacttaatgatattattcatatttggaagtgttttattagtatttttatttattttattgtaaaaaatctaaaaatttcagtttagatgaatcaagtgtttggtggtcaggtttttttatgaatttagttgtttaaattttaaagttcttttataattgactattttttggctttatgcctcgtaatagaattaattcattttgaaaaaaatgtgaggacaataagtgtcagtctatcttgagcattcatacaccagtgcccatcgtatgtaactcacctcagagggtcatgacaaacattcgtgagcgggagtttaagttttcatggattctcctagagagaagagtcacaccagatatatgaaaggccaatccacaccatagtgccatataaagaaattattaatgattatctttgatcttcatgatgagcacatccaaaccaagtcacccaaattagaggatatgaaaaactatgtatcaaaattcatcttcttaacaaattatattttgttagctcataacaacggttaaaccttagacaacacaaccgatcgattaacacccctacccgctcaacattacatttggctttgttgaacatccttgttattacacacaacaataccaacttagcaattgccttattgctaactacaagtgaagtgattcttgctcagagagctttagattgagaacatctgaaactaggaacatacaaaattcatacctcaaaaccaatatttctgcaaataataagatgaataatgacaagaagtccatgcaactcattcaagaacagaaaataaaaaaaaccaaagaatataatgtttacataatctgcaggtactgcaaaagctcgggagaaaagcgagaagtacgggtaaaatcataacaactcgtcttgtcatgtgctatttaaactcatgaaatgagaacagatattgcttttcacagttcttatccaagggcaaagcatcccttactgattttattattaccatagaaacacgagcagagatatccagtataactaggaggcgaggcgatattcttatctggtccaccagtggaggaaatctttgcgcctaccgatcttcttctgtaactgaaggagtccataaagtagagcttcagcagtgggagggcaacctggaacataaatgtcaacagggacgatcctatcgcaaccccgaacaacagcatacgagtagtggtagtatccaccaccgtttgcacaacttcccatggagataacccacctaggctcaggcatttggtcgtagaccctgcaaaacaatatttagaacatgttggtaaaactaaatgtagagattgattttatatatcaggagaggaaataaaatcaagattggataaacgaatagttaagacattatccaaattgaaattgcaactgaaaattcgttaacatttctgtgcataagaaatcaacaagaatcgtttacaacctccaacagggaacatgcttcaatgaaattcaaacttaggcaaaaaaaatacatgcataaatttgcactttacatatatgcatacatggggaaaaaggggtgcataaaatagagggagtgctattaaggaaaaagctcaaagtggcaatttatgaaggaaagttttgtagctaacatagtacataaatatcacgaaaaaatatatgttgatatgaacaggaaaaagaagtgcaaagtacttcatttggaagtgacaaaatgtaggtgcaaagttaaagaacttcatgtcaacaagaaggtaaagttgtctatcactaaatatctccttagaagaaatcaaatccattgtaaaacaataaatataaacagcttgtcagccagaaaatgataagcacacattcctttacacacgcaaatatcttgcacaaaaaaatccctaaatgcataaattttcagaaatctctcaagttccattgccggactaagtttcaaccttactacatcactaactcataatttactcgacgacaacttgtagtattctcaaatccgtttctaattaattgccgcttctaattaacaactacaagaaactttcaacttcttccattcaattctaacttacaactgaagtatctgtttacaaatacaaaaaactttcaccttgattgaaatggtcatactttcaactggtcctatataaattatagatatagacttcacattgaattacactcttttattgattgtacatttagattattcataatagtatgaatcaaagtacaagtttaaaagatttaccaccaatccagcaacaaaattggattagtaagttcaataacatccacaaaaaagcaacaacaaaaaatgtccatctaaaatttcaaaatgtcctacattgcaaaactttgattatataagtcaaatagcataggtctgcatttcttctatccaccaatctaacaagccaagaaaaaataaagtttcaatcgtgcaaactatgaaggacacatctgaaaattgagactttaacaaataaagtaactgtaaatacctatattaatatacactcaaaagaaagtaatttatgccaagcttgctcaattcaagtcatgaaatcgattaggatcaaatatatttttgaaacagagttactttctgcaccggctaccaaatcagaaacttaaatcgttaaataatccataagaaataatgccttggatccaattgaaaacatttatctaaatccttagaaggagattttttttttttttgcaaaggaaaaccaaggaattatgcattttcttcaaactcgatccccattttcaccaacacaatcttttttactcagaatcacaataccttcaaatgaacaagtcatcaagatctttatcaaaccctagctccctaaaatcgaacaatttttttattttttttcttctaattcgataccaatattcacaaagccaatctatttattcacaatcacatgaaaaacacaaaataatttactggtatcgtaatcaaatccaaatccctagaacgaatagaattcacgaacaaaagggggcttacttgcgaagagcaggggccatcttattggtgagagtaccagcaacgatcatacaatcggactgcctagggctaggtctgaagataataccaaatctatccaaatcgtaacgagcagcaccagtatgcatcatctcaacggcgcaacaagcgagcccgaacgtcatgggccagatggagccacgccgagcccagttcatcagatcgtcgaccttcgagatcacgaactccgcagccttagacaccccggccggcgacgtggccgaaggaggaggagctcgtgcataagtggtgggagcgctgctggttccggtggaggagagagaaggtactgtggtgtgaagagctatggctcgctgagccgagccgagctggaaaggaatccgatgagccgaggttcgagcgagatgagccatggcgcttttgctggctttgcccttttgccgcgccaatggtgagatgtttaataaccagaaacacgaaccaagtttgaagaagaagttttaaaacgacaataaagttaaacgccattttggtgtcgtttttgtatctctgtaatttcttgtcatttttcactttcttttatttattgtcgtttaattgtataaatgtcgtttttagtttcggtgatttgttgtcgttttcactttcttttatttattgtcgtctaactgtatatatgtcgttttttagcttcttttttatttattgtcgtttaactatatatgtcgttttcaacttccgtaatttgttgtcgttttataccttcttttttgcttattgtcgtttagatatctttatgtcgttttttgcttcctattttgatgtcgttttctgcttcttaatttaatacttttttttttttgctggaagtcattttctgcttattaattcaatgtcgttttcaacttcttaatttattgtcatttttttcaacgttttaatttcttgtcgtttaaaaatatttgccctttttcttaaatttagcttagtacaatcattaatttcattttggcctttatttttttttcaggaatatttcatttttgtcttgattttaaaatactttatatgacattccatattttcttggtcatttatagatttttgttctctaataaaaaagtgagaatacatatataaaaaataataaatttaagaacaaatatatattttggatctccaactattgcatatataccagattatgttattaaaatatgtatatgatatttcaaaaaaaaattagatgtatcctatattcagacctagctcgtcttatcctaaatctaactctcatctcaattcatcttgttctccctcttgccttcaccctcatctaaaccatttttttaaaaattagttcctaagctttggtaatagtgtagggtcatagaaagttagaccaaattggtttaaaatattaatgcacaaataagctttacatttaattaagcataattccaaactataaaggaaaattgtgttacattccatccatttgtcttctcattctattccttgtcaaatcccatccaattctcttgtcaaaattgtgttctatcccattcatttctatttaccggtggaatggaagatgattctctatagtctataccatctattttttaagtgttctgtggccaggcaatgttggttggacagtcgttggggtatttgaagtgatatgttggcttttaactctccctttgatttggttatctctgtctgttaactctccaaccttatttatctctgtttcctaccttggacatgttttttcatgtcgaaacactaaactggtttttagtaatggttttatgaagttttccttagcaaaaacaaaaaccatgtatcactttcttttacttctaccaaccttaaagttattattagtatatgaaaatgcaatgaaaaatatgcaaaatgtagcaagaaaatgatagtaataatcatatcattttattcaacaaaaagtacattaggcttcaacatatgatgtttcttcaccttgtggagatgggcaagctgctaacaaatagagtaactaaacacttaactaaaccccccaaaaaacaaaactaattaattaataataaaaagaagaaaatataaaaagaaaaccccacaattcttggtttccaagagaattgactgttgaaagaatgatttgtatgagaaccccactttctacttcaatcccaaaggattgagaagatggcaaagatcataacaaatcagcaaattctgaaagagtggaaagaatggttagaacttagaccgatcgcatcgaaggatgatggaaataacaaatgaaaaacaataatcatgataaaaatttcgaaacccttatactaaatccaaataatacaaagttgatgaaggcctaagaagtatcagtgagaattgaagcaccagagagcaactacttctgccagtcagtccctccctcctctgtctgattttcgactttagtaacaataagcggtaagagttctgcaatcttgaaacggctgattttgttgggtcggaggacttgggagaaataggcttttcggtttcttcctcaaaaattttacatatgagaaaatggtatcctgacctagggaagttagtcttagtgaatagtggggttcgggtaatttggcagcttccacgtcgttaataagggaaggaagacggtaagtaagtaaccagccaggccttgtccaaaaagctctcttcgagcaaaaaagtacagctttccagagaccatatctatgcgtaatacatgtaaaggctatttgaagcagcacaggcaagtgagttttcggttggatgccaagcaagatggagcaactttgttgtgaaatcgaaaccatttccgtttgcatcagttccagaggtatccgcacctttgtggataaacaagtcagttaagagacaaaatgggatgaaaattaaaagttagctaaaaagtgggcaagacatacctcgccgcagaactcggggaaggctgcccagtgatcttgcaggccttgttggattttggacttgtctcctgagaaccatgaaaacataatgtcatatgtaaacactaaatggtaaatagttcttctgacactaatcatgaaattgtcattatatacatattcagaaaatacctcgtcgggtttttgctggcttccaatgttgtagcttctgtgctaccttcagaacaaccaaacacacggaaaagattgctggaataacataatgaaacgattcagaacatgttgcctgacaaatatacatttacacagtatcataatacatctatgtatgtaaagcagacctgtaggaacctgttgccactcggcgtccatctccacttagacaacactcaaatttatcgaagatggaatcattttcgtataagtcacacaactggccaagacaaataactaagataagtaatgtttgtctcatcataaataatctaacatcaagactttcggaaggaatacattaccctgggccttaagtattcatgaacctggaaagttgcaactggaccagaatccatatttatgtcccaaagctgggtaacaaaaaaaatgtgagtgagcattatgatcctccaaaatttcttttatgtattgatataattgtactgtgtatttctaaggaaataaacaaaaatcattacctttaaggtcatgtagtcacgactgagaatatgccttccatccttggcaaacttaatatccgagatggaagctataatctcagtgaaaaaagacctagaaccaggggtttcctgttcctcgaatctgtatcatcagtgggtgataatttcataaatcaagaagtgacgagaaaaagaaaaacgagaagcagggtgacaaactgagcttacagtttactgtgagtgtcacataaagccgactgcctcatatcaatgaggcggactgagcctttagagctactatatgctaacatatggcaatgagtagggtgaaattctgctgacgtgatcacctctgcacatataaagtcagaaacacgtatgtttgcgaagatggaaaagtagcactgaatgaaaattgcaaatatggcacaaaataaagagtactacaaaaatagaatgttccaagcatctaatgcaccgaaagaatcagattcaaacaatgataaagaaccagaaagagcattgctttcttctatgctataagagctcattgtacaaaactcataaagcaacagttagaaaaagaaaaagtagacagagcatgcatttataattcaaagtgtcgtgttcctagttcctaccagttagatcttccatgtttgcaggcttcacgtcaacgatattaaaactttgactgctaatttctaagttccaaaggttaattcggaggtcatcagctgagataaaagtttcaccgtcactacaaaaaagacaggaaaaatacatattaaataaggcaaatgtcataaataagtaagcagcaaaagaagaccaaattgtatcccatgaatacaaagaatccacattaaagctacactattgaaaaggaactcaaataggcatatatgtaataatcaaagagggaaagaaacatataaggtcaaattaaaatggaggcttgaattcataaaataaaaggtgcacctgttatttgaaattgaattgatatgatagtcatgagcatgggcatagactcttcgacatctagccattagacttgtctcgtgagtcacctgaatgccacaaatgcaacaaaatgttaaaagcaaaacaatacatagcaacatgcatcagaacatggaaaaaaaaatctacatagaactagcaaaggaacaactagtagcttcagttatgactgatactttctaaataccaaaatcttatgcttcaataaatatataagttggtttgaatacaactaccgtgggtaatttcagggatgggaaacccccagatggaaaagtatcattgcttggataactggtggttctctctttagatcctccattgggaagagaacttttggagcctgttaaaacactgccaccaacaggaccatttcccatagccttcgaaggatccaaattcatttcacatactttcttaaccttcttctcctgaacctgttgaaaataaatgcaaaaacagtaaaatgctgtttttataattaactcaatttatattaaaagaatgaatgtataattagcaaattcaatactcttcgtgtgcaggtgccttcactgagatgctagcatttgttaagataattctcaacttcaaccggtgttttgatttcgatataacacataatttacaagcatcaacttcatcccacattaatgaactgagtacattgaatgggagtgagacaattctttacaaaaatccttatccaattttttttcttgtatgactttgttattgtccaacgttcctaacttaaatataaattaacaataattttggttgtatgatttatacatcatagccttgaaaagtaaatattaatagaaaatgcaggtatttgaaggaagtaagacataaaactttgacaaaaatagctcagaccctagctctaccttccagtattttat

SEQ ID NO: 186013 - DNA, 4514 bp, Cannabis indica
ttttcagttatcaacaaatgatagttatgtctccttttttgtgtgcgtgcagcttgcgtttgcttttgttgtatacccgtgtttggttgtacaatacatgggtcaggctgcatacttgtccaaaaacccagataagattcattacagcttttataattcgatccccggttagtattccctggcattgttgttaatattatttccagaattacattttagcatttgaattgctctaattgttctttctttttcgcctaaactgcagaatctgtatattggccggtgtttattgtcgccaccttagcagctattgttggcagtcaggctgttataactgctacgttctccatcatcaagcaatgccatgcccttggttgctttccaagagtcaaagttgttcacacctcaaaacacatatatggccaaatctacatcccagaaataaactggatactcatgatccttactcttgccataaccatcggatttcaggatacaaatttaattgggaatgcttacggtaagatgttcattgctaaataaattaagatagattttttttgttttctacatgactaatttttcgcttcgatttgcaggacttgcttgcatgacggttatgtttatcacaacattccttatgtcacttgtcataatctttgtttggcaaaaaacaatgtggctagcagcagcgtttcttcttttcttctggctaatagagggcgtttatttatcggccgcattcataaaagtgcctcagggaggatgggtaccgatcgctctatcattattcttcatggccattatgtatgtctggcattatggaacaagaagaaagtataactttgatctgcacaacaaagtttcactgaagtggttacttggtttaggccctagccttggtattgttcgcgtgcctggaataggcctcatctactcagaattagcaacaggagtaccggcaatattctctcactttgtaactaacctcccagcattccataacgtgttagtttttgtttgtgtgaagtcagttccagttccatatgtttcgcctgaggaaagattcctcattggtcgggtttgtcctagaccatatcgcatgtacagatgcattgtcaggtacggttacaaggacatacaacgagatgatggtgacttcgagaaccaactaatacagagcatagcagagttcatccaaatggaagcagtggaaccacaattgtcggggtcagaaacttcatcgttggatgggagaatggctgttataagcacccgaacaaactcaagcttggtagtgtctcaatatgaggacattgatgggattgattccattcaaagcagcaaatctcttaccttacaaagtttaagatcagtctacgatgacgataacccccagttgaggaggcgtcaagtaaggtttcagttgccaccctcaacacccggtatggatcctgcagtgaaagacgagctttatgatttaatccaggctaaggacgccggggtcgcctacataatgggacattcatatgttaaggctagaagaacatcatcatttgtgaaaaaacttgtgattgatattggatattcatttctaaggaagaattgcagaggaccagctgtggcacttaatattccacacatcagtcttattgaagttggcatgatttactatgtctaagtctagattttttgtttctaatttgtaggtttcagttctaaagccaaaagggttattatatatatagctctttggaccaacttttgttaagtctgaaggctttcttaggctcttctaatgtgtatagataaagtccaaattcaagtcgagctttttcatttggcatatcaattctaataagctattttttttctcaataacccttctcatatttttatttgaaatttttacacaaatacttaaaaattactttttatatatataaatatataatgtgtaatcatgaaaaaagctttctatttcttgtgagtaaaggaacacaaattcatttgttttgcagccttttggcgtgtgtgtttggtaaatgtcaaagtgttttgattgttgactaacacctcagatagcaaaagggtttgtttggttgcagcttcacctatctagactaacaagcccttatcacaataatgtcaactaggtcagctaattaagtacaaaagttcatgcatgaaaggataattgtgtgcattaaagttagatcacctacttttaaaacattctaatatcataatattttgtcaaaactcaagcatgcaatatgcatatgtatatgtttatgtatatagctatcaccacatatgaatattgaacttaagaggtacaatattactaattttttggttgtttgaaaacaaggatgaagatgagaataggtttgggaggaaggagatgttatacgttaacattgttgttgattcttcttcttgtgatgttggtggtgcatgctagtggtaaagatgggcaaggtgagcaaagtggccaagatgggcaaaacaaccaaggtggtcgaaatggacaaagtggccaaggtaggcaagacaagcaaaatggccaacatggtcaaaatggacaaggtcagcaaaatggacaaaatggacgaaatagtcaagggggacaaaatgaacgagatgatcaaaatgagcaaggtgggcaaaatggacaaaaaggtcaaggcggacagaacaggcaaggtaggcaaaatgatcagaatgggcaaggagggcaaaatggagaagatgatcaaaatgacaatggtgagcaagatggacaaaatggtcaaggcggacaaaaaggacaaggtgggcaaggcggacaaaatggacaagggcaaaatggtcagagcgggcaaaatggacaaggaaatcaaaatagcaaaggtgggcaaaatggacaaggtaatcaaaatggtcaaggcgaacaaaatggacaaggtaatcaaaatggtcaaggcgaacaaaatggacaaggtaatcaaaatgaccacggtgggcaaaatggacaaggtaaccaaaataatcaaggtaatcagaatggtcaaggcggacaaaacagacaaggtgatcaaaataatcagggtgggcaaaatggacaaggcgatcaaaacaatgagggcacacaaaatggacaaggtaatcaaaatggtcaaggggggcagaatggacaaggtgatcaaaacaaccagaatggacaaaacggccaacgcaaccaaaatggtcaaggtggacaaaatgggcaagacaaccaaaatgatcaaaacggacaaaatggacaatggaatcaaaatggtcaagacagacaaaatggacaaggtaatcaaaataatcaaggtgggcaaaacggacaaagtgatcaaaacaaccaaggtgcacaaaatggacaaggtgatcaaaatggtcagagtggtcaagggggacaaagcagtcaaggtgggcaaaatggtcaaggtaatcaaaacagacaaaatgatcaaggcggacaaaatgttgcaccccctcctacagaaggagataacactggaaattgcttaagtgagctagtcccttgcctaaactacatgaatgagatgaaaggaaatggaagaccacctaaaagttgttgtgatcctttgaaatcaatgataaagagaccagattgcttgtgtagtttgatgagcaccaaaggtagcatgcaagctgagaaagctggtattaacttgactatagctcaagagttacctgctcaatgtggacaacgtgtcaacccactctcatgtctatattatcaaaatggtaagtatatcaaaaattatgtacacattgtttatttatatcataaattatagtctcaacctaacctaagtatataataattttttacttacgtgttattatttattgactaataatgtttattataacataatgtgttgcaggttctaaaaactccaatatttcaaattcagcaagtggcttctattcaagtccttctatggctctatttattgtgagcctacatattttcatggcactcaatcaaataatgacttgaacattattagaatgttaatccaatattatatatattgtgaattattattagtattttttttttgttattatgtaatttgatgttttatttacaaaatgtattgtgttgtttatttagttatgattcttaataaaacattttgaaattttctatctcaattaatattgcttactttaattttcgaccttatttacaaactttgatgatgacatgttgggatataatatataaatttttgtaagggtggaatatataatatgtcaagaggaagaataaacttttgttaactataatgtaaaattgagattttttagtgtgaaaaacattcaccaaatattaaaataaagggaaaaaattataatcaggaacattttaaatagaaggatactttaattgcagccattactttttaacattaccaccattgtttaactaagatagtttgtgtgtgttttgttaattttttttt

SEQ ID NO: 186014 - DNA, 6341 bp, Cannabis indica
ctactatgaatatcattattgattaacaataattactgccaaaattagcaaaacagtttcaaattaaccaaggatagatgatgaaattgttaatggatgctagctattttttcattttattattattattattatttttgcattaacatattatgatattaattaaataagaagtgatatatattctctggtggccatcggcggtggtggtggtcgtcaatggcgctttcaagaacatcctcgaagttggggaatgtgaacgtcgttatcgccattaatagggacaaacaaattagccaatctctggtcaaatgggcagtggatcatcttttgcgtggccacaagaaatcaaattgttttattgttcacgtaatcaatcatgatactactcattccagtaagtatccctttcctttatataaatctatatatatatacacacgttgtagtcttatatattataattatttatgcagatactaattcgagtaacaaaggaggtcgctcatctgatgagttgcaacatatctttcttcctttacttggatattgtgctcgaaaaggggtcagttataacttatatatatatgtatgtattataaatatatatatagagagaggtttttaatatatggtgtgtatatatatatatatgttaacgtgcacttcaggttacagcaaaggaagtgatccttcatgatattgatgttccaagtacaatagttgattacattgttaaaaacgacatcaccaacgttgtcgttggtgcttccaatcacaatgctcttataaggttctctctcctagtcctaaccatatggggttttgtatataactctacttattcgattctctatttctctctttctctaaataacaggaaatttaaagaagcagatgtgcccactagcttactcaaaactgcaccacaattctgttctgtatacgttatatcaaaagggaaacctacttctgtgagagcagcaactcaaaccaaaacacccaaaaataatgaaggatccaataatgccaggtaaaattacttccttacatacaatgcataacatatggtggcactaaacaagtttatattgacttttgcttgctatgctgaagtcttgggaatctgattacttctggttctggacaattatctgtggacaagagtaatagaagcaagccaaacagcagggttgatgcatcatcaacagtccaaacgaatttatcggtgcataaaagcgccccatcatttgttagtactgattacacaggcacacacagcttcaattcaccgttgcatagtttccaatcatcaaccacctctaggagtttggactcgtttacaagcttggagagttcaggcgactcttttgtaacacctgtaagtgtagtgtaaatgtaatggtgacataacataagggctagtttatttcttattctataataaaacagcttttcattcaagttcatggcattactcatttgataggatgaattggaagttgagatgcatacactaaaccttcaattaaagcaaactatggatatttacaactcacttcgtgatgaagctaaagaagccaaacaaagggtatgctgatattcatagatgattattatgttataaaactaaatatgattctaaaacctttcacttggggcttgcaggccgatgaagttcaattgaagccattgaatgagcgtagcctacatgaagccaagatggcagaagagactgcaactgcttggcagagatggaaaggcagaagaccaaggctgccactgaagcagctcacattgcagaacggatagcagacatagaaactcagaagagaaaatttgctgaagcaaaatccaacctggaggcagaggagataaactctatgcagggtggtgtccaatataggagatatggcataaaagagattgaaactgcaacagattacttcaaccctgatagaaagattggtgaaggcggttatggacctgtttataaaggatttcttgatcacactgctgttgctattaagatcttgaggccagatatatctcaaggactagtccagttccaacaagaggtaactgaaaaagaaaggcagttttttttattcattttaaaaagaaaaaaagaatagcaaaatctatattttacttgcaggttgaggttctgagcagcataaggcatccaaacatggttctcctagtaggtgcttgccctgatacgggtgccttgtctatgagtacatggacaacggtagcttagacgacaggttgttctgcaaagactacactcgccccattccatggagagatcgcttcagaatcgcagcggaaatcaccactgctcttctcttccttcatcaaagaaagccagagccactggtccaccgtgacctcaagccgggaaacatcctgttagaccgaaactatgtaagcaaaatcagtgatgtaggcctggccaagcttgttcctgcatctgtagctaacactgtcacacaatatcaccagacagcagcagctggtacattttgctacattgatccggagtatcaacaaacaggactattgggtgtgaaatcagatgtgtactcattgggagttatgcttctacagataatcacagcaaggcctcccattggtctgtcctatcaggttgaagagtccattgagcaaggtactttcgctgaagttcttgaccccttagttaaggattggcctgttgaagaggctttgtccttcgcaaaactggcactgcagtgctgtgagatgaggaagagagatagacctgaccttggttcggtcgtgttaccagagctaaatcgtttgcgtaaccttggaatggaggatgggagcaattactagtgatattaacgttgaaactgaagacactgaccctcattgggaaaagtgttcagaggggggctgtttgttatagcaagaagaagactaattgtaaaacttaaaaacttgttatatgtattagtgtgtaaagtctataagatcgtgagataagtaatctgaatgaacattctctcccagtttttggtccaccaaggaacaataaaacagacaaatatcttacaattatagtaacaataaagcttataaacaaaaagacttgacaattgtaagatgacaacaattagaaaatcaagtaaataaatatcttattaaccaatgccttccattaatcatttgtttcaatcataaataaatatctaccggagttgcttgacaacatacaaaatatggtgagctagcctacaatattagtcaatacaagctagttggagtaactatttcccttcgtgaagtaagttgaatctgtcttctgaatctgccaggagcaagtggagcaaactaatttcaatcactcacttatagcaaagtgaaaacatattgttaattcataagtttcttcgttcgaaatctatatgaatatgactgtctcaaagaattttgccttaaacctggcttcctgaggggacaaataggtggttacttgatccattggcaaaaaaagagttacctagttgtgggatattgaagccttgaactgtactgcattgccagttctataaatcaaatgcttttaaataccccgcgtatccaacgcctgtggatagagtttacaatcaagaataaggaaaagaacaaagtggaaagcaaagccatttttgaaggaaagctttaagaagagtgaagatttgaactagtgaaatccatccttacagtggttacaagtttatatttgtcatacagaaagtatcaagagtgaaaaaatagtattgaaacaaaataagaactcaaaatatcttaggcatacggtatgcagccagcatcctaaatgtctggccttgtaaagagaatttaactagagagtttgagagttcagaaatttgtatgaaagaagaatagttaattctccttagaagcaagaacatgtaacgggaaatacctgttcatcgtaacattccgagaacgattgtaaacctctctgcagtatgtgttcatatccacagtgtgaaagccagctcttagaaacaatgttgacaaaaaatcttcagagaagtagaatgagcactgatgaacataaataaaaagctgttataaaatgagatgcacaaaagatttttatagttatacgaaaaacatttgccagaaagtgcaaaatacttacagtaccatctcctcgaacataaaagtcctcaccgatcatcctatcctttttctgtaacttgacctaagatattgaggggcatataagaaatagacaaagttgaaacttgaaacccaccaaagtgatgaaattcaagtcactgaaagaaagaaaaatctttctttttcttctgagcctttgttttttcttcctcccttttgtgtacttatgaatcaaaactaaccatctctaagtaataggatgttgatttcacattagcttactggctgagaaaagagcttcaagtcttaaaacccaacaaaagatttactaaatagataaccatgatagagaggggactaattgaaattaataggttatcagacttccatcctttgattcttcttctcttcttctctaatattaggtgtatttttccctatcattttcttgtacagattaatcatgcataattagaaagagatttatcatctccaagagcaatggtggatgtaaatatgcattagaacactcacttgagcaaaatctccagcagcataatctcgtaatagaacataaccattgggctgcaagaattaaaagccatatagcatttaaattttaggaaagtataataaacttactgggcaaatatttgaacccataacaggtacctttatcactgttttgatgttctccaatatcaaaggcattttacttggagaaactgcagataacatgaaaacctgtggataatctttagtgttcatatacgcagtttacccactccctcatagacagcataacgtttcatgtaattttgcttgtaattaactacttggtcttaccaatgtaacaacatcaactgaaaaggggtcaattttctcacaaagagactcaagtgtaacatcacagacaattgcattaaccctgtcttctatgaaattcacatttgactgcaatcattacagaaaaggtaacaattagcatactcagccggtcaatttgagaaataacagcacatctctaaatgcagagttggaaaaaacaaggcatttgatatgcagattcagtaatacggaaaatagtttaaaaaatgaaaagaaaacataagtaatgattgcttgataattaatatgtttaaggtcagattggatgatagaaacaaaagaacattaacaaagtatttgcaattgtaacactaagatgatcataataacagagaaaagctacaaacaaaccttaacaagctcaattgcatgaggtgagagatcacaggcatgaacataaagattgggaaaggcagccataaggggaaagagggtacttccagacccacatccaacctgccattttcaaaaatatcaaactggacttcgttcaaaagcaaaatcatataatataataaactaactccaaaaggtcaaataactacctccaaaacgaccttttcatttgagcagacttcatcttctgcaaagtaatatctccaatccttctccaaataatgtctatccttgaagaactgccaaaatttacaaattaaacagacccagagagaaaacagagataaatgtattaagagagaaaaaaactttgtcttggtggcgtttgtagaaattgtcccagtatttggtggcatttctttggtagtggtcttcaagagagactttgttatgattcaaacattttaaggccgtcggataagtgtgagtttgcgatcgagtgacggtggtgattaagttagaaaatggaggtgagagtacaatggttggagctacagtagctctcattatgcttttccgttacatctttttatggagaatcctttggttaaatacatacatcgaccacgtttggctaatctacaattagctattgatttttttagtaagaaaaatttaaaataatttaaaaaaatatattttattctcacttttaaatactgaagattaaaaacacagtaataatctctagaactgtaactatcgttgtagtttcttattatctaatattgtcgttttttaaatttaaagtatacaaaacgacttcatcaaaaaaaaaaaaagtatacgaaacgacagcgacttcatttgtcgtttaccagccaaaacgacacgttgcattgcatatgaaacttttgcgcagtgcgccgccacagatagagggatccatcttctcc

SEQ ID NO: 186015 - DNA, 7949 bp, Cannabis indica
ttgctaatgaaagataattaatttattacaatataattcttaaaataatatttttgttagtattgttttcattaatagttaactattaatggtgatttttcatttttataactatcactattattataacatatttaatcattaacctcatacctataaatatgtatatatatatatacctatatatgcttctatttaaaaagagaaattctattattttatatatttgatgatatatttatttctaaactattcatcttctaaatttattttagttattagattttttatttttatttttcaatactcctcatatatataatgcaattgaaatctacaaagataataagttgactctctaaaatttgttaattttagattatttattttgtgattgatctattttatttgtatttcttatttagagttgtaatattcctattttaagctacgtaaatataatgaaatgaagattacagacatatatatataaaatatatataaattgttgggactttttcatttttacacttcaaaacagatttttttttttgcatttttacggaattctacatagaaacatctactgcaactagcgctgcaacttaaattgcaacaaaaaatcgtacagaaattcctattgcaactagcgttgtaaccactttagaaacccaaaccgtaaatttgaaaaaaaaaaaaaaaaaaaaaaaaaaaacctaaagaaaatagtatatgtggtaatttctctaaatagtatttttccttctgaactttttacactattaagttgtgtgtttatagtatatggctcgtaaataatactcctagaaatataaattttgtagtaacgtaatctttccatcacattttatttaaatttatcgtgaaatgaaaaaaaagtgttaagataatatatgatgaatggatgcaaattaaataaccgtgactctttctatgttagtaaataatagaatacaagatttttcttttcttataataatttaaatgtttatttttagttttgtaatcattaaactaaaaatggtgaaattcgtttcataataaacttaaataaaatatgatagaaagagtaaaagttatatttcaagaggtactattaacaaattatatatcataaagggtataacttggtagtgtaagaaattaatttacgacaaaaaacattagtaatcaacacataaactttctcaaaatactcagacaaataaaaaatcacagtattatcatgcaagccaacacaattatcaaaattttgttattcttccctttctttgattctttcgcacctataccatatccactctgatacgattcaaaattagtgagcaaaaaataaccaccatcttgaaaaagaataatgtgaacattgtctcacataaaataaatggtaaagtattgagccaaatatgaactactctatttattaccaattaattttaagatagaattccatgattctcaacactcaaaaataaaaagactgatgggcatgcaaaaccttatgtgtcattttgttattgttgttttattcaatattattcttgtcatgaaaacattatgtcacatttatcagagattatttgcacacactggccacctcaaaacaaatcttttaatttcacttataccaaaattgcttagcaagtttacaaaatgaaaagtgacattgtaatgctaaaactgtcacattcttacctgctaataacagcagttacatatcaatcaaactgtgtctaaattcaaagccatgtgaccagaactaggaagccataccccactggaaatggaaaataaagttttgaatatacatacttgtaataattcagctctgctcattgataggcttttgaagagatccaaacagtaacctcagaaggaacaagtttcacttgtaaccaaattccaattttctctgtacaatttcagtgaccatctataccataccttcgtcggtggcaattgttttcatgagcatcagaacaaaggtaagaaaccacacaagagaagaactatactccctaaggatgaggtgtatattgaaccaaactggcaaaacatgcgttctgtttgtcaaaccgagtatcatgaatgcacatttaggtcaacttgatggttttgcggttgctgtagacacctacattcaggcaaagggtaagtgtaaaccgaggattttctgtttatcttcttcactcttggtactatcattcctttgcggtcactttcagcaagcatagcttccatctcatccttgaaacctctccaactgcaactcaaaatacaacaaaatagattagaagaaaacaaagatgctaggtagctctaaatgtaggagcataagtgcggttgttattaaatcatgatgtcctataatttaatatcaacagtcaggacaatccaaaaataactcagatcatacagatatgtcatgcttttgatccatcactgcatacataaacccaacagagatatatatatatgtatatatatatatagtgtgtgtgtgtgtattataaaaatataaatatatgtgtatgcatttttagaatttttgttcttgcatatcttctatcttcctataggttccatgactcaacaagaccttcctatttaaattctcttttgccatttcagatagtgtcaactagtgttgtgaaaacgggtccggttttttgacatggcatgaaaccgacacgggcacgacccaacacgaaaaaatataagtttggacacaacacggcacgatgctgcaaattggcaagacacggtatgaaaaaaatagacttaagcaaggcacgtagatacatatagactagtccaaaagcacaacacgttaattttttttacaagttgataataataataattatatatatatatatttactaataaatattcaaattctaatcatactaattaatcttttatataactgtataaagtattgttgaaaaattatataaaaacaattgaaactataaaaaatatatataatttagtgattagctcattagttgtaaataatagttaaaaagtggagtccgaattcgagcccatataaaaaaatggactgacccatttataaactacgtgtcaaccagaataaagcacggcatgagctcgagcacggcacgaaaatattgacttacaggctgtactgggcttacatttaaaatgttggcacgacacggcaggatccatatctttttatgagccagcacgacacaacccatatcaagcggacttttcaaaatatgggtcgggcacacgtatttatagctatagtgtcaactgtcaagagcatctagattgtagacctttgttgttataactgacctataatcaatttttaatccattctacaactcaatccagttccagtaagttttatatttaggttcacaagattactactataaaatattttcaccaaataaatataaaactaaaacaaaaagttcaatctaaggaagtaagcagcaacatacctcatatttttatcttgaagcagaacaacaagcttgcgcttatcaggtataatagtctttgcatgtccgccattgtaaaatcttcggtgacccattaaaaaatgtggaaaatttcctccctgagttgttacgaaaaacctcactaagcaagcatgctgtgtagtctaaagcagccaatcttgacgaatatacctacagatcgaaataatcattattaggccagttaaaccaggactaaaataacactaatggtctaatactgcatattcatataactcagtcatgttccctaaattaacctaacacgaattttttttccaaaacaagaccttataggtaattccactctattggaatcaacggtttctgttaaatggtataaaattttattgcaatcctgagtgactaattgagctttccaattatgtctcaaactgggttgaacaaatacattttattttgtgtgagatgcagtttggcaccgagttcatagttgtcctctgaccaagtttcagtttgggtcatatttaactagtgagcgattttgagatgcatttcagtatagatgtgataataagttaaagacaataagcttttagcagtaacaaatagtttgtagatacattaattcaactaatgaaaaagaaactcagcagcagatgatgagcaagatagttttacctgaaaaggaccaagctcatcaggggatacgagagactccttggtgtgcaggtttggaaacatcttcagcagcggagctagatgtttctcttcctggtatattttgcctgaggccaagtaaatggaagtgctgttatcaaatcccataccccgtagcatcattcctacctacactgacaagatattatgcaacagaaggagattattattcacaacattaagaacaatgggaatgaataatactaagctgttcatccatttcaaaactacagactaattggtcctgctaatacctctactggggttaatggacattttccttcaactcgattttgaccaggtgaaatgacacgatctgttcgctggaacttcttcttccatcctttttctctaattgaatccatttcagacatttcagcctctcccccgtcatataaacagcacgagaaggccaccatatcctatttaacaaggaaaaaattataaaaacaaacaattaggctaaaaaataaaaaatctcaaaataattcgggagacaaagtcttcttacctcctcaaagcgaaggtggattgagatgtactttccacctgtccttgagctcttctcagccatacgactgactaatgtctttccaagattcaaaatgggagaccgaaaactttaatgcttcataattagctaggcatcttaagaattgaatctgaggtgggacgttcattgccagtctattagcgaagggggatatccgaataatcctgaacataaaattaaataagatatgaaataaatttcaatgaaaatcaaataaacaaaccaaagttattgtatggtcatttgtcaacaacttggttacacacacagaaatgaaaataaaagggggaaatttatggtttactgcttacccttggctcctcaggacaggataaactacacctgtgtaataaccgacggtagcccaagcttgaacgcggaaagttggtatgttacttatgttgtaatcatatatctccatcacatccagaggtagctctctaaccactttaacatagtccttaagggttgctatgaaatgatcttcatcatatatgtcagcaaacttactgtaaacaaaaattaatagaaatagctgttacaaataaaattgattccccaatgtaagggtgcaacgaaaggtacattttcaaacagcttaagcagctacaaatggattatggaatcataatttttgaatcactgtcatcaagatagctacaaatggcaaatgctaacacttttgctaaatttgacatggtgacaattgcaaaagatgtctctttttatggaaaaatatctcagaaaccatgattttaaggaccatgacacggatcttatgataaaaagtgcatttatgtttatgtttgaagacaatagtcttggccattaagatagttagtagttaccttggatctctccaaacactattgaactcaaaactaggaattactagtattgcgttcaaaagtccagccacggccacagcattgcagatctgtgaaaaaaaattatttaaaaatatgagaaagctgaaatgaaagtaagaaagatgcatgcaaaaatcagaagatcccacaaagcatacatggtcgcctaatgctttattttattaggagtttaggacttttccttagcaattttgttaatgcgttgaaaaagcttaaatatagtttattgaattattttcacacacttaaaacacaggagaggtaaagcaagtgccacaatgtataaaaggttgtatttctgtactaacaaataaacataccgcagatcgttgttggttgagaccaccattagcttcaacaatcaagtagccgctaggacccgaggacactgtaattcaagagaaaattcccaattgaatatacaaaatagtactctttttaagtattagtaatataagtaacttcccatatagataatgatcataactgagtgctgtttccattttttttcttgtgttcaaggtagatgaggcttcattatatccttatgtactttttttgttcctttcttatacatataaaaaaaaaatcatgcagaaagatggagagaaataatgcagagtcaacaattcaagtcaatattggtatgtaccagacagtagtctggcagttgaatttggacaaggtttctgctctttcagtcttcttctgtaactccacacagaggaaagctgcatcaagaaaaatatatttacatcactggcttatcacattgcaaaaataacttgtaaatatcactattaatatcataagccattggaaggaccaaaatgatatttacagttatacagaagaagaccaaccaaagttaaataagtcccagaaaagtcattatttatttacctaagaagagtttgctctatagcaaaattatagtcaccaattattccccagaagtttttttttttttttttgaagtttgcatttttatcatcacctaatcctggaacatttggaaagaaaatctacttgaaagagctcataagaaactatatactaaatttcagaggccaatgtacaaacccaaaagtcctcttttggaacaaaattcaactagcttccacttagtttgcttagacaattttgagtaacacccaactcaatgacttgtactatatgcaatccccaaactgtgttttcagtaaggttatgttccaaatctctaaatgcgaagaaaatttcaaactcaaaaaaccttccttttcttctttcttgttattctttgcccatttcgtaagactaagaataaataaatcaattgattttttaaaaaagaaaaagaagcacacctgaatcccagatgaattatcagactgaatatgattccaaagccttcgaaacatctcatcgctatggtaaaccgaccctggaggaggaggtgactgacccatcagagcagagaagggacccacacacatgatcaacccagagacatagagcatcggcagaacaaacaggtaccgaaggttccaccggaaaatcattccgctggcaaggttcgagtacggcttcgaccggagccttcgacggcaaaatgacagactagaacgacggcgcggtgaaagaggtggacttggcgagttactaccgctctcttcgccggcaccgccattgccattgccgttgccgttgccgttctggtgatgggttttccccttcataatgttgcttttaaacaaaccacactaaactctctctctctcttcgcttggatttcttttgtttaagagagagaaaaggacaatgtccaagaaagaaaaaaaaatggattttgatggcttgggcttcaaatttatcaacactgtacgttgcagctttcatggaagaacttaaaaaaaaagttaaagaagaaattaaataacaaatgacagacaaagaaaatgacaggaagcttggcttggagccgatgatggtgacagtttggtatgtcagctaatgcaagcttccatttttttttaatattaaccaaaatttgatcatatattttattttttctgttttttaaggaataaagtgctttttctttttcttttttgtatttttactgttttttaaaatgtaatatcctagttttccagagcactgtaatctgtcttgtttctttgttttgtttttttatccgttttcttcatattaaacaaattaattaattttatttaactataaatgtttgggaagttaacttctggttaaaaatgtttggaaaattctacaatgcac

SEQ ID NO: 186016 - DNA, 2105 bp, Cannabis indica
tagggcacaaagcccaacacaaatatgatcacactgccatttaactcatcatttacgtgcacatgaagaccattatttgggtcaacaacctcattatggcgcgcaaggtgctcaatctcaattggagctatcaaattagtttgaaaagatttccccccttctcgttggcaaatctccacgatcctctcccttagtttccataatcaaagcctgattggttgactttacagccacatcagcaccaccaccagagcactgatcgagaaaggcttcatctgtttcattaccatcttgtagccattgagagccaatcaagttatttctcctccttgattgatctctcatccaaactccatacagtttgacgtacaatattttcaattggtgtatcaaatagtttaggacagaactttttaaagtggccaattattccacaaataaaacagaacgtggggatatattcgtacttaaattgtgcccgaaaactaagatcctcgatatttctccaaagcttccttctccgtttcgatggggttgtgatatccaatgttacttgaactctcatatagtcccgccaaacattctgaaaattcttagggtcggccttcacaaagtaccaacaaaatttcccatcttctcatcaacactagcacatttaaattccgtttgaagtccacaaatttggacccacatatcaagattgttgataaccaccctcttcggatcctcacctctttttagtcactgaaaaagaaaattgaatacgattaaaagtctaggaacttccttccataacccgctctacatcaatctcataaaaaaattgaaagagataacgacttgtctcaagttccttgacatagacccccttgcctggttgccaaagagacgccatcacatatctcataacctcaaaatcaatggctcttgcagtaagaaaacgacccacaatgcataaatgatcattatgcacctgatcatctggaacaataagatcaacacccaaatccctattgtccttcccttcaatggtaatgtccgcataacgatcttccaccttctaaactaaagaactactcaaagtcatagagacaacgctgaaacaagattaactcagaagaagacaaaacacaagcgacaaaacaatagagactttctcaccatgttaaaagacaagacatgtgtccttataactcttataattgattagtaactttttaaaattattattaaaataaaataaatggggaccaatatttaattggactaacaactatataaagatcaaataaaataataaaataaaaatagattatttttcattagttcattctttgtcaaaaccgaacattgcttacagtaataatgtcttttgaagcaaagctaaagacaaattacttaaaaactgctcaaacataagccacaaattagtgccctttccgattatttttattataaattttaaaaataaaataaaggaaaaagtatgggcccttttctattgctgtccattaaccatccatatcaattttttaataaataaacaaagctaaggtcagtgtcactggttacatatactactattatttactttgttctatatgaatgaactatatttatttcatttttacatggcactagtttaggagtcataacaccaaaaatatggctcttggtcgaaacacggaaaaaatataaccttaaccatgatataacataaaaagctaaaataaataggatatgtaaatacgaatagattaaaacaaaacgatgatattttaagacatcctatattctaatagtaataataataataataaatttatcaaatatatattaataaaatgtagctatataacataatttttgatttatgagaattattgtttttttaaaaaataaaaaaaataacaaattattagatgttaacctaaatataattaatccattaaagtgttgcaattactaataaatttagttctttatttttttttatttaaaattattttcaaattttgatatttaattagaattagttaaattttaaatattatttgaaattaaatttagtatgttttgatagtttaaccagatgagcattttta

SEQ ID NO: 186017 - DNA, 5482 bp, Cannabis indica
aaaaaaaaaaaaagtaagaagaaatgagtgctcaatcagagatagatgcctctctttctctagtccaaatataaattcagcttcattaatttgacccatttgatttgttaagataaggacaactcatatcttgttcactttaaatcccgtgtactttttattctccaacccatttaattataggaaataatcatatatatatatatccatacaaacacatgaaggtaggttacataccagggttgaacaaaggaatatagttattgaagtgaaactgcaaaaggggaagaaacactctgaaaagtgactgagataatgggaagtaaaggaataggagtactactcttcatctttgtcccccaactttgtgtagtagtttttgctttgtcttcctcacctcttcatcaacacaagtcttcaggtatataaatatatgtatgtttaattttcttatttaggatagtttatatataccagagtagtgaaaaaccctctaatataccacaacaaacaagaagctcataatatgaactactacttctagctacctggaaacatatattgagaaaaacagagggtttttttttattattattgttgttttagttatgaattttgaaatttacataatagtttagtatttgaaattgtgtattgattgagacatgtttaacccttacagaacatgccaaattaaaaaatatatatagctaatttttatacttttattgtaatctaatatccaaatatcactttggaaattcaagaagcatggctatacccttgcttttaattatacttaatttcaacatctagaaaaacaatacctttcactactgttcatttttctgaggccaaaattgaagatggtagttgaaaatttatggtactactttttactttcacccacaagttttttttttttttttgggaagttaatggactctagatcatacactttctcttaggtacataaactgtatggtttgtcttcatgggataatcctaccagttgtttattttgtcttaatgtggaaaagaaaatgtccatacagtgaagatagaaagcaaaagatgaatataatagtagtctaatcttattgtctgccactttcctgaatactgcttcaaaaaaatagcagtagggtcccagctccaaatgctgaatctctaaaattatgctataattgtaactagctagcttttttttccatgtgtaaaggttctttatttcaacagagtgcctattattattatctgtttttgcaattattaaaattccttaagcatgactggtattggtgtatacatgtgttgattaagaattatttttaaggcaagaaagcatggaatactttcaattatcagaaaagggaaacttggaatatgttttcccacttaagtctaattctaaggtcagaactaagattgaaaaaagtgcccttacaagttggatgttttgtgtcatagtttgatcaagaacataaatttctcagaagtagtaactgcatcgctatattgctatattgcaagtacttaaagttatatcccccataaggttttttgcaggacaaaaactcaagagggataaatacatatgaacataacatcaagggtacagacagtaagaatgacactagtaaaattgctatagaacacatcaacaagattgctcatggaattagacgtgcaagtactggcgccggtggcagcagcacaggtgccagaccaactaacccaggggaaaatggtgggagaggaacatccactcaaggaggaggaaattacattcccgtgtatgcagctggcgctgcaaacaaccgccatccttatcaccggggagcagccaacagcaaccgaatacaagttcacacccttattgttgcaacaatggcttctctcctacaattatatggggtgttcagatgtggattgaacactaattgaaagcctcagtgactgagtgttctttctctggtatataaaacagtcatgtgattgttttcttttctgctagcaatatgtagttagctttcctgtcatacagcctggattatttgttatgttgaccccaatgcatatgataatacttaaattatcattctgccttgtacatactgagaatgatccgtttctaaaaacaagttgtacatggaaccatcaactaatgcatatgatagtgcttaaattagctttcttactgtgcaattgcagaaagcttgtctgcatttttatagattacatataactactctacaacatgataacatatatggatctatgaagtgagacaaataagtcaggacctggtaacacataattaaaattccaagaattcagcagaggcccagaatgataatgtggtagttgaagcattagagcagaaacttctctatcatgaagaggtacacactgcacacaattatggaaagtacttgtatatgtgtggtggggcagagtgtacaaccaagttttacagccataacacatcttaaggatattttagcacaaatagtccctgagttatccgttttctggcaattcagtttctgataatataatttttggcaatcaagtttttgagttctaaaaacttcagcaactaagtcctagttattctgtaataattttgatatctttctaaatattgtacattggtactcgaattatttttataattccttatcgtatattatttatagaatatccaatagaaaatttcaaaatggaaatattttcaaattctgaaaatgaaaattgttgacattatattgtattaatttttaaaaatttcattcaacagttaagaatttttccaacaaatttaaaatcgttactgcatatactcaagacttgattgccaatttttttttcgtagagactatactgccaaacatgataagacttgggggacatttgtgctaaaaccttttaaaataaatttatcatcaaatttgtactccatgaaggttttcctcttattggattttctatatcaagaatgtaaataccaaagaattgtagtaagacaagggtaaatatatatcactgtaaactattataaatatcatgttcttctggctcttctgctaaattctacaacctttgagaagcagcgaactcaagcaaactgcttaaaacttggtttgtgaaaatgttgactaagtaaataagaatacttgttcaaaaaaatggataagaagacaagaaaaaactgagttcttgttctcttaaaaatttgtgagttgctccagtttacgagcctggaagaatttgcagcgccctttaccacttgattcagtctcttcactctttctcttggatgttgtgacaccatatttgcttagcttttgttgctgcttcccgcagctgctatcttcatccatctcatcagactccctgtgacagaatcatacaaattgtatacataaataaatatgaccaagtgatctaaatgaagttcgcaacaacaagggtaaacaacacctctaactaatgatatcatatcagcatctgaatgtaagatcccagatctgttttcatcagaagggttaaaggtgaagctcagtgaatttccaccttcatgcatacttattgaggcttaggggaatcgatgatctacaactgcatttcttaattattagctttgacaaagtgaaaacatagcctaaatttgcagtctctatttccctgagtttctagtaagaaccgagtaattagttttctacaagaacatagcttcaacaagttcagttgatatagcagtatgaacagactagatcaaagcacaagcaacacacatttagactccaaatggccataacaataaatacattacatgtgcttgcaaataaggactaaccacaagacttcaacacattctttgatgaaaggagtgcaggtaccccaactgaaacgaaccaatgttgggaatccaaatacagggtgcttgttatgtttcaaccaggcctttgttccaggatctgtaaagacaaaagcattaccgggtgcctcacactatagtcaagcttccaaaatacagcatctaagaaggtctagagccttttacctccagggtatccagaaccaaagtttctgtcaatgttttcagctgtttcatcaagcacccattctttcacagaccgatctcttgtaacctggatgagcaagcacaaaaggaattaacacagtcccttaagaatttagaggaaaacactaaagaaaagggtggctaattactttcgctactatacttgctccactaacaacaggataaagactgtcagccttctttgcaacgacaaatttgatagcaggaaatctttctgacaatttcactctgtacttctcagcatcaccaacagtgtccaaaaacacctgaaacaaacttgcttgtaaaattctgccacccttcattacatcaccaaaaacttcaatttgaccaagaaaatgaattatttattttttaaatttgttgggagtttcacactaattcattcataattctaaacatgggacttttactacaggtccaaatcaaaaactggttatttagctatttttaaatgtttatttaagtcgactcccatacaccaataatctattattacttgtacaaaacaaatttttttaggcaaaactaaggtgaactaaaaaggttaatgacattggacttttcttatgataaatacagaacaagctttttcattctgtttgttgatggtagcttcaaaatatgcaataatatgactcctcaagaaaatgcataaatccttatgtctattcttcgagacatgtgtactttcccaacatccctaagtaacaaagttctttttccagttttcacacaaaggctcttcttttaaaccctcatgattattcttcagcatacgttcaaatgtattaactataatgtaggaaagacttctacctcagttagaaggactcccttatttagtgcctttgtgataaggccaatggcagattcatgtgaaatttcattcaagttaatcttatctctgttgacaagaaagcataagagaaattagataaatagtgtaaaacagctaatgacaaaacataaacatatgattcaaactaacttctttagcattttagccgaaagctcccttggatctataatgtccacgtcccatcctattgattcatcagcctttaagttttcaaacaactcctctctcttctcttcttttaaggtcttggaatctacagcaaaggaagacaagttagaaccataaaattgaagaaaactatgcatttcttcagaaccatttgaatggataagcagcgacacaaatccaacaaagaacagttcttcaaattttagcactattcagaacttgtgagagtaccaattataattacaattaacattcaagaagtcgttcgaagttcaacatccacatcctgatgtatttaaatttaaaaacatacacaagaaccactcaaatacacaaaataa

SEQ ID NO: 186018 - DNA, 816 bp, Cannabis indica
taataatttcacatcattactaaactctctgtctctattttttatccacatcatcatattatacctatatggtagaaagtagtggatttagataatgtggatctatatatatgaatatatatagtttatatatataccttttgatggggcttaaacccctactgccaaggacaagagaatgaaggttgagttgttgaacagcatccaaaagcttttctctagggtctccccaatacactttggccactaccttagcccctttgctccttgaagccctgtccagaatatcaattacctccgcatcgtttttcagtccgtactgctttgagaaatttatctctcgaaattcttccaaaggaatcaaagctatacatatgcatagcaaaaattaatcaacacatatatatatatatattataactttattataaatagttaactaatatactaatacttacgtgagcctgtatcttcgaagagctgcttccttgtatgatcagcattaggaggctcaacgtggattagaatgatgtgatctccgccgtcgatgagattatcaacggcccatcgaagggctgctttgctggttgctgagtaatccatccctatcccaactctacgagcttgcttcgccatagatattaattaattaaattatatatatgtattgtctccttgtttaatttttatgtgtttttaaccaagtgaattatttcaacatttattatgtatttatatatagcgtgtataactttggattctgaaaaactgaagtttctcgaatgccctagcctttaattgtattctagttgcttt

SEQ ID NO: 186019 - DNA, 4746 bp, Cannabis indica
agtattgcccaatcatctttcgtaattgaatttaagttttaacttattccttttttaacttttgttgatgctcgaggacatttatggtatattaggccatttgtgatttttctttaaatttttttaatctttttttcttttatttttcctttaaatggatccaatgagtacttcacattcatccttcacaattgaaattaagttttaacttatttcaattttaactttagttaatgttcgatgacatttgaggtatatatggtcgatgttgaatttttattaatttttttaaatcatattttcttttgctttttctttaaaaggatctaatatgtacttctcgatcatccatcaatattaaaaataagtttttactactattttttagtttggggtatgtatcggggcatttgggctatactaagttgtgtgtgaatattttttttttcttttatttttgcttcaaatggatctaataagtatttctcagccatttttcctaatttaaattaagttgtaacttattccatttctaactttagttgatgcttgaggacttttagggtatattaggtcgtttttaaaaaaaattaattgttttttcttttgcttttacttcaagggatataatatgtaagttttagcaatcgctggcattgaaatttaattttattaatcctatttttattttttcgttaacatatgagagtatttcgtgtatattaggctgtgtgaatatttatcgaaattttttaatcattttttcttttgtttttgttatagatagatcttataagtaattcacaaccaccctctctactgaaattaagtttttcaactttagtttgatgcatgagtgcatttagtgtatattaggtggtgtgtgatattttttgaatttttttagtagtttttccttttgtttttacttcaaaggaatccaatatatactttctactaatcccttgatattaaaattaagtttttttactaatcttattttttaacttgggttaatgcatgagagtatttggggtatgctagaccatgtgtgaattttttcataatcattttaatcatttttttcttatatttttacttcaaatagatctaatatgtacttatctgccatctcaaaacattgaatataaatttttactactatcgtttttaagttttttttatgcattagggcactttaagtcgtgtgtttgtgaagtttttcaatttttttaattgtttttcctttcatttttacttcaaatattttaattgtttttccttaccatttttaaactttttttttttaatttatagtttgggttgcttctgtgattgaatgggaatatttccattccttttaagtaaacatgtagcaacaacaataataataataaggaataattgtggcgtaaatacttaaaattttgagtttgtaagcgtcataaactcaatgatttcttttggcaacataagtacctaatatttataaaactgtaattttcgttcagtttcgttagtaccaactgttttgaatttatgaaaagaaaatttaaaagtaattgtaattgattgatactgcatgtttccatccaaataaaatgatttagaatcttaaccttatatgtaccctgtttgaaatactaacatagtttatactaacgaaattggacaaaaattacaattttataaacattagctacttacgccactaaaaaaatcattaaatttatactacttataaattcaaatttttaagtacttataccgctatttattctaataattaaaaggaaaacaatgataaaatcttagataaaaagatatgaatacatatgatgaaaccttgccttgcccataaatcacatcaaaactaatatcaatggcaagttgtgaagatataaaatttaatctcttcttattaattgatataatggtttatcctaacaacaaaaacaagaacttgagaaacaaatccaaaacaaaatgtgaaagaaaaaacattcttgtctaattaattagcaatagtagcaagaaactttcttaaaaatttgagttcataaggcatgatgaaaaagaaaaagactaaaaaaagatatgaaagtaatgagagaatatataatatacattggattggatggatttacattcaaatcttgctcccaaattttggtagtaaagtcctctcctctattcttgttatttaaccatctcgaatcaagttggttggctcactcaaaacatactttggtagctcatattttgcacctacatacaacacaacacttagtagtttaggattgagtatgaagaaaaatatacaaatgaaaatgaaaaatcttaaattgtaagtttgaatttgtatcccttttaacatattttttcatttttgctcctcgaactttgatatgtactaaattatatttcttgaactttttaggccgttaaaaatttctcctaaactattgagattgttaaaaggacttttgtctaattgtactaatgggaatctaatatggataaaagttcaggttagacgatttgttaaacataaaagttcaggttagatgatttgttaaacataaaagttcgagggccacgatttagtatacaggcaatcgtcttgttagtaaaattaaacgaaatttgatatagatctttaaatctaataatcttaatagttcaggagagatttttaataacctataaaagttcgggaggcatgatttggtttcaaggaaaaacaatcttaaatggcctatttttttctcataatcttaaagggtgtttcattgcatatgtagaaaatgaaaagaatgtggatgaaattcgatacctctttcgtcataacaaattgtcaaatctgcactttgaatgatgacaccagcactgtctacaattgcttgagcaagagttagatcagcttccgctgcagctcgtagcgcatcccaaatctctattgtggtgtaaaatgaaaaccatatttcagattcaagcatgaaaataatcaaacatgtttatcaatgcaaagccaaacaagtaatcaccagaagaagaaaagaaaagttctgaaaactaaattcaatttcggtaagtgaagaatggatgccaaagagaaattggtttgcaaggcagtatgaaggtctgatgttattaggaatatagaattagatgaaccacagctcaattatctacacatgaaacaaacatagatgaacaaattgggggcttaaccaagaaaactttgtacatgaataatcgagttagaagtcataaagactcacattaacataagtgaagtaaatttttaagaggaggtttcgaattgtttgactcaagcataatgtaaggtgttgaagaatggctcgagatcaacttaaactaccgagtaaacaatacgaatccaaccattggaccagaagaacaataaccactttcttcaagtttttcactgacaatgactataatctatcaacatctgaactttcttcaagcttaaaaaaaaatgatgtacatctaatatttctgtagatagcaatataaaatgaacagctgatttgagtaattcgggccaaatatttgtatacttaactttaacctgtgaaatgaaatgccatttactaatcagtaagtttaactgacagatcgagtcgagtcctgcacaccaatctatttttatcttcttcccaaaataagttgtgcagagcagagaaagaccaacacaacactcatcatcaattcaaatgcataacataaactttccatcatcaacaaagtacttcttattatatagttaggtaaaactcacggctttgatatgatatacaatatttctatgtaataacagaacaaggtaagagaactttcaatatcatgcatgatcatagattctgagttagcagtacctttcctgccaccataatgaggagcggtgtcccaaaactcttcacgcaactgcatgagctgagtctttgttattggttgcgggtgcttccaaggtttgggtttccgaatctttttcacagcccctgtttcggttcacagttccaattattatttaccatatcaactcttctatttggagaaaattcaaaacaacaacatactaccaagactttttctctttaattatcagtaaaggaactataggttcgtcgagctaagctctaattatctacaatgcatatcaatcccttattcggtaagatcttaaaccttatatcgaaataaactaacaaggaatcaaagtaaattatgcggcacctagcaagtttaaagcttattttgttaagacaaaattaataaggaaacaaagttaaacgctgcaccttgcaagcacataccgaagcaattgaatttaaagcataacatgaaataatctaataaggaacaatgcaagattcgggggtgccttgcaacttgcagggttatgctaaggcaattgaatttaaagcctattttgaaataaacttaattaaggaatcaaagttgaaaaatgcggcgcctagcaataatcattgcacaattatgggattccctaataagggttactcccccgaagtgagatatcacattgttggagtaaaaccctagatgctgtcagagtaaaggatcgtgcacaagggcaaagtatttagttgcccaaatttcggttattccctaataagggttactccccgaagtgagatatttcattgttggagtaaaaccctagatgatgtcagagtaaaggatcgtcaacaaggg

SEQ ID NO: 186020 - DNA, 976 bp, Cannabis indica
gtctgggttcgggtttgggtcggagtttggatccgagttcgggtttgggtttaggtttggggttggggtccgagttcaggtcccaaagtctaagttggggttgaagtccaaattattgataataaaaaaaaaattgtttaaaaatattttgaaagtaactttttttagtttttaaatttttgattcttaaataaaaaaattttatataacataattaatttcggaaatattttcagtttttcaattaaaaaaaataaaaaaccaaataaaaaaatactaccaaatgtaaccttaataaataaatcagtaaatgttatcttaaaatatttgaacttaattatttgtaaatatttgaggttcttggtatggaatttttttaaaaaagattatatttattttcaatatttataagagtgaagtatgttggtgatgtgtaaatatatgtaggcaagcttaggaacgatgacgaaggatcaacagagaagcaaaacaatcttcccaaaaatattcgcctaagatctgttgtgctcataaaccttagacctgcagcaggaattcaggtcagttctaataatgcttattttattaatttgtaacattttattacatactataaagaaatgaattagttcttaattaataatatgcattgaccatcctaataatataggatctagctaatatgatggagaagaatactgaagcaaagtgggggaattggattggttacgtgctccttccatttgatatttctttaagggatgaccccatagattacattcttaaagctaaagctatcattgatcgaaaaaagcattctcttgaggctctctttacttcttccatggccaaattagttcttaaactctttggcatcaaggtatatatataatatgtgtacataaatgtaaaaataatgacacaaaatgtccatatatctaacaagtaaacatatttttgtgatatgttattcaat

SEQ ID NO: 186021 - DNA, 1572 bp, Cannabis indica
acaaaatcgtgtccctataaatacaataccaatgcaacttctttttcttttttttttctccactttttcatgatacttcattttgtggggcccaatacacctcgtgccatccatgtgtccatcctaatccgacggtgacccattctctcctctctttttttccttcctaataaattctaacttcatctaccttctctatccaccgtcaactcataaaaatatgaaagtgaataaaaacggtgcggcccagcccattcatttcagcccaattaaaagcccaaaaagaccaagtcaagcattttcctcattggaatcccaactcctgtccagtaaacactccccacgtgtcatcctcctattcgtttaaactctggaatccaatgaccctttttctgtataaagatcgtcccaaaccacggctactttcttagccccaaaccccaacaacacactctttctctccacaaccaacggcaaaaatggcgcgaaacattctctattcccggggaaatattccagtgtttcgcgtcattcttcttctcctgcttcttcttcttccccattcttcaaccagttcccgccacgactaccacgacgctctccgaaaatgcattctcttcttcgaaggccaacgctccggtaaactcccaccagaccaacgcgtcagatggcgccgcgattccggtttacacgacggcgccaccgctggagtacttactactaagcttatttaatcaaaccacattttctcgctttccaaacacgagaaagaaaatctaataatctgttttccattttttttctttaacagttggatttaacgggaggttactacgacgccggagataacgtgaagtttggttttccaatggcgtttacgacgacgttactttcatggagtataatagattttgggaagacaatgggacctgagctgagaaacgccgttaaggccgttaaatggggtagtgattatctgttaaaagtaacggcgattcctgacgtcgtttatgtccaggtaggcgacgctttttcggaccacaactgttgggagagacccgaggacatggatactctaagaacggcctataaaatcgatagggcccacccaggatctgacgtggcaggtgaaactgcagctgcattggccgctgcttctattgtcttcagatcacgtgaccctgcttactctagattgcttctcaatagggccgttagggtacgtacactactttttatctgtcacagtactgtaattctatcattctcaatttttatttttagaaattttattaaattataaatgcgcaccggaatattaaacagaaattaaaatgattttacaaaaatcatttttaaacattgtttgtcacatttttatgttaatttcattatctaatttgattatatttttcagatttttttttttttaaaagtgtatctattaatattttttagttttcttaattagaatattatataatttttttgtttgtaattgttttttgtctataaatatattttaatctaatatgtacattttttaaaaaatataaaaattaagaaaaaaaa

SEQ ID NO: 186022 - DNA, 2355 bp, Cannabis indica
cggtttagtttaagcagtttattcgaattgagcagtttgttaatttttttgaacaacactactaaatattaaaacaaccaataatattatgatagttttagtattaataggttattttattattattaacttattttaaaggaataattcttttagtataatgtccttattagctgtttttatggttttgtagggacttttgcagccatggaagcagaagctgtagctttaatggtggctttggattggactcttactattgggttacctattagttcgtttgaaactgattgcttagctttgatttcagctttttctagaagagcttccttctgtaatgaatttggctctattttagatgatattgctagtttactattcaattttcctgaggcatctctaattcatgttcgtcgttcggccaatatggctgcacatgagttagcagttcgtgcactcagggtggatggcgaattagtttggatggatgattttcctccatttctctatgatgtactaaactctgattatattcaatgaagttcattgtaataaaaaaaaaaacaaccaaccaaaaaaaaaagaaaaagttctccaaccccatcccaccgagtacccacccacccacctgcaagaaagtccaaaagataaagcacacgtgtcagaagatccttcaatcccatattctcactgcgtccacgtcaccccatttcatcacaactaaaaaaaagaagagagagagagccgaaaaagcaatgagtagaggaatgggaagatagtagtagtcggcgccccatgtctttagatagccgaaccgaccaatcataacgtctctttcttatttattacactactactattctaatcttactcaccaatactatactcactcttcttcctccaaatttaagttactactcttcttttttcttataaaacccctttcctttctctctggtttttctttttttttttaggttctagttgttatattttattagtagtttcaaagagggtgatttcgtttttctcccactaattcggttcttccgtgtataaatattttttaaactatatatcggaagattctggattgtaattttgttaggtttttctttctttctttctttctttctttttgagttgatttttgtgagaatttggtgtttttattgcaatttacactctgtgtacgtggtttaatcaaagtaatacactatgagaggtaccgcagaacaagttgtagttgagaagattgaagatggcgagaaggagaagaagaagaagcgccgatctggtcgacgatctaaacagaacccttctcctttcggtactttttttttctccaaaggaaatagttgttttgtttcttattcttaaacatgttgctctgcataattttattgtattttgtgaatttttgttttgtttttgattcagacatctactgcatagaaagtgaaatttatttgtctgggacatttcttttgttattattgttgttgtctattctataatgcttttgctagtttccttgtgattgaagttaggagtttataatttattatttttttttttaaaaaaacaagaacaaaaacaaatgaagaagctgggaattattactcaggtgctagattgttatcaaaactgtcctgtcaatgtgaaactaacctcagtgttaatttgtatgatttttgagttgaaatttaattttggacttcttactatggttggtttacttgtttacgagtgatggaagtaatgcaatttgaatggtgaaaggattttgaattcaattgtatctataaatttatagacaaaaattgacgtacagtagctgttcaattgtatcaatattattatacaatcttttttattcatctgtatattgttattactttttgggggatgggaaggagggctaaagatcgtactctggccctttttttcttttttgtaatggaaaattctggccattcgacttggtttgacaatcctattattacattaataaggctgttgttatatgataatatgtaggagaaggttgctggttggtacgacttaatccactgtcactgcccaggcttgcattctactgttaattttgtgttatgatgtgttgtttgtagcttattctggcatgtgataactctctccttctctcattcatttgttttgtagcattgggtaactcggcaaatcaaatacctagtgcagcattggagcacatgggcaatgatagagaaagtaatcatgtgaccacatccctgacgcaacataaattggagaacatatctctggatgaacatggattttccaatgcatctaatgttgcttttaattccatgcccc

SEQ ID NO: 186023 - DNA, 2835 bp, Cannabis indica
taaaaaaataaatatattaaataattcgagtaaacattatatttttagtctaaagttttgaactgtaaaacctcagtaaagtccgaactcctctaccttccctcattcgtcttcacactgttctctggtcttctccttccatggcttctcggcttagatctctttcgaagccaacaagctctttattcaaatccgccatggggaaatccgtccctaacgtcacacccaccccttctcttaccagtgtccgctcttctctctccgtttcaaggtaagcaacctcaattaattttggacaatggaggtctccaaatgcatctttgtaaattgaattctttcgtctaagctgatattcatattgtttatcgttaaaaactttgaattcaaggtcatttcctcagttgggttgtgttcaatctctgctccctcttcactcagcgatttcttctgctcgcctcacctcgtgtctcgccattgattcaacaagctcaagatctttgtctcagggtatgcttaatacccctggagtttgatacttttaaggtttttactctaattaatttgataaaattgtttacactttacaacagattagctcacaattaagcatttattctttaacaattttagctattgaattagtaatgagagaaaatagtaactctctccctgtctgggccatcattcatattacatatctgttttcttttttcttcaaaataattaaattaaaccgttatactggctttttacatattcatcttgaattttgaagtttgaactaaaaagatctaagcttgccattacgcctcttatgagcaacaatgtgaatgtgagtcaaggtctaccccaatgtgatttgagattgacatctcacaccttttttctagtcttttatggcatatttggtttacaaaatgatcgcccatcactctttgggtttgtgaaatagagaataaatggtgagaggtctgtagtttgctcccaagaagggtagttcaaactgagtgttaagcttacggtttgctaccaagaaagataatttcaaatggtcaggcttgtagtttgttgttcccactgaaattcgagttccacttaggtacctacatacaattgctatagcttcttgctccccaatcaataattattgtagtcccaatttgggacttgggtccgctatgtacggtgattgcttctaccaatactaacttttatcttgctttttattttaaagccaaaagcactgctaatatattataaccaaaatttcttggtttgcttgaagttctttgataggattatgaggcctcccgtgaggcttccttattggaggagaattaatagacgttaagtaaatcaaaggctgttaattagtggctgttctttgtacttgatgttttccattaagtttttaagaagttgctatgttatctttgtaatttattggcactagtatttttcacagtatgaaatgctcaagagtagatggatctaggacagaaagacacttcggctacagttttggactgtgtagatgaaaggaatagagaaatggaagtgtgtaaccagaggaactgaaaaatgatacaacctagtactagtaatgaatattgctgatctaggatggtgttagtgccaagtgggtctgttggtggtaactcaatgtatttaggttatgtttggtacactgcatagtgtttcagtattaggtgtgataatacaatacaatgtttggaattttcatatgtaagtgatatgggatgatagagaactacaagaggaacttatggagaggaagaattgagattgggaagagaaattaacatgtaaaacaatctaacattatgcagttcacacattttcatttatttatttattttatgtatatcattaagttaacttatacaacgcataattctactcaatacagtacgacaaagatgtctcagtgtgttatccaaagctattgttgtcatttgtcgcttaaaagtaatctgattgacaaagtggacaatttatagacattttgtgacttgcaattgtcaacttttactcaaaagatttgtcaaaatttttagcgtcattcttcaaggatttatagagtctgttctataaatagatctttcatattgtaatgtcttaagtcctttggttcacaattgaagatgctcaagtaatcatgcattatacttgatttagattattcagtagtattggtagagtttgtaaactgacaaaatgtatgcttctttttcagaattgggtcttagtgtgccgcgataatagattgcagctgaggtagcagaagaagatagaggtttgtagatctattctcatcaacgatcatgcttcagttattggatcgttttcatcatctcttaaattaccatttaattgggtccctggagttggggatatacatagcttaacagcaagaattcaattttctgactcatcttgttttgctataaactcaggctacacataagtatatcaaacactcaaagtttagataatgtaataataatcttcttcttctttttctttttaataaaatcattttagttttcttttcttattgaacctgcattatagattctttcaccgatatacatttttttctctagttatatgtaatatacatgtcacttagatcgaagtgattcatgtactctattctactcccatcaaactcatgcttccttagttacttaccttcacgtaggtatgtgaatgtgagctaaaagaggtacgtagccacgtgtcaaacattcacgtcctcaccagtcaccactatgtttcatgacataacatttggaaatttttcataaatat

SEQ ID NO: 186024 - DNA, 3054 bp, Cannabis indica
aagctctaagttggatcaaaaaccaaccgcctagttcgtgtttgggtggagagcgattgtcttctggtcatccaaactttagaagttcgactagtctgtcttcttagttttggttgtgtgattcaggaatgcaaagccatgttggctaatttaagcaatttttatttttgttttattaagcggtcagctaatagagtcgctcatgagtttgcaagggcgtctttattttatcctgattgtattttcagtatggaaaatattccaactgagttgttgcctatgttggtgacagaatttgaaggttaataaagtttgattttcctttacaaaaaaaaaaaaagaatagtagttattttgtaagatatatatttcaaacaaaaaattattattgaatatttaatgttaaaaaataaaataaaaataaataaaagtcattacatataatggtatagtttagaaatttgttgatagaagtattttttttatcccttttttaatcaatttcactcatttttaattttaataaaataaaataaacaaatataagaaaatattatagtagaaaaatggattggaaagagataagagagtggaagggagggtacatttctcattttgaattaattgtttacagtgtcagtttatatgtatatatatttatatatatatatatatatatatatatatatattctttaccaaataatgtatttctttgcagtggaatatagcatattaattatggtgaaaataactggaatgaatgaaaaccaaagaagaaaatagccaattttattctccaatatggataagaagttagaagtctgtagtccacactgctatatgccctgggagatttatctttatatacccgttggaattttcctcactttaaattattatcaagccaatttgtaggactatgaaggagaccttttttttttcttcattttatttcttctatagttaaaaacatattaagtattgtccacatatattcaagcacaagttagcaccatacaaatccaggcataatatccactttataataaataaataaataaattaataatagaaaacccagattgaggttttgaaaatcttgatatctcaaattgagaagaaatctcaactaccaaacacctgtccaccagtatacaaacattttcattcttttttctttcattttagaactccattaattaagcccaacaacaaaaaaaaatattgggagttgtttagaatggctttggggaactgtttgcaagtgagtagtacaacaagagttggtagtggtattgtacaatgccatattcatacattttcttcaaaagaaaagcttaatttagtaagtttcaacaaaggtttgaagaaatcccctctctctttcccttcttttggttattctaaaaccacttcaagaaaatcaatctttgtttgccaagctcgtgaagctctaaacacaggtacaatatatttatatctatatctaattttttattaagtactagtagtgtctaacattgttactatgttttatgaataattaatagttttgatatttaatcatacttgaagtagtatgacacctcatatgaaaataagttaaattaacaaaaagataaaaatgtattgatatgatatgcagttcaagtagtgacagaatcaagttgggataaccttgtggttgcaagtgagaatccagttttggtggagttttgggcaccatggtgtggaccgtgtcggatgattgcgccggtaattgatgagctggcgaaagagtattcggggaagattggttgtttcaagctcaacacagatgatagccctaacattgccacaaaatatggaataagaagcatcccaacagtgctatttttcaagaatggtgagaagaaagagagtgtaattggtgcagtgcctaagtccaccttatctgctaccattgaaaaatatgtagagcagtaagtaataattaaatacattaattctagtaactacaaccactctatgtaacaaacacaaacatcaataattattcactctctgcctatatatatattttttataaatacatattcattgttgttatgttatgttttaagattaactcatatattttctgttgaattttcaattgttatatctttgtcatttgtatattgaaaatgtttgttatctgttactatatcaaaaaccaatacaaatacaccatatatgaatattgcacatcaattaagaatatatatcattattttttttactgggtttggaattgattgagctaatctcaagtgtcattagtaaactaaaaatagctcattcttcattattttgaagaaacatgttccttcatcagctataatccataatttcatttccacatctagaaaaaatttagctcttcatttttattttatttttaaaaatattattatttctttttctatctcttctgtaattattttttaaaataaacagaatttgtccctcgtactgatcattgtcgagttttactctttgaacatatttttgttacaaaaatttcttttggactataaacatccttgtaaatattctcattcagtcatattctacttaattctttaagcaatttgttggtgtatagcaataacatgacattaaatcctgcaattcaaggatcaagataaaaaataaatgcataaatatagcaatataactgttaactatgaattatgagaatatatattcactgagctaatattttttactgttaataaattagatttcggatagtttaaaattattaaataaactattgtactataactgtacatgtgaagcagaacttaactgtataggaatatttgtaacgattttaacaggttatagtttggggaaaataaaattctctcttataaaataatataaaatagagaaagaaataaaagaagagagaagacaaagaaaatgagagaatgaatgagatttttctcacttatttattttaattgagtgaatctctatttatacaaggatttaagactaataaaaatgagaaattaaatcaatg

SEQ ID NO: 186025 - DNA, 767 bp, Cannabis indica
aaaaaaaaatagaacgaatatatactattattttttattatttaatataattatgcatttcaaaagattctatatacaacatcctaacgaaaacgaaaggtgatggtatttgaaataattgaaacaaaataaaataatgataataaacacgtactattattttattttattttatttttaaaaaaaattattagtttccattaaattccagtaagatattttatataatagaaatagtacttcaattttccaaaaaaaaaaatagtacttcattacccacgcggattcgacaccacaaattaaaatggatgaggaaaatgacaagacattaagaagttataacgagtatctctttgactaccaaagcttaatcgtcttatgtaataatagtatctctcatcattataaatttattatattattgttctaaaaaaaatatattatattattaaccattcaattttttttcttacttaaaaataaaccatcttttttcttcttaataacaatactaaacatacgaaattatatcttattataacaaaagctatatgaatggggtaataaagaaaaagttaatttatccgcaaattagaaggatggatagattaagttaatttgatgattttataatttatctgttaagaaattttaaacattaattaagtgatgggctaattatctttcataactctcttcatctttttgacgctcttaagtcattgcttatcttagaatataattaatataagaaataaattaattaa

SEQ ID NO: 186026 - DNA, 1873 bp, Cannabis indica
aagtttggttttaaggcctccaaaattaagactgagtatgaagctctgatcagtagcctcaagctagcgcgtgaagaatgggcgaccacctaacatatacagtgactctcaactagtcgtaaatcaaatcttgggtgagtatacagcccaaggtgaaagaatgatagcctatttaagcaaaatccaatgctgattaagttgacccaaaggctatacaataaggcaagtccgcagagaacagaatgcaatagttgatgcactttcgtgtctagcaagtagcaccataaccgataaggaaaatttgttgaccattccttaaagaggttgatatgttggatgacaatccaacttggatgacacacatagcagcatatctctgaactagagccttgcctaaaaacaaaaataaagtaagaaaaatgaggagaaaagctgctaggtacctaatcctagatggagtaatgtacaaactaggcttctcaatgctgctcctaaggtgcgtctttaagacaaaagccaagtaattattgatagaagtcgatgaaggcttttgcggcaattatgctaggggtaaagcctatctggaaagatactccaataggggtatttttggcctacaatgatcgaggattcaatggactatgtcaaaaaaatgtgacaagtgccaaagattctaaaagatcccgagagctccaccaaatgagctcacacatatgcagtctccttggccctttgttgtgtggggaatagacctcatcaatcaacttttaaacggaaaaggaggtgtacgatatgacgtggtcgcagtcgactacttcactaagtggacagagtctggacccctagcgataataacttctaagaaagtcctcaaattttttgtaaacaacatcttatgtatgtttggattgccacaaaagattatgtttaataatgggaaatagtttgaccgtgacatgttcattgacatctacaacaaacacaacatcagacaaaacttctccattgttgctcaccctcaaacgaatgggcaggggaagctataaataagacccttaaaaaaactttgaaaaagtgtttagaagagccaaaaggcaatcgacctaaattactcctagaggtactctggtcacacaagaccaccgagaagatagccattaggcaaacaatatttgcattatcctatggctataaagcaatgtttccagtagaactggagccaccgtcatataggaggataacctgaccaagaaataaacaaccccttgttggcataatcccttgacaaaatagaggaaagaagagaccaagccaaccataagctctaggtctactagtagaaggttgccaggtacttcaacaaacaagtgagggagagaaaattcttcataggagacttagtgctccaaagagtgttcttgaacaccaaagatcctgcagtagaagtgtttggaccaaactaggaaggcccttatcaagttacaaaaataacaagtaagggtgcctacaagcctggtagatacaatgagaacttggagttaggtcccctaccaaggtattggagtggggcacatctcaaaaagtgctatcaatgaccaacttgtaagagtgctactcttcagcagtagctttgtcaactcatttataagagttaatctagaaagagctaagatcactcttcaatgatggcccctacctagcatgtcgggtaggggtagccatatgagctctagaaatatacttttatttttgaaagcttttagtatcaataaatgtacattgcacagcaaaaacacatatttaagaccaattgattaataaaaatggtgttttagttttgtcaaacaacatgctaacaagataacttcttaaa

SEQ ID NO: 186027 - DNA, 8060 bp, Cannabis indica
agagagagagagagagaaaacttgaggaagaagagtgagaaaaaaaagataataaactcttagagagaagaaagagtaagaaaatagtgtaagaaaagtgatttgaaaggaagaatatagagtaataaatgttatatgtaagaaaagagagagatttaccaaatttcacaagaaagatagacaattagacatacatatatattttttttcagactctttgtctctctcatcttcaacatgcagaagaaccagctttcatccttgcgttcacaccattctctgaaccgtttccacactgtgaaaccattgataagccctagatctagtgaccatggtggctccgactcctcttcaaacgacacccgtggtagctcgactcacccaagtcgatccaagcccgtcgcacgaagtcgacccaaccacccaagtcgcatcaacacttattccggccaacccgctagatctccgccccgtacgtccatagatgcaaaactcacaggtattcaatttcctagctcaaactctctgcccagcgtcaactcgtttctcagaaatagagttgaaatttgttttttttagattcaaatttggcttccccattaaattaccccctgacccaattaaatttagaagggatatgtgtaatgggaactctgtcgaatcccagtccgatcgagtctacagtatgtttgccaaagagaatatgaaggtttcgattaatattatttgtactgaatgtgctctgcctattatcatctgtcaatccattctgcagcagctttgcatcctcttaattgctgcggttgtaatttatttttgccattataggttttttctattcaagttcagaaatgctcttccctcatacactttaggtgatgctattgaaggttattttaccataaaaaactctctgctatatatccttcctcctttgaattttcttttttaggcaaacactttctctggtttattttttaccttcactgcctatagcccacatctcatcatcaatatggatgaactcaccaattctctttctgtggctctcaatcttacagaaactgagagcaccattcaaatcctacatgagcccaccccactaaactcagatgacaccgagaccacccaaactcctatctacctggtagccaaagttcatacggttaagtcatttaaccgtaagaacttcatagacaaaatgaccaatatttggaatcacatctctcggtccccagtgaccattaccgatcgtacaaatggtctttttcttattgagtttggttgtgatggagatagacgccaggttcttcttcaacaaccctggactgacaaggagcatgtcactgaagtctccactggaagtgcaggcctcgccactgagtaggcctgcctgccgccatgaagattgtgagttggaatgcacgaggaattgggagtgatcgtgcattccgcaacctctcccgtttagtgactgtgtgtaatcctgatgttctgtttattatggaatctaggctagctaaaaatgttgttgataagcttagacttaagcttcactttgactccgatttggaggtccctaggattggtagaagtgggtgcctcattttgttatggaccaatgatgtaatagtcactctgctcccgcaatctataagtcactttgattgttatgtttctggttctgcaaacaatatttttttccatctcacttgtttctacggctctccgactgagtcccttagaccacaaacttggaaaattcttaataggattgggagagacaatcccagagacccctggcttatcattggagatttcaatgctttccttttttctgaagacaaacaaggaggaaacccttatcggggaccttcttctgactttcgacatcttttaaattcttttaccctaacccctcttgatcctaaggggcccccgttaacttggaataacaatgtggcctctcccaataatatttaggagcgaattgactggggaatcgtgaacaatccctggaatgatctctttccggatgctcttctcacccatctcggtttttttggttctgaccaccgcgctttggagctggtaacctctagatcccatgctcccacttcgggagtttctaataagcgttttctctttgaaaatgtgtggctctcggacccgaactggactcggacttttgacaagtcttggattaaccaggacacaccccaggatgctatccctagccttattgcaacccaagagaggtgtgccaaaaatctcagttcttggaatcacaaaaaggactttcactttaaaaagcgcatcagcagactcgaacaggacttagagctggcctgctccaaatctaactgggatagtcatacaattgggaagataaaagaactccaatccagattagacgcccttttgtataaagaagagacatattggaaacggcgagccagaacccaatggctggctcagggtgacaaaaataccaaatttttccaccgctttgcttcccataggaaaaagataaataaaatccaaaatcttcttctacctaacgggggcatggcttcggaggaggaagatatagtccgggaaatcgagtcacactttaacacacttttcacttcatcggacccttcacgtactgacttgcgtatagctcttgatggcattgatcgctctctgtccgatacggacaggtctcttttagacgaaccattctctcccgaggaaactgagagagcgtttttccaactccccttggacaaagcccctggactcgatggtttcaattgtcatttctataaagcaaactggcctcttctaaagaatgatgtaatcaacgctgctcttagctttcttaatgggaatggcgatattaaacctcttaacaccactctcattactcttattcccaaaattaaaaaccccaccgtaatctccgaatacagacctatttgcctttgcaacattgtctataaaatcatctccaaaaccattgctaataggctcaagctggttcttaacagcttgatatctcctactcaaagcgcttttcttctgggccggcttatatcggataatattattatagctcaggaagttgcgcattctataaagctcaagactcgggggaaaaccggttggatggcggttaagcttgatatggccaaagcttttgatagagtagaatgggccttcattattgccatgcttcgtaagttcaacttcccatctaggtttacccagctggtctttgcatgtatttccactgccacctttcaattcaatataaatggcaaagtggctggaaatgtcattcctaccagggggattcggcaaggagaccctctttctccctatctttttctgctttgcgccgaggggttttcctctcttcttcagcagcaggagaactgtcgttcccttattggctacaaagtagccagacgtgctcccgcaatttcccatcttttgtttgcgggtgatagcttccttttctgtaaggcctctattcattccttcaatatcatcaaagaggtccttgcagtgtatgagagggcttcggggcaaaaagttaatttccaaaaatcctctctttacttctctcccaatgttggtcttagggatcaaaccttaatttctgattttttgcaaatccatgttagatcatcttttgagaagtatttgggcctccctcaatatattggccgaacgaaaaaaataatttttttcactatcttcatgacaaagtttgggcccaccttcataattggaaaaataaagtcttctctaagggaggtaaggaaatccttctcaagtctgtcattcaggcaattcccacctatactatggcctgctttcgtctccctgtggccacttgccactctctggtgtccattatggctaatttctggtggggattcaaggacaacaattgccccaagattcattggcaaagttggaaaaaactttgtaggtctaaaagagaaggcgggcttgggttccgatctcttgttcacttcaaccaggcgttgcttgctaagcaagcctggcgcattttcacacaaccaaactccaccgtctctaaaattctggctgccaggtactacccatattcatccttccttaacaacaccctaggtcactctccctctttcgtctggcgtagcatttgctggggaaaagagttgctgcagaaagggcttatttccaaaattggtaacgggcagagcacttctactacctttgattactggataccaggcttccgtcagattacccctctttcttctctccctgaaaatgttgcatcttttatcactcctcacatgacttgggacgtaccttcgcttagtgattgttatcctccccatattgtggatgtcattctctctattcctctccccctcaggcctaccagggatgaattgatttgggaacataccaattctggagtttattcggtcaaatctggttatcacctcagtttttccctcttgtcccctcctgatatcccttcttcttcatccccatcaccttggtggaaaactttatggcatctaaaaatcccccccaaggtgaagcattttgcatttcaagctaccaattctaccctaccaaccctcaagaatctagcatcgcggaaaatcattcagtcttcggtttgtgatcggtgtgggcaattggatgaatcggtatctcatgcactgttctattgtaagagcattcgaagagtctggaaaggtacgatcttctctccttatatattttcttgctcttctgaaattaattttcatgatattgctcatatggtttataaaaatttagcccaaggaagtgtagagttgtttctttgtgctgcttggcttatctggttcaacaggaatagagctataagaggacaaacatatgatcaggcccatgccatttccacattagcacaaaacttcctggacgactacaagctcccagcttcagctatgtcccctctcacctgccccaacgggacctcagctcagacttcttggtcgcctcctgacccgggtcatcttaagctcaatgtagacgcatcagttcccaaggagaaatcgatgatcggttttggcgacgttattcgcaatagtgaaggccttgttgtagctgcgctggcttctccttatactggtggtggaaatgtggctttattggaagcaaaatccctccttacggcattacagtggtgtgttgaagaatattttcttgtccatgagatagaaacagactgcaaaactattaccgaagcgctgatctcccccagagaagacatctcagcttttggtgatgttatacgacatattaaagatgctttatctcatctccctgctacccacgtttcttacattcaccgctcaacaaacacttttggctgatagacttgctcattgggcttcagggttagacgaagctactatttggattggcgataacccttgtaatcttactgaatttctttctctctagtgggctccctttcccttaaaaaaaaaaaagaaaagagagagatttgtttgacatgtgaagaagataaattttgtttttaaaagagtcaactagataagttaaaagaagtgatatatcactcatttttaataattttataggaattacaaaaaaatgaaaaacgtgacaacaaattttccatcacattttattttattttttttaagaaaaatattagtaaaagtgtttctttaattaaaaaaatatataataaattatttgaatatataaatatatttaaaataaaaaaaataaaaattaaatacctcaatttgataaaatggaaaaaaggaggatttaaaaacttttatagtgctaatagtatacacagtataaaaatgagcaataaaaacaaattctaagcgtattacagtaaaaaatgatagaattataaaaaaaaatagtaccccgtgttaactcacaaattttgaaataaattaatatattgacaaataaatacttattattattattaatgttgaactataaggttttgtgttttgagttgggttgtttatgctaatgtgttgtatttttatacttgtcgttgttatgttaaagtctacatttttttgcgtcattctaatttacaatattatgtttatttaatttgtaaaatcatatttgatttaaatttttaaatacgttttatgttgtgtcgtactagaaccaacgttattaggaaggagcgaatgggattgtcgtccaagtctccacaatttggcctaaagttttcttttaaataactgtatttttttaattttttatcattagatattaatttttatttaatttagaaaatcctaaaagaaactttacaaaaagtttcaattgtaatttgtctcttttatctaagatctccaattgacttgtgctaatgccgattttgtgcaatgttaaaaagtttatacactaatattagtatgataagtaaccatcaacggaaaacaaaaatgtaagattctgagttttatgagaagattgtaagataataacaaaatcaacccataaaatgatggtaattgcttaaaaccaaagaaattaacagaaaagattttgtcgtttattgataagatcatgaataaaggaaaagattttttaaacatgttccccaaccagaaggccatgaaaaaggaaaattacaagaaaggaagaatacgcctaaggaattgtcgatcaccttctcggagatagcgcgtgagccttgggatcaccaagaagtgccacgtaagaacggcgattggacctacccactcttaagaaataacgagatttgcgtcggtggcgccgccgaatattctcccgttttgaaaaatatatatgagagagagtgaatgtgacagtggcaaatcataatgacccagctgggccttgggtggggcccacaacctctatttctgcgctgcacacgtaggtcccaccattgccttgtcggcccacgctcggccgttctactgccacttttctccctcccactaacttgtgctttgcgatgctaccccatgcccatgcccatcgcccatatttctttttccttacttttccaatattattattattcaaaattagtatgttgattatgtggtgtgtttcgtgtgcttttttttttacatattttttgggatgaaaaaaaaaactttgtttaataaatatatgaaagtgaacagttttaaaagtttaagttggtaattaagaggtagattaattgtttataagcacattaccatacttgaggaggaaacatgcatttactaccacgagttgaaaatgaaatcgtgcatgttattaaaatcaaataaaatctagtatagatttttttaaaagggtaatttacggctatattttttaatttttaaatttggtacaattaattctcctactgaaaaaattataactaaagtctctaatttttataatcgtttaggtccgtactcattcagttagttttttactgttaagtgccgaatagacatattattgtgtacacaagtatatacataacaaaattttattgagtcgccttaatattaataattaaaaatatattcaataatttcaaaataaaaaacctatgaaaaataaataaaaaagcatacacgagattagagggtccttcagcgtgaagctggtggtgtggctgattgttgctcgatcgagtagataggctagggcacatggaagattttgaagatagatttgattaagaagagacaccttgatggagaaaaagaaggtagagtgaatcgaatgtgaggctttggggtcgacagcgagaaagatagagaagatagaggaaatcaagggcgagaaagagggattctagggcgagaaagagggagtcgagcttttaggttgagggcgagaaaaagggagctcatcttttgggtcgacgacaagaaagagggagtcatcggcggataagggaggttgagagagagaaaaggaaaatcgaggctcctggcttttcttttaaaagaactcgaggcccctagttttaggtgaaatgaagaaaa

SEQ ID NO: 186028 - DNA, 3957 bp, Cannabis indica
aataatatcacactagtgtaaaattgataaggaatgtagatcaattcacaaacagataggatcaatcagcccttgttatatacagattaagcttcgagtgaggaaaagaggttaataatctgtatacttcaagaaaacaagcaacaagactctttttcctgtataaggaaaacctaaagaaacactaataaaagaaaaatataaggcttgataagcattctcgaatgatgcatcaattgctctttttaactctcgtgttaaaaaatataaatgcaacgtacaaaactttttcttcttctttatggttggtcttggctattgtcatgatatatttgactaaagcaggtactacaatcactttaacccctagccaatagcacatccaagttgctcaaactatcgtgtgacgaggaagcttggattcgggatgcttttcttacccttcgggggagaatatcttcatgcttctgattgtcttccctgtgtgctacttgttgcatttgcagcaatgcaatcatgctaattgcaaccagcgctgtgtttcccaaaataccaccgaaacactccaatttaagggttttcttcactaaattaaaacttgaaatgaagaagttatacaagaggttagatctctttctttcatggctttccaacttctcaccggatggactgaatggagaaccataatgtttttcgggagagacaaattgattagcttcttggacatctcccacgaaagcaagagcttcttcaataactttgtacttctttccatggtgttcagccagtctcattgcaagaacaattcggctttgctctaactgtgcaagggcagcatctctctcaactcgttgctgtgcctgtacagtctgaagatcagatcaaagaagatgagctcagtggggaaaatgctagatatagcatgaatttttcaaaatgcaagagagctttaaaggcataaacgaagtgcataataaaactcagaagtagcattttctcatgagcttttggctcttggtcttaggaactttgtgcaaatgaaatgagcacacattagaacatgtgtagcagaccttaactgaattgaattaagggttacattgagccgcattcatcatgctgttattatgtgtagaatggctggaatgttagcaggggtgattttggtttgttaaaacattataattatataactgtcaggtgggatggggtgaagaaaggggtatcagatgtgtgagtgatggtgagctctgttttctagagaggtttccaggtccctcgaagaacctgggtgttatctgtgtgttgttccaatattagcaatactattccatatttaacctactgtgttcaaatgtgtgagtgatggcgagctctgttttctctggatttcattcctgcctccaagaaattgcagaaagaagtccagtttgataatccttgccatcaatattctcacttgatctatcaactaatattttttaaccaaagcacaaacaaaatgggaaaacttttccttcctctttaaattaaaggaatcaaagtttgacagtcctatctcaaactgccccgcatgaagctgggaattgaactttagattttgcccaagttgagaaatgagaatcttaaatgagataccttgcttctctaagtctctaaccaccatcaaggatgtcagaacaagatttatcatcctcatgccaacaaagcaaacatgtttaaaacataaaacaaaagtaatctgtagttctcacaagatgttttcagctcttgaaaccattaaaaactacaccgaaaatgtggcattttggggtttctgagtcccctcactatcaccggtttagataaataagtaccttctccttcttctatatataatcatggacaccctcaattgtttaatttcacaaaatgtttatgacaaaatcaattgtgccactgaaacttcaacacttgcaatcttcaaacctaaaaacagagtcttcctatggccgatacagattagttgctttaaagtgaagctttagcttgcgtgtaattacaaacttatgtcctctgcactaaattttgaagaattccacagatatgtaaacacaaattgcaaaccatatgagaatctacatgctccataatcagctattccatgctcaatttctttatcaaccgaagagaaattaaacaaaaacagcgaaaccacacatttatactatcatttcatgcgattttcttagaagacaaacaaaaacccaaaagaaactaaaaaaaggagaactcacatggagaatttcgagctgttcctcgaggttctcgagtgcggttcgaatggcattgagactcttggcttcccgaatagcggaatcgtcatcgtggtggagacgaaagtccttgacgaaaacaaaacctcggtgaccgggaagggcgtcgttgggggaggcagcagagggtttcttcgtgtcggagtttctgtgagtttgaatggagttgaggaagtgagttcgagagatggagtgaatggcgtcgctaagcttatcgtgtaagtcccagatcttctccaggacagcttcgatttcgtcaatctccatttcccatttcatttgagaaattttctctttcgttattttctttcttttcttttcttttctagggctttctttcttttgttttctttttcccactcactgccaattccttcaaaataaataaataaataaataaataaaaaagaaaagaaaaagaaaattcatggcgtgtgcccagtctccgacaacgtgacacgtcactgttcattttctttttctttcttattaatataattttattttttatcttctagccaaaaatcactgttagccactaaaataaaactcaactgagaaatttaattgaattagtattttttatggctgatttgtttttttttttttgaaagcaatgttttgctgaattttaattgaaatagttattttaaggcttttatcctatagacctatatcacttattattattatcatcacttattttatagccatttatattccacccacataatatttatgatttattttattaaatattcttcaatcttttccttactttaatctgtattttcgaaataatgtcacgtcatcattcatagaagcccatcaagtatggactcaaatacctggtccagttagacaaacaaaacaatccatctcctaagtgaaagtaaatccgaacagcatgtttagatcctactccaccttccaaatacatggtgttcttagagaaatggttcatccccacttatttacctaagatttaagaaacactggaactcaaggaggataccctcaagggtcattcaggaacggaagttgaaaaagtatttgggatagtcttttattcgggaggttgcttatatggtacgtctctaacacaattccgaggaatctggcaacatgtcccctttgccaaattttagaaaggctcacgataaaaaggtggttaccttttttgtgcaatgcgccaccactctcacattctccttcactacaacagcgcacgacacttactgtcattgtcaacagtaccatgcatggtatgatagactgccttttggaattgggcttcacttacccagcccaatagcttacaagaatgttaaatttatgtattttaccccatcaatggactttatcctataaaaaccctagtacggcctaaatccatctgagccaataagcatggtttcttataaatatgacattttctcctccatgcatggggttcacaataaaaaaaatgtacatttaagctgtaaaaaaatgcatggctaagagcttataaaactgcattgtggactaagactcattaatacctcaaccacataaaaatcgtgtgttattctctctttattctaattttctttagcttaatctcttttaattattaatttctaaataacttagtaaaaaa

SEQ ID NO: 186029 - DNA, 4219 bp, Cannabis indica
atcaatcatagttgagcttgactggttgttcgttgttaattcttaaattgtagtcaaagttaattcatcaaataaagtagatgagtcaacttttaaaatggataaatcacatgtggtgacattaacaaaatttgcttgtagattatttgttttgcataacatgattattggttgcaaaatttatgtatatattgtttgcttttgaggcagatttatctgatatccccaatgacaaacttgaggagctgagaggattgtacgaaattgatgtagttccatatacattgacccttggatattcatattggggtgcaggttagtgatgctaattgattatattttctgagatatcaatttttattcggtttctactgtcataaacttgattttcttttggacttgtccttactggtatagaaaagaaaataaatgtttcttcattctaccttgttgtatagtgaagcgtttgaagaaaacaggagatgtttaaatttcaaccaggcacggttttatgattagaaattagaatgttaaatttagaatctggaatgttataaagtgtcattggctacgctttttatttaccgagattatctgttgtcagttttttggaattatgatcatgacccttgtcacatgcgaggaatccttgctaataaagaaagataccaagacaatccatcatgcgtatctgctttagaattatcttctgcagtaaagttgtttaagtgggctgtttgatattctgtatgcattagatgtcattccagtttctgcctgattaagatgtttattctagtttctgctttgattattgggtttgcagatcatatcttgaagcaaatactgcctgctggagttgaggtgccttcatctttcgaaacaaagttaagtatttacgatatttctttattgaaaccttttctctttctgtttatattcagcttagcaatcaaaacttttttactgtagccagccaatttgagcattttaagatttttattttgttatgctagtaccaccgtcaatgttacttttttttttatttaattttatctgcaggtggaatagcgaagctcatttgtgttgcttgcttgtacttgtgcaggtcacattgcccatctgaatatccacgatgagttacttcccttcaaggatgttatagcaaaagttatatatgatgtatgtttccatcacttcttctgactttacatctttacaaacgttttctatttttgtgccactgaaaaagtacagcaacatattctatacggttttgtgtagtttgctagtgatagagttatcccttttttaattgaagaatatttgtttggtattggcatcattctttgcaatgtgaagacggactttatcaaccaagagtttgagtctcttttactattggtgtctaatgttgttttcgtctctcttttagtcatgagtcataagcacagttgatactacattttctgtgcttataatgtgtttgactttttttttgttttgtaatgacagaaaaattatccaagaatcaaaactattgttaataaagttggtacaatctcaaatgagttccgcgtgcccaaatttgaagttctagcaggagagaatgatatggttacagaagtgaagcagtatcgattgactttcaagcttgattatggcttggtgtactggaattcgagattggaacatgaacacgctaggttggtttctcaatttcaggcagggcaaattatttgtgacatgtttgctggcattggtccttttgccattcctgcagcacagaaagaatgcatagtctttgcaaatgacctaaatccagatagcattcgttatctgaagattaatgctgaagttaacaaggttgatgattatgtctgtccttataatactgatgcaagaaaattcattgctcaaatgatgactgtacccgaagagatagaattgaaccatatctctcccttaaaatcaagtgaacagcagaaggagacggttatcaatcaggaatcagaatcagaatgcagcaaagtaactggtaatatgttttatgagtacaaccttctggtaggtaaaatatattagtgcacacgtcaagtaaatcttatatgttccttgcagttgaagtgaaagaattacaaaatggtgctgagggtaaatttgagagtgtagaaggctcaggtaagactgtggatgcttcagtagttgcagttaaaagaccttcagatgattgtcaagaaggtgaggatggtacaaacaggacttactactagtgaatctatgctattctcttaattctatttcaggtgtatatgtcatgcttaatatagggtgcatttatgaagtttaaaaattgctttgttacctatcgaattattgttttcctgaccaaaaatgctggatttacagtcttaaccatatgtatctgcaggaaatggaagcctttgtagcactgatacttctcttgctgggaaaaggaaaaggaaacaagaataagagattacgaggctcaaaggttgttggcgtgaagacttgggaacatgttgatcatgttataatgaatctacctgcttctgctcttcagtttttaggtacagatgctctgcactattcatcatttatctagtggaacatggaacccttaaattctatcctcacaagcttaaaattatagaaccaacctttaattgttttttggtcatcagatgcgtttaggggcataatacaaaagaaatattggaagggtgatcttccttggattcactgctattgctttatacgggcaaatgaaacccaagagtatattatatcggtaagtaatgtagcactcaaccatatttattatgttatgtaagaaattttttattgctctaaaatgatttcttcattgctttgatttaaattgtttttccaactatttcaggaggctgaggctgccttaggttcgtctatacaagatccaatatttcacagggtcagggatgttgctccaaacaaggtaccaccgttttaacactttcttttgtttctttttctcatttctgcactatggtaagaaacattacttggttggatacttattggctgttctttttttctttgttctgcagtcaatgttttgcttaagcttcaggcttccagaatcatgtttagtgtgaaaatgtatccgacgtaggcaacgattaaattaaatattcaccaatcttaacatggcagggatggttttatggcgttctggtttagctttcaaatttgccagtttaaatactctcagacaagccaaaatccatacaacagatataatatttactttgaagaaaacccaaatttgtctgaattctatggggtgaaactctgaaagcaatgaaaaaagggtttaatccttttcagttttgttactttaggttgcctaacatgagggacgatgttttttttttatcaagcttagcaatattgttccagtttaacacatcatgtttgtgacattctggttgaaagggtgacaaggagattggcttttgacattttctgtgtaacctgtttgaaagattgacactgaaaactgaaagttttgttctttatgtcaaaacattctgaatggtaatctctgtctatagctaaacaataatgttggggctataaaaatgtaaaagacagtatcgtattatatttattggttaacaaatctaaaagatgaaataaaataagcatatgatatagctagacgccaagttgttggggagcttttctcataaaacttttccattaaaagctcctgttgaacccccattcagtgattccttacaattcaacatatatgtgtatataaattaataaacttaataaactattgcaactgtattaactctctttttttcccttttttttttttttacgttttccctttactttttctgaaaacatcttttttctttggaatgcatcatcttcatactacgtaggctaccttttatggccaactgaccatgttaaaggcttatttattagcttccgaagtttattgttgggttatgacactgaggaagtaaatggtattaagtaattgaagtgtaaactttttagcaagatataaaagagtagaaatattgaaaacaaatgcaacttaacacctaaaattttgctggaaaggcatttgaattagttttatggctaaagttgaaaaaggcaatttaaagggattctctttctttagtctttc

SEQ ID NO: 186030 - DNA, 6343 bp, Cannabis indica
tattaagaactaccccagaaacaacaatcaataatgtattaaggttttaaatagtatattggtgtggttgttttacttgtatattgtatatcaataatttaaacaagctttaaatgatttagcatcaaatttaaaaaaaatgactaatgaggaggaggcggatgaacctactcttttttgctttcattaaagaaaaccacccacttttaacttttatgtttgctcttttgccatattgtactagtttaccttttgctttagtcacttttctcatgttcttacttattaagaataggtagtagtgtgcatagttatgacttttcatagtaggcctaaacatgtaatattgatatactgtttaaaatcatacaaacagattaaaaagaggagttacaattcatgtagttgagttacaaatttggtaacttataattacaagattcataactttttctcttatgtgtatgggagttacatatttggttatatgtaatttattatttgtttagatgttaatgttcatatcttggcagttaaaagaaacgataagagaagagttacatacttgtagcggttaagacgcattggcatttaaaaatgtcaaaagagattagtggaccaagtagattggagaggtgtgttgtctatagtgtgcatcaatgtgtacgtaacaattttattttggagttgttatgcaacttattgcttgttctaaatggtcgtatcatctttttacttgcgtgttcataaacattcaataaaatattttgtgatagccatgaagtttgtggataattttcaaatagttaaaggagtatttgaactctataaaaagtggtcactttctttttagagtgttctcattgtgttgttgaggaaatagtttattgttgggcaaagtccttccaaacttgtttgggccttgagttgttgggcaaaatccattgagaattgaagtctttacgcatatatcctgcttggaaaaagtcaaccacagtttcacaaaagttttaccacagaatatgtcactaagtagcatttaaaaaaataactaacaaactttctgacaaagtgcaaatctcgaatcaaatcaagcacactatattgagaaaatgtctttgtaataagattacatgtatttcaatatatatttgagttaatctttatgttagcataaatcatgaaaaaaataatgtgagagtgatggttcaactatattgtgtgtataagagattttatctagacatatgatgtgagcagcgccggtcaaattttggggcccctatatatggtttaactattataaaaatgatagttctaatgcttagtgtaatggtaaattttaaaaaactcttaagaggtcaaaggttcaatccatcataactagtagaggttgggaattgatacgtcttactttaaagtaagaccttttacgactacaccaaataatgtttcttacattttcttcttatttaacactttatctatgtattaatttttttttttttataatttcggggccctgagcgttcgggggctcgaggcacacgcctagcccgcctaccctcagggccgaccctggatgtgagaaaaaaaaaacaatactcaataatatttaaataaataaataaatttaaagtaatatcattttaaacttttataaattatggtcgagtgaaaacttgataaattttttaaaccgtaaaagattagtaagaataacatttagttagagagataataatgctatccattatccaagcaatcacagcatgtgaaattaagaatctcgatgtggacatccaagatccttacagatggtagttctcttctcctactcaacttcaaagctgtggcaaattagtttccaagagagtgtgattggatggtcatcacatagcaaaatgggcaaacatgaaatcaatggagatctccttcgggatgatttagagagagatcctctagtcaattgcaggtgtatatgtttttctgtttgtcttcttattatgttttgtgtttgtatagcattctgctgctttgtttagtagttggactgttttgttgcttagttttctagctgctcacttagcttacttagctctttgctgtttcatttggtaatgtaaccgagagaggcttttctcctttgtctgttttttatgcttttttccttgattccatcaaaagaggaagaaaagagttaagagtatattgttatgagagtgagtgtcattaagaaaacaaaaaaagagtaaaaacacctatataacgttttctcttctggatttgctcgtatatatttccaagttataaattataatgactgagattcataagaaaaataaataaaaattgtggttaaaatgacagctgtgggatttgaacccacgccctttcggaccagagcctaaatctggcgccttagaccactcggccaaactgtcttgtgtagttacctacaaaataaatatataaaaccagcctcattaatagggaaaaaaatagaaactattaaacatagttatcatgtttaacactttttcttgttacatatttatctaggtatcaatttcttagtgcatctaattctaattacattaaaattttaaattgcttccctaacaaattaatgagaaaattattttatttaaaagttcataaacgatttaatctttactttctaatatcactcttagttttttttttctagcccaacaataatcattctaaagagcccgtgagtataacataagattttaattgcacaaggacaaaatacaacctatcaacaagttaaactttattaattttctttttcatgaaaaatttgttgccttacaataatgtttagaaagtcaagtgatttctttcctctatattttattatttgtatttgttggacaaaaagcctcacatgtcaattatctcatatcaaatttggattaaaacaaaaaggagaatggatatgtagtaagataaggatcaaattacaagcatataaagggaacttgctttagttccactatattctaaagatgaaaagataataaaaacaaatgttcataaacatcatcactgagcaaactatagaaccaagacaagatttcatatgttacaattttacactcgtacttaattcaagttcctagacatggaagaagaagaggatgatgatgatgatgatctattgcacaaaacgaactttggcaagcatttgagaatggtaaaaccagaggacggtttataagttgaaaaaaaatctggatcctgttcgagggcctctgcataaccttcgaggatcgaaacaatctcgtcaaaatggggtcgtttatccggattacttgaccagcatctattaacaagatgactgaatgccatggggcaagcagaaggcaagggaggtcttgcattctgcaaaaagcgacagcaaacgacagtggaaacattcaagaagtaatcaatgcacagaaactcagctaatggtattgattttatagaacatgaaggtatcgaaatctacaagaaaataattcaccctgaaatggggtaatgaattagaagcagttagtgaccattattagactgttattgcttagagatgagggaccacaaaaattggcacagaaatatattgttatttgtgcctttgtcttggtatagaattgctgaaaaactcaagagaagtaatgtagcaagaactatctatgatacagttcagacttcagagtgtgccccatcaggcttttctgacttttctttcactttggaagtctatatatacacatccatacctgattcaaatgtgcgtagcacaaattcccacctggactataaaaggacaaggacaagtatctctttttcttgcacccattcacgtgtttgcttacacaattaagacacaagttttggcaaatctttgggcttaaacagcttaatttttaataatacttttatttctgctcagactttttcaagacttaaatagatataagactttagatgtttcttaagtagggaattggaatttgaactctatattttcttcctatccttaaatgatgtgttagtcaaactagaaataattaacaaggaaattcaagttctgtttagtcaaaggtactaaggtgcttcatcctttttgaagttacagtgtagtcaagcatataatatttactcatacacaatgtaggattgtcaacatattaattaagtagttatctgtaattgatgcatacatgccagaatgggtgacttagagtactttttttctttgactaaattcagtctcagctacatataactcctttacgaaagcaaatcttctactaagaaactgttgtgatgttaatacgatgaaaccaaactcttggactcatatgagccatttaaaattggagatgttatggaataggaaaattaccttctgagaaactgcaaatgcagcctgttcaggcgtcatgttctcaaatggtgtcaacgctgttaatagttcccaaagaacaattccaaaactgtaaacatcaactttttttgtatgatgtttttcttggatcatttcaggtgccatccatcgatatgtccccgtgaaaccttttgcactgccacactgtgtttctaaacatgaaataccaaaatctgctactttgacacacatatcctcatcaagcagcaaattttctgatttgagatctctatgaagtattccctgtgaatgaagatacttcatcccgcgtgcaatgtcaagcgctaatttcaaaactaggtggagtggaacagaatgtggttcctggtgatgaagatatttccttaatgagcctcctggcaaatactcggtgatgatgcaaaacacaggaggtttcttacaagctccaaaaaactgcagaacacaatcaagaaaatgcatgctttataagtcgcgaaataaggagaccaaggagttgtcacactctaagtcttctagaaaaacaatcaacaaaggttcaatttgggtacacattgaccacaatgcaattaggcacattgaatatacaagaaaagaattcaaaccattctaatatggcaaggtttctgtatctctaaaaatcatccatttcaggattgtgagggaatcaagctacccaagccatgactcaaaatcttgattgagaagatgatcatattaaaagggtatcataaactatttacattatgtcccttaaaggactgactccgtacaaaaaactcaaattcaactaagtctcaccaaccttgtattaaagtagtactgcagaacacaaaacaatgaaagactacatacattaatccatgaaaggaaataaagaatctgaggattattactacattttatgttcaccattatggtttttaagttcaagcaaaaacatagataatcccaacaaaagaaaagacaatcaaggaaacaaaagctcttacagtgatgatatttggatggcataaccgaaagagcaaagcaacctcagagatgaactgattctctaccaagacagccaagttctcatcctcctcaggttggctgatgagcttaatagctacatctatctgcttatatacacctctgtagatcctactatggcgaccctgagcaaatttatatccaatgtacaattgagatagatcagcactccattcttcttctccttctcctttaatcttagcaccagaggagaccaagtacttggaccaagactcagctcgtttgtactctccaagagagagcctcctgctgagtttgccattgttggaaatctgcttaaaccagtacaaattcttcatgggttaagctaaaactaaccaaaaccatcaaatcttaacaccctttaccctcctcaactcaatgcgtattatctcaaaagaaaaaaggttctcaaatttcgaaaagaagaaaaaaaatactactttttcagagaaacccggtacaggtaggaaaataaagcctcgaacttgcaaaaacataaaaaaaatattccctcatttcatgcagataatgaaaaaagtcgaatcgaaactcagaacatttcatacaagtttttattttattttttttttcttaaaagaaaaattaatgtttccaaataaggaataaaacccaaatgaaatacatagtttctatagcagaaacttctttatataaatatataattaaaagaaaaacatcaaatccgaaatctatactaggtagaaatcagcacaaggacccaaaaaaaaaaaagaatgaaggctttaggtcttccaaaaagcaagaaaaactacatcattaaaaacgaagaaaatcctcaagctaatgcataatctgtgggaaaaagatataaaaagaaaagattga

SEQ ID NO: 186031 - DNA, 2547 bp, Cannabis indica
aataaaactgaaaataaccattcattgaacagaatagcaactaatcactttccctaaatttacctgagtttcccccacttatttccccacgagttatttcaacacaaagtgtagctggttatcaaaaacgccataaatttagtcaccaccaggccatctaaatattgagtaaaggtccattcaaaaaaaatattgaataaaggtaagaaaaaattgttagacaaaattgaaattacattctcttgaaattttgacttccaaaaaatcactctcaaagactagtgataacataaggtgggaaaatgcagaacaaagtttcaaaatagtgtacaatgaacctaaaacataatgcttttaattaaggacagctacacctgggaaatattcttattctacgaataatatgaatgaaaaatgaacaactcacccctgcatcaacaacaataggcctaccaagatgatccatctcatattcaagttcttcaatgcttttgttaataaaaaatgtgatgctaagtatcctagctctcattacagactccaaatactaaaaacaaacattacatagtcagcaagaaaacttgtataatggaacaaaaattcagaacgacaacaaaaataatcattaaaagaaaagaaataataaaaaaaatctaaacctttgagagaagctttgtaagatattttgaacttattttactagcccaatgctcatagtgaggactagttgcaaagtactctcgctccttacgccttgcaatatataatcatgtctacatttttattaaagtcagcttgtgaatgattaacaattcaaaccgaaagatgttgcaacctataagatcttccttcaaaaaccttacttgcagaataaaaataaagtgagacgaacacagataatgttttaattagaattactacttcaaccgttagtacttcctgaatggacgtgggaagacattacaatggactttgtggtcggattgcccagaacaacaggaatgtacgtctcagtatgggtcatagtggatccttttacaaattcagctcatttcctgcttgtgaaaataatgtatacagtggatcagtatgttgagttatatgtgaagtaaatagttcatcttcatggggtcctaagtctatcgttttagatagagaccctaaattttacatcgaagttttggatgagtctatagaaagccatgggtactaacctaaagtttagtacggcatatcatcctcaaacggacgggcagtctgtacaacccatttaaatactggaagatttattacgagctcatgtcatggactttggaggttcgaggaataaagtatttgctctaattgagttcttctacaacaatagttaacaaagtaccataggaatggctccctatgagatgctttatggcagaaaatgtcgtttcccaatctattgggacgaaactggagaacagaaatatttgggccgtgaattaatccagaggaaaaatgaggcaatagacaggatcaaggctcgaatgcttgcttcacaaagtaggcagaaaagttatgcagatcccaagcgtcgagacattgcatttcaggaaagaggacatattttcttacggatgtcaccaatgaaggatattagatgttttggaaagaaaggcaaactaagtcctaggttcataggacctttcgaagtacttaagaaaatcggacaggtggaataacggttagctttgcctccaacataatcagttgtgcataaagtattccatgtctcgatattaagaaagtatgtgtctgatccagtacatatcctaagctatgaagccctagcattataaccggatctgtcttatgatgagaagccagtgtcaatcttggataaaaaggaaaaagttcttcgaaacaaaaccatagtgttggttaaagcgctctagagaaatagtaaagtggaagaggccacttgggaattggagtcggtcatgaggactcaatgtttagagttattcaagttagatttcaaggacaaaatccttttaacggggggataattgtaaagaccgctaaatttcattaccataaataattaaataattagggtttaattatgaaattaattcattagtcattatttatgcatttgtggagattcatttgaatctaaaatatgctaattatattatgcatgaaatttcttgttttcagtatttgtgttcggtagcagtggaacacgaagatggaccattagagagtcacgtcttcatatggtttagaattttattagtagcggggcaacacggttaaatattggaagtgttgggaaattatcgaggttgggtaatgactaaactacccttggttatcatttaacctttgaagtttgactaggggcaaaatggtcattttactaggaaatccttttcatcactttgtggatttatacttatttaggttctgatcatttaagtatgtattattaattaagttatattggtttttaaaagaaagagttagaaaagcctagaacactctctttccaactctctctctctctct

SEQ ID NO: 186032 - DNA, 5962 bp, Cannabis indica
ttgtcttaaacaagacatatataagactcaaattctaaatcgttaggttggattgggctgatttaatctttaacttaagttaaaattgatataattttattacttagttatcatcaaataaaatacataatttatttcatatatataatttaaaattttttaaacatcggccgcgaaagcgtgaattgtttactagtttctatataaaaaaattaaatccgtgaaagtattgtatattgatacttttataatttgttttttttttttttttttatttctaatttgggctcattttcatgtgaagaataaaaaaagaaaggccgatagaaaaaggagacgtagcccaaatgaagacccgcagacgttgcacccacccaacccaacccaacccaacgccagtaaatccaaactccaaagcaacgtcgtctgctgcaagactgcaatcgtaaaagcacaaattgcagaaacaaacaaaactctaaaataaaaaaataatataataaaaaacaaaaaaggcacatgcaacatgttgtttcgattgcagcagcagcagctgatgcacaccaattatttacgcttcttctcattctcctatcatcgccatagccgtacggcaaatccacccctcgagctccaaactagtacgtctctacaaagatcacatccttctgttcttagatccaaggctgcaagcaactctaatccttttcaaagttttctttactagggtttctgatttctaatttggggctaaataatttcattcaagttgggatggaggttgtcgatgtcttggactctaaaccctcggtcatggtgaatgttaataccgacaattctgagaacgatcgtgtactcgttaagaggaagaccttgcaagctgtgctccagcagtgccagagagctctcgaattgctcgaaaccaccggcggtgttgctgatgatgacgacgaagacgatgaaggtgaagaagacgacaacactgcggaaccttcctccggcgaggaccggagcagcggcgaggccgaggaggtttgattttgagtttggcgtaattatttattaattttaatttgtttgtggcttgattttggataaacttcatgtttattgcctgagaaaggcagatgatgatgttgaaatttctatgtcggtgttgcttttgagcgatttgaaaattgtttccatattccgattgagggtaattgttaatttgtgttttgttctttttttaaacgttaggctttctctcgagtaattattatcttgagttgatgaccgaattattataattttgcgacaacattctgtgggtctgttacgatcgatgctttcaatggaagaaacttgcttaataacgttttcataactatgtattgtactaatcaaagagttacacgagtttttttcttaatttggtagtatctacataaacctgtaacaattgtgttactcaaggatgttactttcatcagtctgatgtttacccattttactgatgcagttgtgtgagcttcttaaatctagagttgagtgccctgatttccttcaaaagttggcttgcgcacaagcatctattccacaaaatttgacaggtatgcgctaatttgctagactctgatatctactgagtttttattaaatgaaattttcatttattaagcatttatatattttgatatcttatgtatttacaagagcaaactgtaaatacatatgttataattgactatttgcttctattctcttttagcagcagaagaaggtaattcttgggatgtggtcagtgctaatgatttatgggagggagagaactctgatttgaaagaagatgagtatgttctcgtgagccaggaggatatattagagggcattgcatgttttatgacagcatacttggagagcattaaacaaactaaggtaaatgaaactttgtgcatattttagttgattaacttctcatcaaagaacttttggttaatttaatagtgcaaactaatttctagtcactgggacaaatgcaaacaatctggttaagcagtatgatgtgtatgaaagccctcttagttcttctttctgttcacttggtgatttagtagttaaggcatatgagtcactcattaatgtcctatggtgcatctttgttactgagaatttttcttcagtagtaagaatatgtagcgtgttaacttaagctgccatgattatattttgcgataattttgctttcaggaagataaatgtctaatgttttaaatttgcaacatgatttgcaggatttgcctcctaatcaactccaagaaggtaagcttaatggctttttctggaaagtttagttgaatgtatccatatgttttcaatgtgtagaatgacaaagaagcaacatgtagtccatttcaattgcacaacacagtatgcacctgcaccgttagatgaaaacataagcttaagatgaaaatatatgaaaatgatatattgggttcacatgggaaggagtagtgaatttgttgtacctaataagatgaagagttaaaatatcagccagtacaatttgtaggctgttccactttgccaggtccgtgttaaaatctgatttcactatgattatggaaacattgccgatagggagtatcctttccatgtcatgtggcccaagattgaagaaactgggtgctttatttttaccttctcagcattaaataagctgtttaataatttcatcacttaaatttgtctttcgtttcatctagtgatctaaaaaactagcatttagaaattgtacaaataaagatgttgtcattctcagcacctaagcagatatgtgtagttttcacctaaacaagtttacactcaccaaagaattgtaatttgaatactaaagcgggtactcatgctttaaattctctttcagcccttcggaaaacattttcggtgaaaaagaagaagggaaagcttcgaaaggcctgggatggaagcaaagtcatttacaatgtagcatcctggggggctactgcaattgggtgagttagtaccaatcagaacatagataatacaaatggtttttatattctacatttgttatgctgcatcatttcaatactaatgtgtttgaacttggtttgtacttgcaggatataccaaaaccctgtaattataagagttgcatccaaagccttctggacatcttgccaagttatatcaaagcttctctaacctgatcactttggttgaaaatggtattatagtttggaactcaagtgtatttgtgggctgtggttgccaattcaattgggtatggtttctttcttgtaacattatttgccttctttacttgctacggatcgattggtgcttcctgtcctgattgtaatttaatcttgtaaatatttctctgttctaccactcgacgcagttatatgtatatttttttaaatttgttcacctttctggtgcaagtgaaattcgttggtaacatctaattttcgatataattgcaaaattaccaatgagttaatataattatgtattgacatatgcctcgcaacttcccatatttacattgttaatcattgggaaatttgagcttctatgcttcctagtacatcgtttggtatattgtattaagtcgtattatattgtattttattatattgaattgaattatatattatatttttatatatatatattttatgttaaattttaatttatattaaaatattatatatttaagtaatcataaaagttaatactgcatatagttttatataaaaatagagcataaaatacaatttaatatacaatacaatacggtgtaatatggcatacaaaattaacttataatttcataatataccaagttaataattctaaacaaattatgagtcctcatttgattgggactaaaataatcttctctctctcttattctcttggtttctcctctcactagtcactactcaggtggcatagcaccatcgtttgacgtacctttcctcaccacccaccaccaataatcattttagttaaaaatcattacaattttaattcaaacttaagcctaagaaaatatttacataagacactaatttatgtctttgaacacaattgtgcttgtgcatacactttggttttgatcgaatatatttactatttattttaatttaaaaatctgaaatctacattattagagtgaaaatgatattttacgatatttgtgatgattttatgaaaatttgacatctaaaattaattttttttgggaccttcgttaattatcgtttgccatttataattatttttctatgaaaccattgttaaacattctttttggcatctaaaatttataattcaacgaaccatcgttaatccttgttaagcatccttttcagcatcattttgatttggaccatcattgagcaccattttaccatcaagcgctcaaatatgaagttttcatcattaactattgttttaagcattgtttgttctcaaaaatcaatgtttcatggtcccatcattaaccgttatttttaatattattttggcttctaaaatcaagttttcattagacttcacttgtcaatcatcatttataaaatttgaaaaataaaataaaaatgtgacaactttcactttcttgtcatatttatttaattttgtaaactcaaaatgaaaatcaaacgaaaaaatttatataaaataaattaggaagtaacaatgctaaaaacgttagttgacgatagtctcttgaatgcttgattttagtggtcaaaataatacttaataatatggtcccataaaatttgatttcagaggcaaatatgatgctaaaagcgatagttgatgatggtcctatgaaaaatttattttagaagccaaattttcataatacatcgcatagtatcgctaaccatcatttttttctttttccaaattttaatttcaaatttttagatataaaagaaaaaaaaattgcgatcaaaaccaaaaatttatgctcaaatgattcaaaacatataaattagtgtcatttggatatttgcttgggttttaagttttggattaagttttcaccattaaaaacaaaatcaaagggtggtggatgatgagggaaaggtggggttaatgtcaaaacgatgttgctgttttgtgggaattgggaatgtggtgcttcgcggccatgggtagggggaggagaaagagaaacaagaaagagataaaaaaccttgtaagaggatattttagtcgcaatttgtagaagcaaacttttaagaaaattattttaaacttgcattgttagactgtgtaatatgctaaattcaaacttaaaatacacacaatgattcaacatgcaccatgaagaatttaaacctttatggggtggacatactatttttatatgtaatttaagatgtgtactgcatcattatgtgtattttaaacgtataaaataagtgtgcctatcaattttattcttttaaattatgggctaggtactaagaagcatttatacatgccccacaaaaaataaagaaaagaaagacgcgttggcaagcggaactttgcttaaaaagtaaaatgtctaagaggagcttcatggagacggtaaaacactaaatttagtgtgcaattagctctaacgtataatctgcagcatttttccgtgtatacactacagtgcacattatatagcatactcagcattttttttccttttacgattgtcttatgtataataatacaaactagggtgttgttcaactttttataatttttatgtatatatatatatatatcatatttatattaaataatataatttaaaatataacattttaatgtgtatattataaataaattaatagtgttgaaactaaaaatataatttgctattttaaaatatataaaaattaaagtgaagattttgtgacaaatattatcgtcataattattaaaaaat

SEQ ID NO: 186033 - DNA, 6734 bp, Cannabis indica
tgtaaaaattgtgttatatttagcacataaaaagaccttgtgatatatttgcatcaatttttagcattcacaattaaaaattttgatacaaattaatgtttttattgaaattataaatataataataattttatcattaattttattattattttattatgtaaaataataataaataatataaataattcatgattattgttatagttaaatatactaataaaataataaaaatgacataaaaataaataataaaattatgcatttatggtgatgcatattttatatcatagcaaatctagcgccaaatttgacacaacatttatcatctaccaaatttgcatcaccttataacacactactaaaaaaagcccttttttttttttttttggctgagttggttatattttagcattgaatcatttatttacatctccattggagatgatctaagtttaagtttcagattttgaatttgttattttatgaattggcttttgtatgtgagtttttatttcggctgctttacgaaattagtttctctgttttaaatttttaactagttgataaatataactagtttctttgtatcatatttcagcgttcaactttggtgactttccagtgactaagaaaactctgacgactttttcgacgatgatgattcttgtaatttttccgacattcaatgaaaaatttggatgactaatccaacagcaatgacaaatttcaatgactattccgacgataataattgctttaacaatttttccaacaatatttgtttttaaaaatattgttaactttatttatggtatttcatgcaataagttttatgcccataaaccataaaaatgtaaactaacttttcttttcccatatatttttttttggggggtaaattctctgagaaagccttgtaagttatagttgcatgcattatggaaaaataccaggcattcatcgaaacccactagggtttaattttatccaactttaaaatgttgatgttatgattccagacaaaagaaaatttattctacatacttgagactatcgagcaattacatcttcaatagcttccatctatgacagaatggaaaaaggcatccatgattttgcatagaaatagtattattgaagtgaacaacaggactgtttgaatcatttttacaatggaacagaaaacacattagatcaattagagataaggaggcttggactgcatttttgatttcttatgctcttccgagaacccttcctaccctgaaaaatcgactgattaacctagtaaattaagaggggagataggctcaaactgatccttgttcgaaaggtacacgcacaaatagccggccatgcagactaacaacagcagatgtgtgaagtggatcaattctcgccggcaggcttaccacctgaaagccaatccaacataaatgttcttaattcaacccatttaaattggaggaaggtgaacaacaacagatatagagatataacaacattcacggctctttacatttcatattacaagtgtcaatctcatactactgtaggctctcttctcagttattagttttttcagtaaatgtatgatcaaataccttctgaaatggtgtaataccccaaggattgtcaagctgttctggttgacctgttatgaccaaacgtccagctggatctgattgaactcgcacctgagtccaccataagagttgaacataagaacataaaagcaacaccatatcatagaaaagccattattatataaattcatataaatatataaaaatatatatatatatatatatatttataaattctcttccactgtcttcatttcttactttccacaaattaagttaaaatcgatccgcatatcatttcagaaattgacctacccaaaaaaggggggaaatcacaccatagaacatccaatggttatgttaataagtacatgcattttcttttctgatttggtcccttgctttccacaaaagcataataaacaattcttacacatcttttgacttcccaatcaactaaatgaaaaacttagcaactacaaaaaacgagttgaatctgctgtcttgtgaaacaagctaaaatattacacatcaccaagtgggatgggtcaaagggataaggaataaatttcctatcaccctctagcgcctatacgttaacgtctaaaatgtagtgacctcacatcataaagacaaaaatgtagcatgttttcctcaatggagtatagaaagttgacatgaaacttagaagagtaatacagtatctgctactgaatcagagcaaacttataacgcacaagctcactagcaaacatccataaaaacacttatactacagactatgagaagacgaaacaaataagcagaagattgcaacctctaatctagatcaatattaattgttaataattatcaaaagtgacctaataagattaaaactgtgcttacaccggtattacaaattagacagaaacaaggaaattgaaaaaaaaaaaagagggggcggggggctcaagtacctcttctcgcaggagcccagggactagtgcatatatctcgaagcaatccttctgggaaagtacgcagcaaatttagttatgattgtactaaagtttacatcaattaagtaatttggagactagagaagaatattatatttgattagaaaaggaaggccttatgcactatagccaagtaaacttactgtttctcgcacattaatcttcacccaatcagctggaggtccgacatcaactatagtagtgtcaactctacaaaatgcaaaccatgagtcgttgattttatcgaaaaattacacacaaaaaaactgtaaatgcatggaccatccaccctctctccccgtcttggtttgggtgttgatgggaggccttagtgaaaatcctgtacctcttttttttcttacatttttttcccctgtgaaaattgtaagggaggataaatttgttttccttgaagaatgttaacactgcattttgaccttcgttaaggccataaagcaaaaccttcataaactatagtattcctagtaagcattttgacattattatcagtactagttgccttgttatttctcaaattattaaaacagtctcattttggtccttcaattattcttttggttcatacacttataaaactgttttttgtttagtcatttttcaacattttccaagaaataaatgtttagggaccaatgcaataataaattaactgatagtgcccataaattaacaattttttaacagaataagacaataagtcttcaaggacaaatagtgatcaatttttaatcaacagacagtaaaattttatttttatcccatacagattctttcatctcataaggtaattccaacttcaaatattcagaaatgacattcagtgagcattgttccattcattcttctaattcatgaagataaatgcagatgcaaccaaaggcatgaagcattgaaatgagttaaatttgtaatatattgaaagaaaatattcgtaatattaactgcttatctgctgcagctacaacagctatagttttctcagcaagatctagattggggggcttgtgtttcagggaccctgatgaaaagcacaaaagtgtaaatgaattttggctcacgatgcaagttggcataaagaatttttgtcacaggagctcataccaatgcttttaaggtttttttcacgctttgatgcagaatttgagttcttgtcctattaaccgagagaaagtaaaaaaaaattgttattgttgtaaatgtcttggatggattaaattacaagaacattttgttaagcatgagaccttgccctaactgtaattacttgcaacacaagaaacttaatttaatactatattactacaatagaaatgacattattttaacaaaccttagctataggctcagcaacctcaccatatccaataagacgctgagcatgccaaccctgcatggcgcgggctgcagcatcccttcgtgccctacctgatccaggagtttggtaactacttgcctatacacaaaattaatgaaataaagttacctaaaaaaaccgttactaactaaattatacaaattgatcaagattgagaggacaaagtaaaatggggatgcatgtatgtgggggtattaaatgtaacaaagaacccataaaactataagcttgggcgtattttaactacatccagaaaacataccaactatgtagaaactaaattttacctccttttcaacattggtagactgggaaaagggtccagctggaagttggagttcaccaacttgccttttatgcttttcgtattctaaaagggcctgcacaaatcataaatgtcacagaataaaaaacaaaggtgcatttgtagaaccctccatgacaagtggcactgatatgattacgaaaaagataatcatatcatataaaactaaaagaagaaacaagtagaggaaaaataacatactgccctacacacacactctctctctccctctccctcatcttatgaactcgtgagaagttacaataagatccatatattttgttgccggttctcaatcttgaaacaaataaaaatgatagaaattccgtcacatatgtaggtcaactaaggatattcaactacataatattaccttttcataaaatatgcggaatgtccaagagactgttgtgcatgttctgaggaagtaaaaatgaagagattaagttcatttactgaaataatgtatttttcagtgaaagacaaataaaagtcagtaaataagtgtggtttgatatttatattaaaagcatcaacatatgatagaaacattatttttactgcatgagctattatagtacagtaaacaaaaaggacaaaggaaaataaaaagaaagaaagaaagaaagcgtgtgtaacaatagaaagctaattcaaaacataaatatcaagtatttttttttaagaaattatcaaaaagcaataaaaaatgcagcattccttacttaggaggatggaatgactctcctacttgccgccacaattttgatgcagtcacctacagttacccgtaaacaataagcagcttaatttcatgatacaaattacaaaacacaaaacagtaatctaaaaccccagatgtaactgaatgcagaaaatttccaacccaatgctccaaatatatttaactcttcctagtgttctgtcatgtttggaatatttctacaaactcataacttgcctacttggaaataaacaagtaggcgggacagaaagttagattcatgaacattaaaaataaaggaaggatcaatatattaacatttacataggctatttcacatgagcagcagccatgctcagtcctcgccctaataatataccagtttaaactatcgattaggattcagaaacattacatctttttttttattttctttttcttagggaaaaacatattaccacatttaccattctacattaaagtttagatgtttcttagtatttattcctctttaataaccttgagcactctgtgtaacaatagccataaggcccataaccatatgtcttaaagattctagtcttgtgcaaggtttatcaaaacaactaatgatgatggcttacaatgtttttacataagagtaagaacaaccatcaggtgcaggtggaaacttaccacttcatagccacccaatctaataacagctctccataatctacaatacatgacattaaagcaagccaatttagaggaagacgatcaaacccaaatacagataatttgattcgaatgggtgagcaaggaacgggcttacttaagacaattgaggggttctccataaaactttggggctttgaattcaaaggcattctccctgtaaaaagtctcaagctccttcatgaaagctacctgctgcgctagtgtaccatcttctggtgaatcagaatcctcaacctcgaccatctgttatataatcagcgttatatatggttacaaaaaaaaccataagtagatacaaatcaaactagtcgcacctgaacatcattgaatccatgctttaagtcgttctcatgtaaatggaagccattgccctcaatttcaatctcggtagaggcaatattagcattgtctttattgatgtccacgttccgatgctcaagtggtgatggttcactaagaccaccaccattacccttcttggcatcatcttcgtcatcaagatcagacaattgtgtaggtttgggggttaaggaaggagattgttgttggacttgaccactagcgtccacatcagaagcattaggcaacaaatcagggttggcctttccgttctcttccttcttctcgcccatatttatgatcgaaaccctaaaataaaggcgcgtttgggtaatatatcactcgaaaccaaacgtaaaattgagtggataaaaaaacagggttgaacctggaaagataagaagggattcaaaccgagtcagtgaggatatgtaagaagatgattgatgaactgagagagatagagagagttagaacatagagaaatggggtgccgtctccatctccatctccatctccatggccatagccaacactcaggaaactcggaactcagaacttggaactcagtcagttattagagtgaaccaataaaaatcttacccttaaatttacattacttgttaaaaaaaaaaaaaaa

SEQ ID NO: 186034 - DNA, 649 bp, Cannabis indica
aaacccaacaggacgaaatgactggaaaacaggaagtgcaacatactatgttagaattgttaaatcaactagtacaattctgactcatctttcccactcattgctcgacagagtagaccatctgaacagaggcatacaattgacatggattggtgagatttatcactttagttttgcaaggtaagattctagtcgaaccatctgaccagcatctttgacttattctagatcaatgatcgacgaaatcagctcccaaatcccaaaagatcagatctttatggttgcctaaaatcaagaaattgagagaataatcagtatttgttaaaaatttgtaattaatactatttattcaccgattactttataaaatagtggctcattttcactatttttcaagatttatttaaaataaaaagttattacgctgttaagattattatataatttttttaggaatattgagaaacttacttgactctggttttttaggagttacaggtggttatgggctggtcaaaaatcaaggaggaaaaagtgggattgatgttaatgagcctatattaggaaataattttaaatttcaaaaagaggggttagttgtttatgatactaagaggaggtgtgtagaagagggtatatgccagctgga

SEQ ID NO: 186035 - DNA, 3100 bp, Cannabis indica
cctgtagacaagaagaaaaagaaaaaatatgagaagaacccatagaaccttagctgctgtaagaagaagaagagatagaaaactctacctatttcgttgctgccattagaatagaaaaggaagaagcttgaaacttattagaaccctaaaatattattttgtgcagctgtcatttttgtgttgaagagaggaaagagtttgaaagtttttgaattattttgaaaggattttttgtggctgccgaatagtgaagaagacacctttagggtttgagatcattacctgataacttaccttttatattggtatattagggttgcatcaatattgggctgcatatattcttgttgggccgaatatattgtgaaaaagggagtcttatttgactcattctttgttgctttgaccgaatgattggagagagagagtaagagtctttgactctttgttttgtttcatattgggctcttggttgttgggcctgaaacataaatttgcatttgtgagattttacaataataacatatactgttgtgaacgcacattttaaaaaatatcacttttgtactatagtatgtatttttcttccttaaagtgtgttggtcaaaacaaaattccaacaactagatatatcctaactaaatttactaatagcttataaaagaattaagatagtttaacttacttttaacacctcctctcaaacttaggacaaaaacattttctactataagttcatttctaagaagaatgaaccttgaacaagtatgtaagtgaccaatactacaaactgtaattttattatctgttttaaattgtcatctatacttttagtgtcggttcatgaaactgacacctattttacagtgacaaaaaatcaaatttttggtgtcagttcctaaacttgagcataagtatcggttctaaactaacacttagtgtatgaaatatcattaaaatagcatatgtcaattttagacttacactaaaattaataataataataaaaaatagtacaatatataaaccacaaaccattcaagtcagatctaagataaaaactcaaaaataacaaatattcaaatccaaaactccaatatacaatatattcaagctaatgtaatcaaataatcagatcaaaaatttatatacaataccataaactaatttattgaggctcatattttctcaaaactaaccaaaattataaatacatatatacaattatcaatggttgccgaaagtaaagaacttaagtttatatatctaaatgtgacacaatgatacgtatatacatatatatgtagagaagaccaacgaacatcatgtgcgaacgcttggtgtgtgaacgccgacctgaagaccaacgaacaatgacggggtgcgaccggggtgacctagtgtgcgagcggcggtgagtgacaatcaatgggacttgttggtgggaaccagtagtggttgaaggtgctgggaacgggaggtagcgactaagagaaatcgagagagagggatgggaatatagtcgagagagatagagagagataaatgggcttgaaatgtagagttgtgttaggataatatgtatatatagtagagtttaatgtgggctattttttgaaacaattcaatagtctcgatttagaactgacaccaaaggagcttttcgtgtcagttatgaactgacacttatactcaatcagcatgtacattttctttttttttttagtcttagttattattttagtgtcggtctactaacaaacactaaagccattataggtatcagttatgaactgaaaccttagagttggggttgtctttattgttggttttttaataataaaaaaatatcccttgaatcgacaccaaagtctattttgtagtagaggacgcacactgagttacttgctaatgacattttcccatacaaaatacaagtcaatctcaatgttttttgtccaaaaatgccgcactagattggcagacatatgcacgatgctgagattatcacaccatgaaattggaggtcttgtttgaagctcaaacaaaagggtttgcagtcaggtaatctatgttgtgagttgagctaagcgtctatattcagcttccttgcttgactgagacacaacaagtcgtttctttgaggagcaggatactaaatttggaccaagaaaaaaatagaaccccaaggtggatcttctgtcatctgggttcgatgcccaatcaacatcaaatatcctgttagaaccatcttaggtgagatggagagatacaaaccatagtcaatagagcctttaaaatatctaagcatccttttgacagtctaccaatgggactctaatagtgtttaaataaactggtacaccttgttaattatataggacaattcaagtttagtgatgaggacatattacaaggccccaactaagcttttgtagggttgtggatttaaaatggggtcactgccatgagttgagagtttctcaccacctgtcatgggagtagtgagaccactggataattgcaccttggtcctcaagagtaggtttgtaatattcattactacaaaagttattattcttgtttgtcctcaaaatagtttttttttaggactatcactaataaaagtaagtgagttttaatactgacgcatatagttgagaatacctgtcaattttaaagagttttcaaatgtacctgttgatttaaaactgctaagagattagaatctcagacgatttataatcatcagctaaggtatagccgacaatttattatagtcgactatcggttctcttctctcacaaaactctcaaagacaatttaaatactgcttattcactaaaacattttaaaaaaataggatctcattcactctctcactctcaaaccccctctctcacacttttctctatctctattatcacctctctctcttccctctctgcctatttttgacgatcaacaaccctaaatggagcacaagtttgagaacgtggaccccccaaaacttaatgaggtaaatgtccacctcatctccttctctcttcttcatcttcatcttcttattcatttttgttttttagattcattctttttc

SEQ ID NO: 186036 - DNA, 2739 bp, Cannabis indica
aaaagaaaattaagaagaggatgaatgaaaccctagtttgcctattcaaaatatttgcttatttgtacaaaacagggtggtttgatggtgcagcggtaaccaaaaggcgactctattactataacctatgcatgtcgtgagctttataatttctcccgaactggaagtaacaaggaaaattacttggaagtttccaaataaatgatgactaacatgacttaaaaggagtggcaaaagtgtagtacaccattcaagatcttaaaacctctatgtaatagtatcatcacgtgtggtcacggcatactgagtcacaataaaagaagtttcaaacaacttggatggataacttgctaataaagaaatacgcaatcaaatattttggagaagtatggagacaaatgccgttatagtgcccatgtaaagtgttatacaatacatttgacatgcatttttggaaacaaattctcatttacattctaacatctttctattgagtattgggtcttgcaagcacagtaataagtaacaacaaatgaaaacaacacaaacaaattttgaaaaataatcaaatagtcctaaaagcatacctgctttctttgctgcacggtatagaagctcctcaatgagatgttgtgcagggtctccatcagggaacttttccatgaagttctcgacatgacaaaccacttcctcattgctaaaatactgatatagaccatccgatgagagtactaagaattgatctctaggacagagtctatggtgacgaagcgaaggtgaacaagataagtacggagcagtaccgatatactcattccgaaacatttccaataatgcatcattccacttgggctgcaccaacatacatacactgtgttatcatctgactttgtctcatgtaaaaattctttttcattgttatgtgaaggatgataattaatcaacatcttacaaattgatgtatcttaacatattgaaatggcactgatcattaaaatctaaagttatatttaatttcgcagaggctcaaaaataattctcagaagaatttgacatccaaaaaacaatgtaaaggtaatattttaggaggataaaagaatacaacagtgttgaccaagtttaaattttccgtaatagtaattgcaaaagcgctagtcacatggtttaaaaaatattcaagtaacatgacatgacttaatcgtctgaaattttaaaatgacggcaaagcatatttaaaatgactagatattgtggcttgcagaagcattcaaactgacttcaaaatctgttaactaatttcatccgcagaatacgagttaattttatctttcaaacaaccttgtatttttatattcagcagtgaaccagattagcaattccagatcagacaagtatcatatttttatgttaaattttaataataaatgaggtatatatcagatcaagtttattcgaagaacctgtttcagaaatcctgccccaaatgctctggtgaccttaagtcggcctttcactctatcatttactatacagtgtttgtcgtctgggtgttcgttctttattctaatgatttcctgcaaaatgtcaattgaaaatctaagaacaccttatatatccatcaataaaatgagtaaaagactacttattgttaaaagctgaggtcagtgtttttttatcttaagcagtaaaagccaaaaatgatcatatacaacttaaaataaataaaaaaagaaaaaatacaagggatccaagtcttttggttcatcctgatcttaatgatatagttgcattttctttctaggttaaggaaaaagagaacataagacagaaaacaccattaaaattattcatagatgcattgagagtagagacacaagcaattcttcatccagaagaggaaccaccatgcaagaacagccaaatgaggtactcaaaattttgttttagataaaaaatgatactgaaaaattggaaggaagcttcctcataatttcctagtttgaaaaagaaaatagagacaaaaggaattatcatgtgaaatgtatgcaagaggaagcttccttatttattgattatatccaatagacaaaagggagtgaagcactaactttgattacatcaactagaagggtaaccttgttttaaattgttgaaattgaacattgggaatatgaaatatcataaataattaaaccgcctttagaatgcacagctcattatatgaaaaatgatgaccccaaatcattcttcactgcttttttttctcaaaagaggaagagatctatgaaagagcaacaatctatacagagacattcatgataagatatggaaagttcgttcactggaagaaaggtaaatacaagcttgaatttgcattagtgggcccaccagaggtcagaataagcttcatcattttctccttactttaacctcgccaacatttttaggcaaaacaaaaatgaaactgacaagctaacaaagaaaaaaaaaagtacttttatgtcaatttggttttagtcctaatatatgtatcctgttaaattctaactgacatgattaccaagaagaagaataaaaggtagttacaaatatgtgtacttcgacatctctgttgaacaacttgtcatacatcatggataaccaaagaccaggattcattcaatgaatttgtttttctgcatccaattcccaaggagttgcagagaaacagtaagggtaataagccaaaaaaaaaaaaaa

SEQ ID NO: 186037 - DNA, 2162 bp, Cannabis indica
ctaaagtgattgcagcgctacaatctatacaatttttaatttgttgcaaattaggttgcagcgctagttgcaatagggggttttcgatagtataatttcgtaaaaatgcaaaaaaaaaaaaaaaaaaactaatttgatgtagtaaaaataaaaaaaaaaacctcattatatttttgttatttttatgtgaatttttgtgtttttataaatatacgtaaaaatgtaaattaaaaaaaaaaactttaagcataaaaatataattttttttacaaaagttaatatttaatgtaattatcccttcaaataacatgtacactaatgcatgaacaatataaattaaggacactcttaaaaagttcaacacaaacttgtaatattattttatcaaagaccaaagtcaataaaaatataaaaatcataaaaaagagagacacaactaataaatatgacaacaagtataaaaaaaataaccaccgtgaacaccacacacacacattaaaattctctaaactaaaaaaaaacttacaaaatgaaatcattaatttcaatgcctaacataataacaagacttaagatacaataatatcgatattaatttcgtactgtttgagaacaaatttcgttatgtattagcaattttaaatcgaacaaaattcattctttgccatgacataatcgcgattaaaattgaaaccctaaaaaattgacacaagaacaaatggtttaaagagtgaaagaatcatagaaacaaacacaataggttagaagttttagagttttgatgctaagaattgttacaaacaaaagtacttgaaaacacaacatcataagagaatcattaaaggaatcaagctcaaataatttttttacatcataaaatataaagtgaaaaagtacagaatattttgataaaaatagcaaaaacatgataaagaatcaatggtatgaatcactcttacattaactttcctatgtataattttttttatcctataagttatcttaggtcacttatagtgtctcattattttgtttttatacttattcctaagctggaatatgaaaacaattgatcaagacaagtctccaataatggggtccaaaaatttgtgccctaatggggaccaatcaaattttgaatgaaatgccaaatagaatttttgatcaaaccccactaaaaaagattgaatttttaattttaaactttttattgtagagaattgctaaaaaaaaatattattagtgtctagtatatttttcggtgtcatattgttattggtgtaattaaatatcaaaatataattttaaaaaatatcgtttaatcgtaaggcgtcactcataaaagatgatggatattattggtactcaataagaattgtttttttttattggttttattttgattagaatgacaggtcatgtgagattgggctaaacctaagaggaaaaaaacaggttatattcagaggcaaagtgagagagacaaaaaggaaactgcatgagcatattgggaaggcaaaatggctttggactaaatgacaaaaagaagaaagaaaaagaggaccagattgtaataaaaataataaaaaagtaaattatagtaataaagagaaaatattaagactattactaaagaagtccaaagcattagaaatgtatttatataatatgttgatttgattgatcattgttgagcatgaccttgaacttcacaaatttttagaaaatcacttgtgaaacctttttagattagtatagggtaataaaaaatttaaagaacaaaaattaatataataatgttaatagtaaacttatacaagaacttattaggtaaggcactctttttaaattatttagtgatattttagtaaaagaatattcatgattagttagtgatatactttttaaaagttaattttcttcaaattatattgagatttgatatttaattataccaatagcgatatgacactgaggaaagtgctaaatactgtgccttttagcaattctctttacaaatgcaattacactcaattatgagagacttaatatttaattacatcaataataatatgatactttaggtggtgttaagtactactagtgtattttaccacttctcttatatatagagaaagagatatattaaaagacactggtat

SEQ ID NO: 186038 - DNA, 6027 bp, Cannabis indica
aaatgtaaaactttcactatttcaattaaaataattattagtgcttgaaaactacttcaaaacaaacatgatatatataatgacatcgtaggaaaatattttttttttgttggtaaaattcctttatatttatttttctttataaatttaaggtgttagttggatatcaccgataaatattgattagattattactgtattagcttaaaagttttacttttacgtgtacacagtagtccagttggtatttaatgataatttttaactaacacttttaaatttataaaaaaaaaattaaggagattttgtaaaaaaataaataaataaaagatttaagtgtataaaaattaaaatataaaaaatttcgtccactcatttttgttttggttgaaggtattatatatatatatatatatatatatatataaatttatatttgaattacacttaagattcgatcaccttatatatgtatttctaataactctctattactatggttagtactaatggtgtatttggacatgtaatatttcatctcatatcagttaggggtattataaaaaaatattggaacaattacttactacatgtataagaaaaataattatatgtgtaataaaatatttaaatcttactgtaaattactcaaaattttataaaaatttacaattgaccataaataactataacatacttaataatgaaacaaaattaaaactctcctaattatccaacaagataaagaattaatcaaaatatcttttaatagaatcctttttctctaatagattatgtaaaaagaaaaaattacaagtatacatatatctataagttaaacgtatgtaatgatcgtttttttattactagtcaataggctcggctttagatataagcaggctagattcgtgcctagggttcatattttttgaggcctaaaataaaaaataaaaaaatttcattagacttttatttaagtgaaattaagtgtattataaagaataaatatttatagtttagttgatttgagtataccacatgttatgtaatgttatgactttgaattccataatacttttttctcaatattttttttatatactttaaaaaatgagagttcaaaaatctaattcgttttaagctatttttttctcagaacggccatactaataaaaaaaaagagagaaaatgattatttccacataggatgctttactttgaatatagtaagagttagatccaacggttgagatcaactcacaacaactagcaacgttacttatatatgtaatataagtactgaaagacagctaaaaagagaagtcacttcattaaattaaattattaaaaatttaaaatgtagccgttgccttactaaatcaattctttccgtaacggtcacattgcaaagatataaccgttaaaaccctgaactcctcactctatatcatcaccccaaattctcactcattcaccattcaaatctctctcatctcacatacccatttcttcaaatccatccaattcccctaaagtctcagatttttcccaattccgatcgatttcccattatgggtctctcgattaccgccgatccaccaagctgtgtgactgaatcccattacaacacccacaaggtcttcttgctctgcaactacattctcctcggtgcagcctcaagctgcatcttcctcactctctctctccgcctagtaccttcagtgtgtggaatcttcctcatcctcctccacgtcatcaccatcatcggagctgtttctggctgtaccgcggcctcgaggggttcggggaagtggtatggggctcacatggtggctactgtgctcactgctatcttccaaggctctgtttcggttcttatatttagtaggactgggaattttcttgggaatcttaagtcttatgttagagaagaagatggtgctgtgattttgaaattggctggtggattgagtgtgttgatattttgtttggaatgggttgtgttgactttggcttttttcttgaagtattatgcttatgttgaaggtggtcaaactggtcaacagggtcttagggcttacccaattaagaggactgctaaggttcagcaagatgatgatttgaaggattggccatggccattccaagtctagactttctttatttcttctctttcggtttgataatataagatggccatatgcaatgaccatggatgatggatgatgttgtgccttttattgtatttggttctttaatttgattatattcatttgtttatgtcatttttgcttttgtatattttgggatatgaaatatctatcttaatattattactaaatttggtccaatttgtgtactcttcttttacttcatttttgttttcatattgattttaatagaatccaacaactcataaaattttggtccaatttttgctcattgttaaaaaaaaactaaaatttgctcattctcatttccatcaactcagctttgtttcatattcgttataataattttcaactacactaaacttgaataatttgttcaacactaaaaaattgaattgatggaaatgagaatgagcaaattttgtagtcaaggacacaacacaacacacatgtgttaagaaaaaaatcatatataaatgattccctcaacaatttctttacagatctaaaaagaaataggtcatctaacaatattagtctggaattttacaggaaaaaactggggtaggcagtaagtgtcaaacaattgctaaaactgcaatttattcagcttcaagttcagcaccaaattgctccagccgtttagcgtctgcatctagatcccggacgttagcatggttaactaacccatcatcctcacttgcatgtatctgtctaccgccaaacctaaatcccaaaaatatgagagaaacattactagtccaattcacgccaaaacatctcacaaatgttcaagaggcaataccactaacaaagataagactattgaataagaattaccatcttccattcatcagttctatgcacttttgagcatccttcctgtccttgtatcttactaaaacaacaccttgagggtgattctcgcacacctgcaatattatcagatcaatgaccctatgccaacagatgaactacccaagttcaatcagaacatgccgatacgaaacattaacccaaaacttccacacacaaaaaagggtcccttaaaaattcagcccaacatctagagattcaccatagcatagcactaaatgaagaaagaataacagattaagataaacaaatcaggaagaaaaaaataatgattttagagaaaactcaaggttatcaaagtcaatctccaagactagcaggatgagggagaaaaaaggccaagaaattcaagctaaagctccacattaatattagtaataaaaatgaaaaatgaaacagaaaagaaaattatatctctcgcaacattcccaataacttcattgtatagttgaattaccttaacattgtccagcggaccaagctttgaacattcctcctgtatgtcagcctctagctcagaacgtaagttttcatcggcctgagaaagatgattttaacattcaatttcatacaagaatcagtccattcacatgcataaggaataaggactagtcacttttttttcttcaaagaaactgaaacaaaactatcctttcccccacacaacacacaaatatcatttctattgaagtgaactagtacacaaaaagaacatattaaaaagaaaatcagtgttatcctataatcataatatgtggatatggacaggacagaatagaaatccaactattaaatcccgaaattcctgaaagaattactatgcagtagctacatcgttaaggttttcatagagatttcctaagtaaccaactcaaaactcagcgtgtgtaatcgtaatcagtcagtagcaacagtggatcctttcgttagtataaaaattcacattacaactagagtgcagcaggctagtaaataaccattgagaatatagttttaagccaacaaaattatttatcctaccctcatttcagcaggcatgaacatataacgaagaacaacagtagctggaatacacaacttcgcatcatcacgaccacctgtgtcatacagaaaataactatgttgatgaaacaagtaaaaaccatagcatagttcacagaaagactgcttccaagtatatataatgagcgcaaactgagaaaattcactaaaattcaggtaagttcaaaaggcaaatcaaattaatagcacactaggatctggaactattaggcaacactagaaattttttcagcaatatcatataaaggtatattaataaaagaactattaatgcagcatttaaaagcttaccccatcctagcatcttatcttccaccttcttaagtttctttttcttcttgttgtcaactttcttggaaataaatgtattccctgcatttaagagttaatgagattacaatagtgggtcactgtaaaccttatgaagacaacaaaactagtcatttaatgacatctcaagcagcaaagttcctttctagaacataatgtttggtgtacagtaatgtatatcaaacagtcattttagcctagtatgagttactgcgtagtattaacagtagttaatagaagaaaagaagataaaataaaatgtaaggaaaggaaaggtgtgaaacaatgcaacagcaataagcatgagcgaaatgaaaatacacattgataatagtgaggagggtcgaagctggtacctttctgctcaaatttggctggggtgactgtcattggaatcccaccaggacgaaaaggtgctccatccagaatttgcaaagccagagcaactgaaggttcctgaagtacacacaaaataatgagccaaaagaagagactgatattcaaatatcacacacaataaagcatatgaaagttattaccttcagatatgtaacaagtgcatctcccttctttcttccagtctctttgtcaacataaagctttatacggggctttttggtttctgtatcctaatttttttttataaatgtgctcaatgagatagggaattctaaacgttcagaagaatagcatagtttggtgtccaagtgtgtgtgtgtttgggaggcataataagaactttgatatatatacttgttatgcaaagaaacaaagtccaaacatcatctccacataacaacaaaacttctagaaatttgaaggtaatgaaaagatcaaacttcccgtgattttcaaatgcaggtaaccacaaaattaaaaagtgaaacatagattgttttagttaaaccaaacgaaatacctcctttattatcccgcacttggagaatacttctaccacctgcaaaaaaactaccatattagcatattacccaaagtaaaatggtcaggctagaaatagcaatgatgaaagcttacttcatcaactgtcacgtcctcgggcaacccagtcacatacacatgagtatttacttttaattcaaaccagctatcaggaggcttattgggttcctgtaaaagtatatataaaatacgatacataagaaaccaatgagttcaacaaaacagatcatatggtttaaatgtttggacaaagaaaaagaaaacatggctatccctcccaacccacagaaaccaaccaaaaaagtatcaaattcaaatatataaagacaatagagcagcacaagatcagcagaccttcttagcagcttcctcatcaggcaattttctcttagcattttttccttccactgcctcattgctatcatcaacttgttttgtagaggaatcaggttgcttagatgtattatcttcttcacttgcaggaacattagaaatattggcagtcgaaaagacctcttcttcttttaagaaaatcatgtcttctaacttatattctcgacctttgctatctatgtcctcctatagcatattagcatgtacaatcaattatatatataaaatatatata

SEQ ID NO: 186039 - DNA, 1265 bp, Cannabis indica
aaaagaaaatgttaattaacaaatgaattattaacagtttaacaccaccaatataaattgagctccccaaccccattcatagttcactgccttttctccctgatcaaaaaaagagcatccagtgagtgagatgaaaacatggccaataattaatacatcagtttgcgtttcgtacgtaaaattcttcacacattttatcatccaaaaaagtaaccaaactggttcgaacagcagccactaaataacaaacgaacttagaattttgctcttttttttttttctccaaatcatccttatcaaaattcatcatcaaaaaagaaaaaaagaaaaaaaaacgcaacgggtgacattcagtttagatttaagacagttaagtaattctctatttgtttcaaatttgttgaccccgacgattaaatttaaaacgtcagaattatacaactggtgtcgagatatatagataagtattacgatataggtttcttacagcagattcggacttaaccaaagtttacaggcattttgattgcccttggaatcattctctttaagatgccaaattgccaatcatgaaaactttccgaagtattattcaatgactatttcttttcctctcttgctttgcacgtgtgacatattctggtcaacatattcaattgctctaatcttaacccgcacgggcttttaatttgttaattcactgccaagtgtcccttaatactttttctttaggtcaattatgtgaccaaatatgaatcggataagttactaccattgggaatatgccatatatcttaccttgcttgtgtacgttgaatcataaatttgatcacccaactagtagccctaagaagaaaactcatgaaaattattaaaataaaaaaagttgagctttttatttatttattttttcaaaattatttggccactttcgttgaaaaacttgaccagtttttttctgtatacaatatatactactagtacacactcatttccctagtacagtaaagtaaagtaattctaatttgagtggaagctaaagtaaattgaatatagaactaaagctttatgatgttatgtagcataagaagcaaattcattgtgatatttatttttatatagtatacttttagttttatttatatttaattaaatagaaaaaatcgagttaagacacaatctttctaatttctacggtcatacttgaaggaaattattacagcaatattaaaaagattattaaaaaatcatgattacccaataat

SEQ ID NO: 186040 - DNA, 1950 bp, Cannabis indica
aatctaattaattgatctatagttgaaaaattaattactagacaattttatgatattatgtgtcataaaattcacttataaataatttttagaaaatttacatggcatattgacttttgtcatttttttctattaaaatattgccagcggtatttttacttttttactgtgtatttttataaattttataatgcagtatactgtgtttattttttagtttattttttgtttgttttagtgttgttttacggttgttttccataatttatttttttaacgtcgatttcactgttcttgctccatcttgttggaattaatgattgttttctgggtgttctcgtggtgctgtggtggttctatccgtgggtgtggaagatagaggctataaaatatattttttcttccttctctatagttattttgtggttattttttttgattttggttctcctaaaaatacatttgacgagctcactagaaaaaaaattttgaggtgtgtggttcttttatgtttttctaaatggttatatctgcttattgttttacatttatttttgtgttgttttagtagtttttttgttctgattttttaagattgggcttgcaaatataactgctattgcattgggtattgaggttgtgcagaacattttttaatttttttttaatcatgtttttctttcttttgtttgatttgttttagtgttgttttacagttatttaacacttgttttgccatgattatttatttgacgtcgatttctctttttcttttcttaatctcatcggaattaatggttgtttttcgattattctgttattttttgtggtggttctctccgtgaatgtggaagatggaagcctcttttttttcgtgtttacagcgtaaaagaaaaaaaaaaattgatcaagacagtataaaataatttctgaagtgtggcagtatttttgtaaaaatttaaccaaaaatagtgtttgcgtaagtttccctaatttttttaactcccaattttatgtcatcaacattgggcaatgcataggccggttagatattttgaaaaaggcactaatgtactgaaaacgaatctggaaaatttcagcttcacaacaaaatatgtctgtactggttgggttaacttgaacccaaaccagctttagcccaattatgttttggaccttaagtttgatgtgataaaaggctgaagacccttgaccctaacactccatagtactcttatcatttatagcccatctaatcggtttctttttgtcttattgctttctgtcttttttttgtttgttttggtttaataccaaataatacatatgaaaattagaagaagaaaaagaagccaattattcataacagggtcactactactataaaatgctttaataatatatatgtaaaacctttccatttgggtttctcattcccactctttctttttcctttggcttttcaatgtaacaatataatataataatgttgtatgaacaaagaaaaattaaaaagattgtcccacaacacaatcttaaatcttttatgggttcctgtttggctccttttccattccaggtgtaatgcacaaaccctaattttgatcaattccagcagcagtggctttttagtcactgtcaaccttgacactaaagcaactttttgtccaacttgatagactcatgctcatgtctttgttaggttgtctggtgtggtgtgggatttatgttaataatcccttttgtttttttctccttttagctttgattactactaataatattattatattagtataatttcgtgactaattaaaccattggtgtttcttgtagccaaagtaatatgaaataacatggaagtagaatgagaattttccaggtgatgtccgagtccaacaatgctataaagtgacgcgttttatatgaatattaataattatttttttt

SEQ ID NO: 186041 - DNA, 3052 bp, Cannabis indica
tggatccataaagctgaactcaacaacagcagccatggccaccgatttcaagtccatccccataattggtattcaaaacaatcttttattcaaatccagtcatgcagacccttttaactattgatcatcatgataagcttttctatatgtgtttgtagatattagtcctctgttggccaagtgtgatgatccaaaaatggctgaagacccaggtgtttctgaggtggttaaacaattagatcaagcttgtaaagaagcaggctttttctatgtggtaatttaatcttttattagagattttcagtaatgtgtttgctattttctgtatttgaacaaaaacccatgaaaaatcttgtctttatcaatctatttagtttaaattttgaaggcaaataaaaaaaggtttggtttcaacactttgcttaccaagtgtttgaataaacacccatgaaagataatgtctttaattgttatcagtttcttaatttagtttggattattagtataataagaaagaagcctttttgtctagtttggctaattatgattatgattgtaattaaatttaaagacttgtttttgattcataattatatatgcagaagggacatggtgtaccacaatctctttttaatcaagtaaaagaacaaaccaggaatttttttcaccttccatatgaagaaaaagttaagatcaaactcactcctgctactggatacaggtgtccctatatatatatttatatacatatacagtagtgtatgtgtgtgttctgggatttgtgctaacataatgggagaaatttttcatacagaggatatcaaaggattggagaaaacataactaaaggtgtaccagacatgcatgaagccattgatgtaagtctttattttctttctcactgtcttacaactcaattttgattcttcttttattctttctttctatgacatggactattttgcaacagtgctatagagaactgaaaccaggggcttatggagatcttggaaaagttatggaaggatgtaaccaatggtatgtcaaaattttggctcacaattgtttctttctatggcttctcagctatgaaaatctagctttaagccaaaaaaaaaattactactagcctaattgattgacattcagctttaggggttcatatctctcttgtctcttttgaagataatagtatattccttgcatctatcttatacagactttagggatgtaaatgggagcggggcggggatggctcccccaccccgtcatgtttcaaaattcttatcctcccatacccgtcttgtcccatttaaaacggggtcaaaggcatggtggaaggggttatgttgcccttccccgtcctatccccatcgaataattccatttgagccctcattagggtgggtatccacgagtttggggactgggcgggttgatgtttatcgaaatttgatagtttagattctttctattgatgaatgaggcttatgttttgttgtttcttattatgatctttatgcaggccacaagaccccccaaaattcaaggatatgatggaggaatacattaatctttgtacaggcatgatgataaacacaaaccaaccaaccaaaccaactaacttttcttatttaaattctaatctcataattttcacattgtatttttggtctgaactcattatttctgcatcatcttatctcagaccttgcaagaaacataatgcgaggaatcgcattagcattgggtggatctccatacgaattcgaaggagacagagctggtgatgcattttgggtaacacgtatcatcggttaccctggaaaatcatcagaaaatagccaagagaagcctacacatgacattggatggtaataactaatataatgaattgatttggtgctctcactttctttatggcttcatacatttctgatttactttctttctttctgtcaaacaaatccagtggagctcacactgattatggtaagcttctctctatatacactttcaatgttgtgacttgtgagtgtaataataataagagcatcaatcttattcccctaattaatggattttcatggcaggtttgttaacattgcttaatcaagatgatgacataactgcacttcaggtacaaaataatgatatgttcacccacaaattacaccaaaatattacacacagtgaagtgacacttttataatttgcgttatcgttgttggtataatttatgtatgcacaacattattactcatcatttttagtcatttcgcaaaataacctcactctttgtttggcctcaaatcggaaacgatttcaggtgagaaaccggtcaggcgaatggatatcagctcctcctgttccgggaacatttgtgtgtaacattggcgacatgttaaaggtaacagaaactcttaactaacaaatatggtttttgttatgtaataataccatttctctaaacaaacataattgggaagaactgcagatttactccaatggcttgtacgaatcaactttgcatagagttatcattagctcgcccaaatatcgagtttcagttgcatatttttacgaggtattttacttactattcgtgttaaataatttcgagtaaatcaaatagagtaaggagtgttgaatttccatatttggttgttaataagattttattttcgggttgaacagacgaatttcgatgcagctgttgagcctttggatgtatgcaaagccagagtaattggtgaggctaagaaatttgatagagctgtttatggagagcatttggtaaagaaagtcctcacaaattttgtgtattaagatttaagatctcatcaccttaataagggataatttcgaatacacaaaaataacaaaataaaaataaaaatatggttgtacgtacagaatttcaaacatttttacaattttatttaaaaaaaaaagacgatcttttaatgtatttttatattgtactcttattaatttgttgttatttttttattacttttatataattttttttttgtttttttatagaata

SEQ ID NO: 186042 - DNA, 8178 bp, Cannabis indica
taaaataataaatttgaaattgacacatatagaaatgtgttgaatccttcatctagagtgtataaaatacaagatttcaattatttatgtgaaagattattgcatcctcaagtagaaaaaaaaatctaaaactaacatttgagtgaatactaatgcatcaacaatgttttaatcaaattccatcgtaaattatcgttactctttattttttaccatcttttaagtcgaagaaacaaatttgcatggcaccatcgccacgccaacacatagttaaagcattgctttattgggttggttaaaaatcaaatttttatggcatcattacaaaatgattgttacaacatcgttaagtattgtttaatattgttattttagtctaaaatcgagtttttatggtaccattacaatatcatcattaaagcatcgtgttatcatcatttttgaccaaaaatctcaagtttgtaaaggcaccatcacaaaagcatcactaagcattgcaaaacatcactaagattaaaaatttgcagatttttagttttaaatctgaaaaagagaaaataaatataaaggtgagaagccaataaatcattcattcatagatgggtttgaaacatttaaattagtattttaaggcaatatttgagtgtaagttttggatttgattttcaacaatccctctcccatggggttagtatcattattacaaaacgcattttctataataattatatatttttgataagtaatgttaatataatttatttaagttcggtataataagatgcataaacgttcaattttttttctaataaaataaataaaagagagcattgatgtaggatgtaaagtaagatacacaacgttcatcataattaaagaatctaacattgacgcaaatttgcgttaacattttgatacttttattgagagaactttccccctttcgcagcaataaaacacgatacacaccctaaaattatacaattatgtaattcgaaacaacaaataatatagaaactggaggatgaagcaaagttcaggtttttcaaaattaattgagcaaccaaatacaggtatgcaaaagcatggatacaaatacaacaagagaaataatattttacttggtcaaagttcagaagttacataggacgttaagaagaaaaaaaatcgaataaccgaggcagaaacaaactactacatccaatttaatcgatcctgagaagaagctaatcctgtatggttaaactagtaggaggggggcaggaactggtctcacttccaaagcttgacaaacttatcatgactggctgaagctaccaaacctgtgagaggggacacggccaaggctgcaataagtccttcatgagctgatattgtcattgtcttgttttccatcatgttccagagctccaacgactgcaacgattgctttagtgttagcatgaaacaacttgtagcaaaactagtagagactcaaccatctagaccctcctaaccagggttggattggcaagactgtttttgagtttctaagactgttatgcttttcgtttttatttactatacagttcgaaatttataagcaatgctttctaagaatctctgtttaaaactacgggagattaaaattgaaatagaaatacctggtaacagcctacaactaacagtgaaggataagtaggatggaaaacacaggaatggaatttatttccgctgcagctcaactcgtgaacacattccccttcatttcctgacccaagcgaccagactctgacggagtcctcactcaccgatgcaagtaactcacccgaaggatcccagcacacagaatggactggcttagtatgcccctgcataataaaatcatgatccaacataaccttaaaaaagcaagaagcttaccaactattccctgctgtaataaacttaaatattgaacttatatgtattttatcagacattacctagttttacaaaacacaatcagatgcccatcttatgtcacatcattctttgcatcactatctatagtactcactcctcattgtttaacacgtggaataaaaagataatatctatcctaattatttttgttcattcattgtttgttggtaataaaatttcacacgccaatgctcagttgtatctaaattaatattacggattaaacctgtagtgaattccgacaaacttgagtctccacatccagtatagatacaaggttatctgcagctgcagccaggtacctcccaaaacggggttggaatctcatctgtgccgtaccaccctaatatatcatacaataaacataagtaaaatcattcacaatcactacaatcctactctgttagaagggagaaaacattgaaaaagaacaagtcaatactctaatatcataaagacttaatgaaatataccttgaacactctagcacaactgccattgttaatactccaatatcgtatctcaccatcgctgtcacaagagctgagaagatcttctttatttgggtggaagtctaatgacattacagtgttggaatgtcccataaaggtgcgtagtgaataaccgggctgcgtccaacagagaaaaattagcactcaaatattaaaaattcatttactcattcaaataacacaggaaaaaagttatcactatttaactacaatcaccacttaagatcttctgagaaataagaattcaacaattggattcattagagagcaaaaaccttccacggtagtaaatataactaaattcactttttatccaatcactgcgttaaccctgatacgcatccttggagctgaacctaattttaagctataccagcaatgccatgttaactaccttcagagcattttatcccatttatgatcctttccctttggaaaatttcaacaaattcaatttgtgggaagtaaaaacaaccattaaatcccatttgttcaaaaataataaaaaaggagtaaccaaaaactttggcacatcatccagcaaaactttccaatgctttggaatacaaaaaaaaaacactttagagaagattaaaaaacgttaaaaagtattcttgagaacaaataatacgcttgaacattatgattcagataagaatggatgaacttacattgtcagcatcccaaaccctaacagttttatcaaatgaggacgtagcaagccgtgacatgcttggactaaaacgaacatcagtaatcaatgctgaatgttcctcaagtgaagttttagactttaaggaatccgtgtaccataatacagcctgcattattcattaaccacggtatcaatcaggaaaagaagttcaacattcaatcataaagcagtttcaggttagtatttcacaaaatacatatacatataagtatgcatcaccattacattagtagctcagcatatagagttatagagactaattcactcacctttttatcatggccaccactagcaagcagttttccatccgatgagaagtgacaacatataactttgctcgtgcttgctctaacagaatttacttctgcaaatgtaaaccctggaagtacaataccgtcacattcagtcaacagaccagcagtaaactcatgcatctctcctttggagtttaattaatcaaggccccccaaaatatactaaataatagcaagtaaattctcataatctagaaagcaaatataacaatagcaaacagatagaaagattgattggaaagagtatacttgtagaggacaaaacctgcacacaattagtgaaaataatttagttcctggttcaataccaatggcttatatcttctagtggaacatatcattttcatcatcaacccaaaaccctacaatggataagaaatagaaaaccaacaaaataggcatctcaagtcttaaccttccattctgtgcatcatcacaaaggttaaaaaaaataaaggaacgatgttgatcaaaatagccttaacacacctttgctaacatccatacaacgaccagcagcatctctggggtctgcatcatcatgggataagaaagactccacattgtcctcgagggatccatcatctacaaatcgatccatatcagcctgcaattcaagatctttatcatcccactgccaaaatggaatacaaatgagaatacatgcaactgtcaattcctttcgcaaataaaagcataggaagaattcactcaccaactgatttgatggtgatgtaagagtaccagtaccatcagctgcaaatatgaaaggctttgaagaactaccactatgggtcaatgcaggcattgagatcacatccccaggtgtgtgagttgaaggtgttgagggagctgagcttggtgaaggtccagctgtatttgccgttcctgagctatttgcaggacccgaagatgacactggctgttttcgctttctaccagtctggctttttgaacccttaaaacataattacagcaacaatgttagagatccgaataagtataatgctcatcaaaatgatccagcaacatttttacatacgcctctttgcaagattgattttataaaatgccactttcagtaattattctacctactcatatgcacgcaaacagttagaaaaactaatgttgttttaacatctacactaagactgctgcttcaactgaagttaaaagcttcctttctaaagtgataaaacatgatataagaagattgtgactttgtacaaataatgcacatataataatgcagaaaggaaaataaaagaagatatatgaggatggataagcataattgaagacttctgtagggaagagctaaacaaacgtacctggtcatttcctcgaaaggagtttgatatgctaccgtccatggtcacactgccagcaccacccatcttatcttggtgtggattgtgattggaactctgtgactgctgatttgaatgttgctgtagctgctgtgacagtgtactgttctgttgttgctgttgctgctgctgtagttgagccatttttaactgcaaacaagaaagttgaaaaatcaaaatggtaacatttggaagagggtgtagaaacacacacagcaacaaaataagaaagagaacagcacaaaccttaatcagcatatccgtatctccacgaggcaaaacatgacccccactcccttgaagttgggatccaacattgggaaccacatctccaacagaactcgaaaagccatcctttacaagacccaaatttcggttactcaaaagcattctaagtcttctattttcatcactagcagatggtgaggacaaattttgttgtgcaagcataagttggtgttgtggtgtcaacatctgaagttgatgaaagggctgaggagcctgcataaaaggcttttgttgctggagaaacccagtgcgaatatgatccagaccctagaaaggaagcaaaaaaaaattaagtggaagtatatttcaaaatttctagcctcagggtcaagcatattttgatggagaatactactacactaggccgtattcatgaatttaatgtgtcgcaacgtgatggcaacaaaaaaatatagcgtataaaacttactgtcagaggccacccttttaaagtcaaattgtttcctccttgatttgaccctgaaacaatgaatcatacaagttagctctgcctgactgccgctaatgatcataacaaatactattagaatttccagaaatgatagtatgataataattataataatgcagtattattaaaatttctataaatgatgtattcctaaagtttttgaatggtaataataggacgctgcaaactagaataagtagatgccaaagtaccaaaatatgaaactaaaaattcaaaggaatgtcactatcgctaacaatggatgaagaacttaaagaagaataccgggcattcctactaatgatccttcttgaccagcacctcgggggttcaaaactggattagtttcaggctttatgtcctgaatccacataaatcaaaacaatacagaggttaagctaaccaagttgcaagcataaaacagaaagatgagaatccataccggggtggaccctggcaattgttgatttcgagcttgaacttgaggagacatcgctccagctgaaccatgcaatacttgcctgaaaagcaaaaggttactggtaattcaataaatgttaatggcaagattaaataccagtagctaaattaggcctaacttaatgagtggttatctgaacaataattatgacaaatattttgctctcgttgcatgttgcccactcatgctctataatgacgtgcccaaaaattcttaattttgaagaatttaatttatatcaataagaatcataaataaactaaactcaacgacgacacactgcatctgcatctgcatcaatttaatacataagcaatgtgattaaaaaaagtaaaaaaacaaaaacaaaaaaataccctgatggctggctggatgttgcaggtgactttaatatggaggtctgacttgttggatccaaaagttggcccacactctcaccaaatctttgctgctaaaaacattaatatattaaaaagaaagaaaaatccaagctggttattatctttacattgtcaattctcaaaacctcaaaacaatcaccaactacatccctaccttcatagctgcatcatctaaaggatctctttgagaaggcagctttaatcgctcctcatacatctttgtagccatggcattagctgttcctggattttgtcgcatgagcggatcacttccaacaagtccattagtagtaccatttaaaatgtggctcccttctcttcgctgctgttgtggtggtgcctgctgctgctgttgttgctgttgctgttgctgttgctgttgctgctgagcatgcctctgcaacagaagttgttgcatttggatgtgctgctgctgttgttgttggtgctgtggttgctgtggttgttgttgttggaactgctgctgctgctgctgttgttcccttgctttaattaactgtgtctgccatattcattaatgccatgaggttaaatagaagctatctaattagtttttgagacaataatttgaaggacaaccttgtaaaacatgctactttcacattgcatctgcagtaattttttgcatcaatggacatagtgaattaagtgtaggattatgcaacaaacctcaatataagacgcagcaacttctgaatgcttctcattggttctagctataaatatatcccagaatacagaccaccattcaaagagaaagcctccaggagcatcaatagctgtaaaccaacgccccacaatccaaaccaattaaacccaaaaaaaaatacatatacaatatgctgaaagagaagatctaggcattcaagcacattcaacttaagatacttaccaacaggatccgatgacactttcccttcagcttggaatgcttgagcagaagcctttaaatccctctttactaaataatcgtggatgtacacatctaacctgttaattcatagtatattatatattataatagtagaaaaagaaaagtcaatttttaaagcaaagactacacattaaaagaaacacacatttagaatcccaaattagcatcatagaccctaaataatgttaaaataccagatgaggtaatgctagcacaacctaaataatgtttaagtaactaaaaccctagcacaccacagatggaacattcaatggaaaatgataaatagtaaaaaaaaaaaaagaagaagaatgaagaaacaaaacagaaaacaagaaacgaagtagaaacccaagaacctaaatcaaccaagaaacaatgaaactagaactcacattttatctgcttcccagttggtctgagccatattgttcagaacacaatacaccaaataataatgccagatttccgagccactgactacttgttctacttaaattcacctctgaataacaccatatctagaacaggaaacttgttaaactttccgttaatttacagataatgaatccccattgaacaaaaaaaaaggaaaaaaagaacaacaacaaagctagagagacaaacacaggaagagagataatctgtaattttagcttatcaaattacataaacgaataaataaagcaaaagattgacagatatacctgcaactccgaaacg

SEQ ID NO: 186043 - DNA, 2295 bp, Cannabis indica
ttttccctgttcaaaaatcaaatcatattgggatagtgtgtgtgtgtgtattccagtagatttggttttgatccatgaaattgctagaaagacaatgacaatggaaattactagctaacgtaaaaaaaaagatacctgataagtcaatatagcttaatagtgtggcaacgaatgatgaattatccaaagacatgatgaaagaaattcatacaaatgggtcctggcaataatgcagattaataatcatcttctgctattagcataaaataataaataccaaagtgaaaattatgtgaaatcatgtgggtgtagtgcaaaggaagagaccatgatgaaaaggcacaattttcagcaaacacttgaaatgaaagaattgaaccagaagtttgaaagagagagactgaaaaatacctgaaatcatacatcagtttttgatttcttccctgtgacaatctggaatatcctaaggcccctgctgaatgcttcattaaagaggatcctagtctgcatagactgaaacccaggaagccatgatagtacagccataggaatcatgatagtcactccaaataatatatcatacattcgagccacagaaacaactacattccagaatatagttttctgcagaagaggacggaatacttgggcaatcaataacaggccccacccagtggggacgaaggccaacatactggtaaaaatatctataaaattgaaatttgtgaacttcaacagggcaattatcacaagtatggcgagaataatgacaagaaactgcacaagtcgatagtatatgtgttcttttgctgcatatttatcccgagcatatgctaccaccacgtatatcccaaaagccactaagacgtagatccaagacaagccatacacagcaatactggtacttccagctgtaatatcaagctggtatacaataccaaagaaaaaccgtaggtctaaaatgatctccattatctttccccatataccagtggttctcaaatgttcctgctcctcataccaccatctttcccagctctgttcagcttttgcaaacacactaccacgaaaccaaatccagttcataaaatcatcaaaatcatctacagtcttcagccagtcaaaaccagaagggttaaaaacaaagggagccagaatccatgacatgacaagaaaccaactagtgatggttaaggctatgtacaccaacgtgtccttagctacagcactatgtgttgcataaactataagtatcagtccaagttcaacagctttcacaaaatggctgcgagcatatagtctgtaattctctgcaaagctcttatgctgaacaacaaaacctcgtccagttgcacgatactttgcaccaccatgaaggatagttcggccaaaaaagtgggtacgagttcccatagagaatgtatagaaaacagaggaaagctggagctgcattgtcaagaaatcccaaatagcctgcaggaacccttgctcgagagagttctccactatcattggaagggcagtgaaaataccaagttggatgatgaactgttgattcaagatcgtcccaagagctttgttgctgtcttgtgccaaagcagaaccctcaacaccactgagagcaagataaagtcggctccataaaaatgcatatacagtcagaataaccaacattgtattgaaaaagaaacccacagtagtgtaaaagaaagacagcattcggaagaagtcaagcctatgacccagcctgtagacatctctgctcagtacttgctctccatttccactagctaccttagcttcaaacatggaaatttggtttaaccctacatcccttccttttccaacttgaatgtattcatggtgtgtgacattccctccacgcagtgtacaattaaaaccagcaaagatgtcttcacttatgttgatcactctggaagccttactaataccacctcgagtcaagaaccaaaacctgtcaaacacatcaggatggccataatgcattcgaacttttaaaggattggctaaaacacgctgtcccaaggtgacaaaacttgtttcttgagctgacataaaccaagcaagtgaagaaacagaaccagtaaaaacatgttccctgactcccaagatcgtgggtttacgggcaccatagtatcgcctgaattcttccaatagattccttatttttagagcctcctcaaaataattatcttggttcatatcaatagtttgaactgcatcaccacgagtgaaaatcatggcatgattttgattctctggtttaccctctcc

SEQ ID NO: 186044 - DNA, 6115 bp, Cannabis indica
aaccccatgattctcaacactgtctactgtcgggaagcttagaccatcaccaatgcatgatggcattaggatgatcaaggattgacagatttcgtaattgagtgtggtggtatggatttggaatgtgcgagtgtgttcctcacgtggtgaaatacgaagcaaattcagtcattggtgagagaaagagtagatcgagtcatttgtagcacatgatggatggaggcttatccaaaggcaagggtggaggccaaaaccattaatcattttgatcattctccccttattttggatttgattgaggatcgatcaagagcggatttatttcccctttcgattcttagatgcttggaatcgggacccagggtgtcatagagtgattgaggaagcttggaagattgttgtcaggggctctgctagctttggccttatgtccaaaattggtgccacgacaaaggccttgtagaagtggaataaggaggtttttggccactgttttgaggaacttaagattttgaatggtttcttagtggaagtgaaaaattgtccttttttagtacaaaaccgtgagctcgaggcttttattttagctggaaattcttgagatttctcaaaggtaggcttctattatctcgagaattctggttgaagcaaggtgaccaaaactcgagattctttcacttatctactctgattcgcatgaaccataatcatatccaggcaattttcgaggatgatcaacactggttttatagtagagtaggtatcgagttgtacatctctgataattttaaagagatttttcaatcttcttttccaccagagtctcatgaccttcctaatttaattccttctattatctcgaaggagatgaattaaagaattatttttctaccttagtagaggaaattaaagaggttgtatggtcttttcccttcccttaaagtgtctagccctgatgaaataccaactaagttctatcgagagcattgggagatcgtaagaggtgatatcatcaatttcgttcaagagttttttcgattgggttagtttgcaaagagtgttaatagatctttcattgtcctccaaagaagtagaatttcattattcaaattgttttttttataaattaaatatagatatttataatattataaaaaaattatttttttaaaaaataaaaaatattagaggcgactagtcaaagtttgatttttgactcacttttttaggggcgatttgttgcctctaattgttattagaggagaatttgtgtaattttaggagcgacttttgtcgctcctaaatatcatatttgttgtagtgacactgcccgacaaaagccacgaatcttatatttatgttgaaaagtcaacatttttatatgtaagggattcattatctaacaagcaatggaaagagcaattagattgtagatgccctaaaagcatccttaatggaagcacttcatctaagtgcgtaagtggccctacttataccattgagctaatctaatatttttagaaataataataaaaaaaaactattggcaccatagccaagcaaatcaatagccatgtatggtgccttatataagtcaatatattagattacgcaaggttgtcctataattagctagcaagcctgactctgagctaaggtgggctaagcttatgtttaggatccacccaaattcagagcccaataattatataaattctttaaaatgtaaactgaaaaaaattaataatataactaaacaggtccacaccccaattggctcactccaaatcctattgcaatatcatttaaaaagcttatatcctacttaatttatttaacaagctaaggaaaatatatataaatagggccatttttttttttaattttatcaaaatggtcttggacctactttttttaagggccgaccctcataattaacttaatgccaaaatttggcacccttgccaatggtaagaccacttttagctttgtttttcagtgttactattgaagatgctcttataaaacatcacaactaagaacataattttgttataattagccatacattttgcattggtaattttcacgtcccttgtataatatgcatgtgccataaaaaaaggcccaatgataagaatgaatcacaatataattaagaattatttaggtaagaaccaacattattttacaatatatagcaaggttaggtatgagagaaacataggcatgtacatgcaaataagagatacttatcatcaatgattaataactgaaattcatgatatatataagatctccaacctatatatacatcttatttgcttatgtttttaaaagaaaaacctttctaatatcaataaataaacaaatcaatatatattggaaaataaacaggagagacataatttttggctttttttttatattttttttttatatgactatatatattataattataacatatatttcacttaattttaaaaaatcaaaataatttatagtattgaaaaatagattcaaatattcaattgcacgtctattttttttttaatatatgagtgcaattaattattttgaactctattttcagtattgtaaattatttagaattcttaaaaaataagtatgatatctattataaatataatgtaaaatgtcatataaaaaaatagattataatttctcaaaataccaaaagtaaaatgtttctactgatagggtaaaaattacaccctaatttcctactagatagattgatttatttcattcatgattagctagatagttctccctttcttctcaattcttccactcaaatcctcaaagctccaatcccttctcatcccacaactcctaaccaatcttggctccttgtttattccatcaaaggagccacttgaaaagtgatgcctcctatgttgccctaacaaagattttacctgcagcttctttcgggacacagtcgtcatcctgccacccttcattatttccacgtctttattattattatgtgtcaccagatttcccgaccagcttctctcaacgtttgtctgcaagaggccttcgccataatggttcctttccaggtccgagtttgtcctctgaaagacctggcaactgagacaatttaggctcatggcgaataatttctagttaccttgttttgcaagaaaactagatctcttacaacaaagaagatgatgaggtagagaaaagtgtagttattagggtttgcatgatcatgcatgagatcacatcaatgggtttggaattttaagttgggtagagtctctttcatatactcttcatgaaaaatttgttaaagaaatggatatggtgattagggttgtggggaattttacccactaattggttttttcttttatcttttcatttcttctttcaataaaattatagctaatttggattatttattgtaaattagggtgtggatgaatgtggttagaaatgataacaccctgaaattcagcctgacctatagttctaatttgggtattttccacaacatataataatatgttctaatcatctgtggcctctgatatttttgtaaatagagatatatatgtaatatttgttcagatatttgcaactgtttctacttaatttgtactttattctccttcaatatcgtttggaataatatagataaatatgaaattttaattatattacaagtactttattaaaaataataacaataataattattgctactgaaattaatgttatatatgtaaaacattggctccttattatacgtgggccatttacaaaagttttaaaaaaaggggagtaattttcataaaaatatatcattttttatatttatttacaattttataacactaaaaatttttatttatttataaaaatatatttgtaattagaattaaaaaatacaatacacctaaaaaaaaaaaaaaaaaaataaaaaaaaaacaacgagaaaacaacctcagaaaatcaaccaactagaaaataaccaactaaataacagatttatcattctaacaaaatagatatttttgtaaaaaaaaaaaattcaaaagcttaaaaatgaaaaaaaaattcgtgtttgaagtaattttgtaatttttgtttttgaattttgctaaattatgtaaaattttcttttaaaaatgtatatgtatataaatatattttaatacaaattaagtatatacatatttttttttttaaaaaggaaaattataaagaatgcccagagttagatggaattatttataaaaatatggcctctaaaataagttacaaattagagataatacttataattattataaaaatgaaacaaacatagtttaaaatttatagttcaaatcaaccctaagtaaagtatagcttacataaaacggtttgagttacttcacctaaatcaatcccaattttgtttatttccaaattcagtttaattaatacttaaaattattataaaaatgagacaaacatagtttaaaatttatagttcaaatcaaccatgataatagagtccaaatccaaattcaccaataaaatccaaatccaacaataccactaaaaacataacactacaaatcaaatagtacacaaccaactttatagtccaaatatataaatacaaatagctagtccaatatatattcaaccatgtgatacatgattctttcgaaaaaaattatatatatataaaaaaaatcatattagaaactaatatttatataatgaaaaataacttagtgaaagaataaatttatttcgactaaagtcattaggaggcctccaaaatctttaactacttcgtctatatagtgtttcaacacaagagaaatatcgtactcacaaatcaatcagttatttgagaaactttctacggtgtttttagatggtatatccacatatttataatgatttcatttcaatgttcacagcacattgacaaaccatcaactaattaccatcgttaaatcattgtcattattctgtcgacagagcaaaaaactagaaacccaccataaaaaacctgattttaaagcagacccccaaactaaataagcaaatttgaataagaaattcagtacacaatacatattattacaactagtagtagactacgcctcaaatacaagctttgcatgttgctctattgtagcccgaactgccacaattgctgcagttttgaggtatcgtgactcatcaccagaagggaaacacttccctcgtcttcttccaacattgttcttccttggacgacctactgatttcttctccacaggtaccccaacctacatgttcttgatgtgttttgggagaatccaatcattctcgtcaccaacaagattaatagtattatcgtaagtcttcctccacgtatcttttgaataataagtaaagaacatcatgtacatactcgtattcgtttgcaatgtcgcgacacatggatgagtgcaaggaagattcaataatataaacacgccacatgtgcatgtcctttcgactaggtttacgtcatcgtctctttcaccattaagtcccctaccaatgttatacaaattggctccattttgttagacgcacattctcctcacattattatagtttttgcccaagtttttttttttgttttttttttttttttttttagaaagagtcgctaaaaggttatgcatgtgtctgccttttctaggcaactaacgaaccaagattgcagtgtgaacctgataaattcaatcaaagtagtttttagatatttcctaaactcttttgtcacattgttgaagctttcagctgcgttgctcgtcattatgttgtatcgattgtccagacaataaggtcgagcccacttctcaaaccatatactctccacatatgcaacaatggcaggttccatctgtctaagcttctcaaactgtctatcacaatcagtcttagaccacaagtaagctactttccatatctgcgtgtgaaaagcatcagtcttcaacttgtaattcacattcataataatgtggtgataacatgtacagtagactactttggggaacacaagctctatggcatggtcaatgctttgatgcatatccgacac

SEQ ID NO: 186045 - DNA, 1714 bp, Cannabis indica
gtaaatatatcaaattagtgccaaggtcaccacagcacacaattgcaattatttactttatgcataaagaaaaaagatgcattaaaacctccttgaatggttaaggacctgaagacacgccttagttgtgtaagcactaatcaggacatatttataaatattcaactatacaactaattactctagcactaaaaaactaatgcagttaattagatatgtctaacattatcttacttaacaacaaaatatgaattaaactaaatcataaattcaaattcaaacttcaagcattaaattaaaatcaaatacaaggcaaaaagagatatgaggtgacaatttatgagtgtttgaatttaattgttttgatatttcaaaattagaataattgggacttgattttcaattcaattactcagccctaaaaaagttgttgatatgaacctgcccctggatcctagggtctaacagttgccacctccctaatcatccccattagttaaacgaagaacgaggagaataataaatacctgctcagatgtcatatccttcgaagaacaacataatttatcattccaaatatcttccaaggatagtaaagttcctaccaaagcacgtattgcagctaatgtgctaacgcaatcaagcttaagactggattgcatcataaccatttcatccataaaattgacctgcaatagagaaatgtatatgcctgttatttcttcatattaataatacctgaggaaaaaaaaacatgcatctattaattttaaagtgatttggttccagatttattttcatataccaaatctgaaatatttgaaggagatgaccagtaaggatgctgacaaaggttgtaaagaattgtttcatgcacctggatttaataacaaatgtaagagtacattttaagatgaaaaaaattaaattaaaccagtagaattttgcaatgcataacttaagaataactaagcactttacctttaaatcacattctttctccatgagtttaaacagaatatcccatgtaacaataactggaacagagaaaaatcctgaaataagcgataccatgtccatcttccatttctcaacagaagagacaccagtgccaattttcccaccaacagataaaacctctacatctccagaatcaacactcacatccaattctaggtccaaaatcctgcttttattacaatcaacttgggaaatatcctgagcaggaattacagatgcagtcaaatcttgcaggaacctttcagactgaagacttgttaaactattacagtattcctcatatactttagtaagggctttaagaagcctctccatagattgaataactgcatcatacagtgcaatatcagtagagttacgatctctctgctcagcaaacagagaagaggaaacgaaactcctaaatgaagcaacaagagtgcgatcactgacgatgaagtcatagcttgggcagccagatgaaagatcatttgggattccctgaattacatccacagcatgacccaacaattctaataagcactggcccaattcagagcggaatgatgagactccctctcctttcctggcatgaaaaagaacacatttcgcttgcagataaaccaataagaaacaaactcaataaacatataaaattccaaaccagaatatgaaaagttagtcgttgtgaatcatttatatatataaaaaaaaa

SEQ ID NO: 186046 - DNA, 1154 bp, Cannabis indica
gtcttcatcacaggtaggtgattgccttatggagcaaccatttgttgcaaacagcaaaccttgtatcatatagccaagcataggttcattgaatattttggctttttaatctaaaagtttcatcttccacggggctgttgttttgcaggagtcagcttccgaaatgcagcatgcagaatcatggctataaaagatttttcatcagaacacatcatgcaaagtaggagtaaatgagcaatgttgaaatgtatctttcaattacctgcataactgatgctcaatgcacagaacagagccatctgaacatttgaacccattaaaataattgcaccaactgcaaacatgagatgcaacttaactttcaggaattatgaatacagattgtaataataattattggaatttaagaacacataaaagatccattgaatatataaagaattaacagaagtgaaattttttcgacaagcatatgaatataactggcaagcgatggatttcaatggaaggaagaaagagagaattctattgccaagcaggtgatgcagaacagtagtgaaaggaaaatagatagggcaggcagaggcagaaagggtagagaaagaggagggaataggaagaagagaggaatggaaggaaaaattgaaattagagaaacaaagaggactcagtcgcatgtttaattcaatttcaacaacaacaaaataactcagatatgaaatttagtgagtgcacccttcctaatgtgtgtactttacgcccgtaaaagattttcagcagctaatttaccggacagtaaattatctagatatctgctctttcttctgcagttaaaaagagcactacaacatttgccaggctaagctatataattatcaaacttaagctactgaaaaaagagagaaagaagtgcaagaaagattaaaaatacaggataaacacaaaattgcaactaactcaccacattgactaacacgaaccaaacagagtcgagtgagcggatatcgatccaatctccatttctcgctgcagaacttaaaaacatcccatagtgccaaacacgatactaatccaaaaagggtcattggcatctggtacctgcaaggttcccaccaaaaacaaaattgaaaaaaaacagtgaaagccactagaca

SEQ ID NO: 186047 - DNA, 1266 bp, Cannabis indica
tagtatcggtattagcatagaaggataacataattgtgtaatttggacaacaatgggatggtcggtttaactaatgctattgtgaggcacatggtagcaccctaatgagtatagattggcccttagaggattgaggcatataatgagagattcgggtatgttaagtgataaggtggtaagagttttgttaagggatgctttgcatagactctcttgcatcacttgttttgtatgcttggaagaatttatgatgcttcaagatgatatgaccaataataatttatatagtttgatttctttgctatttctcatatttctctattagaatgtaacatttcaatagagtggagagtaaatatagaaaagcatttataacaataggtatgaaaaatagtgacagagaccctgcaatatgtcgggggctaaaagaaaaaatacctgccatttcatagttctttgagtcataaaagcattgtacagcttgctcaaacatgccaatagatttaaatattacagcagccttatgaagatacttctttgctctatcaaaatcgtaactgcatatattttgagcagaagctcggagaaaaaaagcctcggcctgctgttctaagagtgtctctcctgctttacgaaaacactctttggcagccttatacttctttttaataaaatactgcatgaaaacaaaacaactcaaataacaatagtgacaagtaataagaagttgacattttggaaaatgacacataattgaagcaaacaaaatgaaaatatgaactaattacctcctttccactagacatccactcttctttggtgctatgttcttggatcttctccacaaatgaatgatcaagtgtttgatattgaacaaggcataatttctcccaatagttgtatatgggattggagaacccgtcacagtcaccattctcgtaaaacaataaccttcgcttcgtacgagtaatagctacatataattgttttagctcagaacacaatagtctatgtgtagctacatcaaaacttggagaagaactactcgatttttggtcaaggaaatgtttgtccttcatatacttttcgatgactctccaatcttctaaaggtgatgaagaaacaaagttgtacagcaagacatcctataataaggaaatatattcaaacaattgtaagatcaatgaaagaagtatagtgcagaaatgagataatgtctccaccttgataaaaatttcttctacaatttatgcaatagaaagttcc

SEQ ID NO: 186048 - DNA, 15345 bp, Cannabis indica
cagttaagttttttttttttttgggaaatatcaaagcacatagtttcagtgaatatattacattttttttttcaaattcactattaattggcacgataattttcagcttcgattccaattcttcagtgcttaggtcctattaaaaaatattagcatcgaaataccctatttttaaaatcctcatcacctaggtacttactcaggacattccgtcaatcattttgtggccataaaacatttctggcaacaatcaagacctaggggactgaaggataaaaaatatctttcaaggatccaagtgttaaaagtgaagaattaaggttatggttgacaagactccaaattagcaggaatagtgtcctaacataagggaggaatgaggaagctatgccaatgctaaaggatgggagaaagaagataacgacaaatttattaaaaataattcactcagtccaattccaattattgtttgctgagattttcggaaactaataaaaacagaacttaaaaaaatataaaataataaataataaacgggtaatttttacgtggttcaggcgttaataatccctaatccacgagttcgttatattagctttgcgggcgagtatttgaatattacaagtatttacaatataaacctccctattcctgtcgcttctcttggagaagaagaaagttaatagaaatttttaccggaggttcagtaagtaagaaactgttcaccctttgtatatggaaagtacgggtatttataagcacacatgtgagtaagggcataccttttacccacctagggtttcgtactcaacacgccacaatcactgcaacttgatgatctgaccgttggttggtaggaagccttttcatcgtgtggtgtacagctgttgtaaggcatttcatggggaatggggacacgtgtcgctcaaaggtttcgcattgaaaagttgttgtctagacaagccgttggacaaaaagggagctttagaggcatgtatgtgcacaaccatagtctgacacaaggggcaagatttgatttggtgtcagaagatatgcaaccgcgccttgagctccagatgggatacgaccaaataggttccaggaccatcaggtgacatccttcccggattgcactaacctgctaccctcctagaatgcttgtagcttcgggggactctgatccttctcagtagcagatgaatagtgggagtctcgaaatccttcacgcccttgacatggagaaccttcgactaactcctgaaatataacttctttcgtgatgctaataagcaaaagatacatactaattgcaaatagtccgaggtggcaccttatatgattgtcacgtaacaagcatccgggaatacgaataacagttacccctaagtttccgggacttacgagtgatgggagcttgcagcttccctccagatgcttgatttattatcctaacatgccagccaagtgttgaaatgcgaaagaagtcttcggtattactttgggtaactgaagggttgatacatcctgtaatattgttgtcgtcttgctgaaacgtggtgtctgtttggtggagtcgtggggcttacactctaggctctagcgcgtttctcgtgggaagtgaatgacgattggacttgaaaagagaacagatgtatggcatgttggtgatgctgttatgaaatgatgagtaatgaatgtcttattctctttcctcaggcgcattaaatgcaaactcttcaagtccccaaccgttggatggagcaacttttgattagtacaatttggatcattcatttcaaaatactctgaaccgttgccacccatataaatgtaggattgggggaatggattcactttttcttcctcaccttaaacaacgatccttagtctagagaacttcttcaaacaaaaacttcgactcaggaaaacctttgccccttacacactcgtctgaaccaaatatctcatctccttttctcaaccttactgtcgtatttccgaacgttcgacactcacccggacggcgagttctttgttggagtagggcatgaccagatcatcgagcgacatgtaggattttgaacgacaactagcaaccagcaattttccattcaatccgtctacaagtgttttttccacataaactgttatttcttgtttcgattgtgaaatgtagtcacgagcttgtttttagatttgaaaataagagttgctatatgtgaaataggtctgcatgaactttgggacttatgtggcaccggaagatataagtctgcatgagccttttagctaggaatcaacaatcataattttccactccaccaccaaatgataatgccaacgaaaggcagctagtccttgtgactaccaacactttaacacaaatccaatcgaaccggcaacacaaccaaaccaaaccaccaacacaaaacccaagtaaccaagcaatttcagcttcaacctcttcagccaaccctgccaaacaagttcagggacttcaattttcccaaaatcctacctttgccatttacatttcctttgaagcctacccacattggggccgacgtcctggaccaagtgtggaaagcaaatgtctatctaaagcgtcggctcgcggaggagcgcaccgttatccaatctaggaccgatcgattgtccgcggtcaagagggctgagatcattgagggtattcgcaacccagggcactccgcacccattacagaccttcctgctatgagcaaacagcttgtgccctgccttggcagggagttagcgccattcagtgttgatgtgattgaggacattgcgattagcgtgattgaactgaccattgaaaaatgggctataggcagtagcactgaccccgtactcctagccaattcttcgaggcaacaggctgttggggtatcttatatctctgtcgtgacttctctcttttacatgctgtaaagtattattctttttcctgactcttctccctttattttagatgacgtttcttgcggaacggacctgcaaggaggtgaactcaatggcagtccaactagacctttccttaaccacccggcgatacgtggaagcccaagttgagactatcaagaaggaaactgagcagtattgcactaaagccgatgccaaagctgacaagaagtacttgcaaaagtacaacgactataaggcagccttcacgacccaaatcgaagaaaaactcaagactcagcgtgatgagctggaggctaccaactctgctcttgctcaggaacttgacaaaaccaagaaggccaaggtagatgataagccacctgtcacttatgtctatgcgagaaagaggggtaagaactttactgtaggtgctggcatagagaattagctgactgtgcaagtttgttaagtgagggatgtttaggtgtgactgagtctcaccattgttactgtggggtgaggtatataaataatatgggttgagtttgtaatgttttttaggcaggaaatactgatttgtaaggagagcccaggttctcgaatacctagggacttcaattatcaatatcaatttcttttcatcttctttctttttcttctacttttgtttgtggctgttgaatcgataggtgttcacctatcaattggtatcagagcatcgccttcatgggaccaaagagagacgcgatgccagatatcattgacgagaaggtggaagcgaaagtctcggagcttcgccaagatgtccggaaagtgaatcaagggctggagaagctccaaggagagattcagaacactattgcgcacatcgttgccaagcagatggaatcggtggtgagtcaaatctcacagctccttttaccacctgggaaacccacgctcgatgcgactgcggctgcgacagatcgccaacggcgtgctgttgaagggagcgggtcttcgatcggcgaacccagcggccccggagctcaacaatctccaaagtttccagtgaatatggccgtgccaccatttccgagtccgaccgggccttcgattcagcttgggtcctttcagaatggccaatcctttggccacgattttcggccaccacgaatggaaatcccgttgtttaatggcgaaaatccagatggctggatataccgtgccgagcggtattttctcctttcaaaaatgacggaagctatgatgctagacaccgcgattgttggacttgatggggatgccttgtcgtggttccagtgggagaatcaacgccgcccgattacgtcgtgggcaatgctcaagcaaatgatccttctccgatttcgcacggtgccggcagggtctctatcggaagaattcttgtcagtggttcaaacgggttcggttcgtgagtatcgggttacctgagaaatgctagcttcgcgggtacccgaggtaccagatcacatcctggagggaaactttgtcaaagggcttcgtgaggacattaaggcagccctgcatatccttcaaccccagggattgacccagataatggagacggctcagcgagtggaagaaggccacctcatgctaaacactagcccaatacacccaagcccaagcgtgaaaccccatcactccaagaccaatttcaatccattatctccaagcagattcagctccttcaccccaagaaatacccaaactccttcaccccaagaaatacccaaacaattcagccacaacggcccttctcttcttcatccggatccatggtttctacagcttccaaggcgggcagtagtcggtatttgcgctaacgttgagcttgatttaggagccattcgagtaataacggattttctcccacttaaattgggtggagcagatgtgatattgggaattaagtggctcgagacactgggcaatatgcaagttaactggaaaacaatggttatgaaattcgagatggcgggttcctgggttactctacagggagatcctagcttgtgtaagtctccgatatccttgaaagctatgatgttaacagttgagaagggggctgaagtgtattgggtccagttaggctcactggccacggaagggagtggggagcagccacctttacccaccccgattacccaactactagaccagtaccaagaagtgtttgagttgccaccgggactcccaccaccgcggtctcgtgaccatactataaacctaaaacctggtaccgagccaatctcagttcgcccctaccgatatgctcaaattcaaaaagctgagattgaaaagatggttcgcgacatgcttcgggtgggcatagtacagccaagtacaagtcccttttccagccccattttattggttaaaaagaaagatggaagttggcggttctgtgttgattatcgggctcttaatcgagcaactgtagccgataaatttcccactccaatcattgatgagttgcttgatgagttacacggtgccactattttttcgaagataaacttaaagtcaggttaccaccagatccgcatggcttccgaagatgtggaaaagacggcatttcgaacacacgaagggcattatgaatttctagtcatgccgtttggcctcaccaacgctcccgccacatttcaagctctaatgaacgaggtattccgtgatttccgtggctcttgtgtactacttttcttgacgatattcttgagtacagtcccactctagcagcccatattactcatctcggcatggtccttgaacgactccagcaacatcaattgtttgctaaccggaagaagtgtatttttgctcagccacaagtggagtatttaggccatgtgatttcagccagtggggtgtcaaccgacccaagtaaaatctcagccatgcttcaatggcctattccctctaccatcaaggattgaggggttttttagggctcactgattactatcgcaagtttgtacagggatatggaagcattgcgcggcgttgaccgaccagcttaaaaaagacgcttttttatggtcctcagaagctcaaagtgcctttgatcagttgaagagtgctatgtgtaccgtgcccgtcttagcttaccagatttttcagccctctttgtccttgaagcggatgcttcgggtatgggattgggggcagttcttatgcaacataaacgacccattgcctatttcagtcgcaccttgtctccacgggctcgatcgaaatcagtttatgagagagaattgatggctattgttttggcaatacaaaagtggcgcccatatttactcggcagtaagtttttagttcgaaccgaccaacgtagcttgaagtacttgttggagcaacgtttggtctctatggaacaccagaagtggctcactaagctcttaggctatgattttgacatccagtataagccgggttttgaaaatagagcagctgatgccctctcacgagtttcagcagaagcttctttggctgtcgttacggttcctagtgtgctacccattccggatctacaagcccaagtggacgctgaccctgacttggctaagattatttcaaaggtctctcgcggccaagatggtgggggtttctcttttactcatggatgtctcaaatttcgtggtcgtttggtgctaccggcctcttccccttccattccaatgttattgaaggaatatcacaacagcaaggtggggggtcattcgggcgtctttaagacttttcaaagaatagctgctaagttttattggtttgggatgcgcaaggatgttcaaaagtttgtggcagaatgttccgtatgtcagcaaaacaaatatatggctcaatccccggcgggtttgctgcaacccctccccattccagagcaagtatgggacgatatttctatggatttcatcgaagggttacctctctccaatgggtttgattccatatatgtggtgatggatcgtctcaccaaatatggccattctatacctctccgtcatccctataccgcccttacggtggcagcagcctttgtgaaggaagtagttaagcttcatagtttccctcgctctattgtatccgatcgagataagatttttttgagcttgttttggagggaactattctgtttgcaaggcacctcccttaaacatagcaccgcatatcaccctcaaaccgatgggcaaacggaggtggtcaatcgatgtttggaaacgtatttacggtgcttcgtcagcttcaaacctacctaatgggtcaaatggttaccatgggccgaattttggtacaacacgtcacaccacacctccatcggaatgactccctttcgagttttgtaccatcgcgatcctcctcctttatgccggttcgagacctcaagcactagagtctctactgtggaacaggtactttcggaccgtgaagatatccttgccttgttaaagcaaaatcttcttcgggcacaacaaagaatgaagacacagactgaccgtaaacgtcgcgacgtcagttttgaggtgggtgatcccgtttatgtgaagctacgaccataccgccaacgaaccttggccaaacggcccaatgagaagctgtctccccgttttttcggccccttttcggtcctagctcgtgttggaccagcagcctatcgcctccaactgcccccggagtctatgattcaccctgtttttcatgtgtccttgcttcgagctgctttgggaccccagcaacaagcctcgcctctgcctccgggtctcacttctaacttggaatggctactcgaacctgactccttgctggccattcgccccggcactcataagaccagtcctcaagctttgattaaatggaagaaccttcccgattgtgaagctacttgggaggattttccggtcatccaggctcaatttcctcaattccaccttgaggacaaggggaaacttcatgcgggcggtattaataagccacctgtcacttatgtctatgcgagaaagaggggtaggaactttactgtaggtgctggcacagagaattagctgactgtgcaagtttgttaagtgagggatgtttaggtgtgactgagtctcaccattgttactgtggggtgaggtatataaataatatgggttgagtttgtaatgtttttcaggcaggaaatactgatttgtaaggagagcccaggctctcgaatacctggggacttcaattatcaatatcaatttcttttcatcttctttctttttcttctacttttgtttgtggctattgaatcgataggtgttcacctatcagtagacctcgagaatcaggcatcagccaggcgcctagaactccaggataaaagcaatcccatcaaaaggttggaggccaaggtcaacacggctgaggcaatgcaagaacttgttgaagatcaagtcaccgctttgaaggctggcgtcgaggagaaggataagcttattgagaaaaagactcaaactataacgaagttacatgacacaaaatccatgttccaacaaggtcaaacccaagctctaaaaaaagtcaccgccttgcgtaatgataatggatacctacggcgattcaaacttaggaaataattgtcaaaacccccttggtctatcagtgacatccgagataggatgggggtacgaattacgcggaagggcattttatctcttcgagaagtacttcctccagaagcatttgcatccaagtatgttgccaaaaatcttgcttgaatttcctcctcaataaggggatttggatgatgactggcacatgttgcaacaagaagctcctcgtctttggcggccttatttatcagaacaaacaattaccaaagcaatttgttccttgagatcgcttggggtctgaggttgactgccactgacgtcgtggatgctttggaaatttgctataaaaccatactagcacaacaactcagtggtcacaaaatcctccactttcagttcctcctctgaaaaagcttcataggaggttatccgttccctcaattcatccgttaacatagttctaggaacagattatgaaagcggactacctttttaaaactatcaagaaaaagttacaaaagcataagttttgtacctataattttgaagtctagtgagagagctaggactcacttcatggaaaaacctgttgtaaagtaccagtactcatgatggtctgggcagtgtgagtaggtgcttgttgggcatcgagtgcacttgtacttttaaaggcggtaaaatccaatttttgaagggtgccccagcatgagctgcgacttcagttcataaaagtacaatatctctttcggggttggagcagcctggcgtcgggattaacaaattacaaaccacccagagagcagtttgtatgaaactggaaggagttggaagggagcaattctggctttgacacataattgggcaaagtatgttctgagcggaaggtgagcctcgcacgagatgtgagcccaactccaagcttagaaaccttccacactttgggatggcaattccataagaacagacattcagttccacataagtcccaaaatgttttgaacaccaccattagtgaatacgcctccagcaggccataattcctcagcaaatttggcatctgatctatttcccaaatagaactattgagtacaagaggagacggagatgtggcatgggctttgcctttgcccttgtctttccgtcaccgtttgacttggatattttcggaaggcccctcttctaaagctgggtcttcgggatctaagtgcacaaagggtgcgtccactgaagacgctccaacctcttcaaggttcacgattgccaaatggaaatcatcgtcttcaccagacactgtaaaagtgaaaagaaaacccaaacagttaataccccatatccaaatgaaaaatagggtatcgtgaaaggcctcctccaaaactgtttggagaggtcctcgccggactcatcacctaaaaggtcaccctcacgaagctactggttatggtgacgaatcgggaacccaaaagcacaacagtagcaaagaagcccagacatttcctttcgcaaacaaaaaaatatatatagagaagcaaaggggattatcccagaaaccagtttaaacccagaaatgttcaaccacacctgaaccaaaattttccaaataacaaacattcccctcgacctaaactgaagggaaaatacttcaacagagccttagctctagaggtattaccccaaagttcatgcagacctatttcacatatagcgaccctaattttcaaatctaaatcttacgcatggaaaacaataaatttctacaagcttgagagtacatttcacaatcaaaattggaaataacagtttgagtggaaaaaatacttgtagacggattgaagggaaaatcgttggttgctagttgtcattcgaaatcctacaggtcgcttgatgatctggtcacgccctgctctagtagagaactcgccgtctgggtgagtatcgaacgttgggaaatacgacagtaaggtcgagaaaaggagatgagatgtttggttcagacgagtgtgtaagggcgaaggtttttctgggtcgaaggtttttctaggtcgaaggttttgcctgaagaaattatctggcctaaggatcattgcttaaggtgagaaagaaaaagtgaatccattcccccaatcctccatttatatgggtggcaacggtccagagtattttgaaatgagcaatccaaattgtattgatcaaaagttgctccatccaacggctagggacccaaagagtttgcatttaatgtgccagaggaaagagaataagacattcattactcatcatttcatggcagcatcactaacatgccataaatctgttgtcttttcaagtatagtcgtcattaacttcccacgagaaacgcgcttgagcctagagcgtaagccccacggctccaccaaatagacaacatgtttcaacaagacaacagcaatatcacaggatatatcaacccttcagttacccgaagtaatatggaagacttcttctgcatttcaacagatggctggcatgtcatgatagtaaatcaagcatccggaaggaagctgcaagctcccataactcgtaagtcctgggagcttgggggtaaatgttatttgtattttcggatgcctgtagcaatcacggaaaggcaccacctcagactatatgcaattagtatgtattttccgcttattagcatcacgaaagaagttatatttcaggagttagtcgaaggttctccatattagcaaggatgggaaggattttagggctcccactattcattcgctactgagaaggatcaaagtctcccgaagctacgagcattccaagagaatagcaagtcagtgcaatccaggaaggatgtgacctaatggtcctggaacctattaggctgtatcccatttggagctcaagatgacggttacatatcttctgacaccaaaccggatcttgtcccctacgtcagaccatggtagtgcgcgtacgtgcctttgaagccccctttttgtccaacagcttgtctagacaacaacttttcaaagtgaaacctttgagcgacacgtgtcctaatttccacgaaatgccttacagcagttgtacaccacacgatgggaaagcttcccaccaaccaacggtcaaatcatcatgttatagtatcaacccttgtgttgtgttgagtacgaaaccctaagtgggtaaagggtatgtctttacccacatgcgtgcctataaataccctcacttttcatgtacaaagggtgaacaatttcttacttaccgaacctctgctaaaacttcctattaactatcttcttctccaagagaaacgattggaatacagaactaggatttatattgtaaacacttgtattattcaaacactcgcccgcaaggctaatacaacagactcatggactagggattattaacgcctgaatcacgtaaaaattacccgtctattatttattattttatatctttcttaagctctgttttattgattttcaaaaatctcggtaaacatctataatgcaagaaaccatcaaagtaatattggcattccatgctatataacaagtaaagaaaagactaccattgccaaaacgctatcagcacaaaaaaagttaaatgttcctcatctaatgcactgagtttactttttcttttcattttatgaatttttggccttgggaattcgattgggagacctcccagtgaaccaaaggtttttaaatctgtggggattcgaaccttggaacaaatgcctaccactactttccaccactccccatttaccactagaccaccccttcgtgttttatgcatcgagtttactaagacttacgcccattacagtttcaactttcacttcaaatgttgtaggctatagaaatactaacacaaattatgacaacaatcaaagaaaaaggggcattcccaaatgactacaaaaactacataagtataatttgttctcttattctcgtaaaatctattttaaagaactaaattataccaagaactaactgcattttaacaaaccaaacagtaaattacacattgaccaaaaatttaccagaactttttgtggacacaacatctgcagaagtagtatatttctcagaagagcctgtagatgaagttaagctttctggaggatttgggagaaccactgaatcaacaggaacaaggtaacctagatcaggaggctgatcctttccaatagtggggttagcctgtgaccaaaaaaaggtcatattttgtgatatatttgatgtttgttaaattctgaagaaacattttaattacctccaagtccacatatgtgggatctctccccaatgatttaagaaatgtgtcaaggcctgagacattaagagctggaagtggaaacagaaagatatagaagagaagggattattcacatcaacttgaaagaagattataaatatgaagatatcaattacataaattaagttgaaagcaatatagaaactgagacaaaatgtacaaaagtttcaacaggtttctggtaattatgtataataaatgcaggtattttctcacttacaaatcgatgtgtcatttgagagtggatggaagaagcagcgttcctgtcttttaaacccttgatccaacaataaagagacaagtcttcaccagaaaataaataaataataaggacatcaaccattattaactcaaaaagagacaaaaataaaacaactaatggacagtgtaatatatcgcaggtagaaatacagcaatgtaccccaggtgtggctattgaatattaaattgatccaattctttatatggtaggtcgaatcaatgatcaagtgcaataaaatctagtgccgtgataaaatccagtaggaatcaagaatcatttctgatcatatgccaagagtggaaaataaattttcaccaaataaagagatatataatggtgcacaatgttaaaagatttagaacaatattaatgcagcgccattcatgcataagtattacaagaaatagaaaaccatttaatagtacagctaagaaagtaacagtaacacagcaatatgcatataaatgcgaaaagagtaactaagtggcacttaattaagttaaaaaagaatgataccgtgctgattcattcaccaatgcgaatggtgtaacacaacctaaaggtacctggcaaagaaaaggccaaccaacaataagtctcgtgtatatgttacacttgagatgaattttactttttccacacacatgagatttgctctaatctttttattatcaagactgatcaatctaaattgaggagcattcataatagccaatagtaataaaataagatcgatacaaaatgaggataatgctagagtttgaaaatgatagtttcaggtaacaatgaactctcaaggcatgacaccaacctggagtatttcacctaatgcttcttcaggagccattctcaaacctccttttcccaaaccaagccttgcggatagaactgttcagtttcaatgccactgattactcaagtaaaccttaaacatcacaggaaagagtaaaattcatcttcaacacgtgtttttgacatcttaaactattccagcaaaaacatacctttcaaatccaccttagtatcagacaaagcagaaacaatgtataacctattcttcttatcctacatataagcaacaaaagcattaggaaatcgaaatgggcaaatagaaagacaaaagaaaacaccaaaattttcttatacaatgaagaaagaaaatactgctttcaaagatttgaactttgaagtaacttaccttcagaaataaattcttgctcagtgcaccctctaaattccccacatatttcgcctgattaagaaacacagattcttgaatcagaaaagaaaacacataattacatataagtattaggtatcccttatatgtaaacacaacacacatattgaatctctaaagcttcatttacctgagcttcaaccgtcaaaacaacaggatgttcatacttcgaataatcaattttaagttcctaagtaattcaatgatgacagattagtttccagcaaattaagaaaacaaaacgaagaccaaagatagacaaatatatacatttatattattagggaaaaactaactcaaacaaatgcaatgcattaacgttaatatactattaacaatcaaaaaactgaacagaaaaacaagctttaaataacaaactaaaacatgggttaattgaatcatgagaaattggatgaagacccaaaataaagagataagaagaattagcgaacctgtaaacgggcaagcaactgttccttggtgaaacccatagtcagagcaacaaagcaaaagtaagaaagagtgttgggatttggaggaggcacacaatctgcagatggaactactgttaaattctcttctccgctctccccgacacccaagcgactcttcctctttactaggtacttgtgttcttgcctacttcactacttggtttggtttgtacaccatttcaatattgattgggccatccttacaaacaaaatataatgattgggccaggcctatcgaaaccagtcgtagtagtatgtagaaaatatgggaaatttatatagattaccaacttttctcaatttattatatttatactgtaacacgctgattgttaatttttattatttttttttattccgcagtatactgttattgattcaaagtttatatattatttgtggcttacacgtatcttcacggggttttaccacgttttaaaaagctgtgatttgatgtcttttgtcaccttttttgacagttttttattttttttt

SEQ ID NO: 186049 - DNA, 3929 bp, Cannabis indica
ggtgtaaatttaaggtatgataaaagttgtatttaacacaaaattagtataaattaaattttatattataataaatattaattttttatttaattttttgtgactaattaatataattattaattttttatatttttatttatgcatttaatatggtttataaacttctaataaaattttattgatttttttttacacttttctatttaacacaaaattaaaagcatggagatagttttactacagaaatatttcagaaaggagaatcatgtactttcaatttagtaatttaattcaaacttttcgaattaaattgatgaagggtaaatttgtcattcgaaaaactttcaagtttcatcccatttctaatctcctttgtcattgaaaaagtatttttagctttttcagacacccatgaatatctctatggaatatcttcttctctttctctcttaatgagccacatagataaatattcatggcatcatttatttttccgggaaagtgattttctacctacccaaacacttcaaagaaaaatgttgccagcgccaccactcacaacctttgtttttcttctttccttgacctttcatgtaacgatctcgaatgctaatcttactccaaatttcgaaacgtttgaaacccatgttcaggaaagtgattacagttcgaaattactcagacccagaagaacaagtccttattccttagatgggtctttggagatttccgaacctcagaagcttgctcagagttcagtcccatctgaaacgacgaggcaaatcgaggaactgctctcgacaaagatcttactagaagcaaatacgacaatcttcagtaagaacaagacgtttcagcttgggtttttcagtccaaatgggagtcggtactatctgggtatttggtatagcttcatttcgccgccgacctacatttgggttgcgaaccgagagagacccattaagaatatatcgtctacgaccttggaaatcactgagacgggacgattggcggtcaaggattccgttagttcgatcgtgtggcagagcacgaatcttgaaaccgggtcagccctcaagcttttggagaatggtaacctggttcttctcacaagcaaaggcacggtttcatggcagagcttcgactatccgactgacacgtggctgccgggaatgaacctcaccacggcaaaaagcttgactagctggcggagctcatcggacccttctccaggtttgtactctttgagactcagacccgactacagcgagttcgagctcgtcttcaatggtagtatgccttactggagcaccggaaattggaccggcaaggctttctccaatgtgccagagatgttggtgccgtacatatacaggttccattttgacaaccctttcatggaaacggcgtcgtttgggtttgccgagacgccgttggatgggttgactccaccgctgacccggttccaactgcattattcgggtcagctccggcagaacacatggtcggcgcaggtagagaattggaacatgttctggtttgagcccagcaacacgtgcctggtctttggtacgtgtgggaagtttgggctctgcgatagcctgaccgagagatgtaattgcctctctggttttgaacccgttaataagataaattgggagtcatctagggattactccgatggttgtcgccgtgtgaacgatcccgtttcttgtgaagaaaaaactgatgatatgtttgaacaggttggtattgcgagcttaggcgatagtagtgattctgaagttgacacttttaactctagacttgatctctgtcaaaaggcttgcttggaaaattgcacttgtgttggtgtgcattatgatgtgaggaccaagttgtgcaaacatttatttgggtctctcttgaacttgagaaattcgacctctgataacatggatttggaagtaatccatttaagggtagggaaagaaggtattctaaagaagaggaaaaggcatttgaatcctgtagttttggctgctatcattgttgggttgattgctgttttgggattcgtaatggtaggtgtgttatttttcaagaggagaaaagggaggaagacagtagaagaagatggagatttcccagtattgactttgaaagttttttcatataaagagcttcatcagattacaaggggtttctcggaaaaaataggccatggaggttttggagcagttttccaaggaaagttattatcagattctgctgctcttgttgctgttaaacgcctcgagaggccgggcagtggagagaaagaattccgggctgaggtttgcactattgggaacattcaacatgtcaatctggtgagacttaggggattttgttcggaagattcccataggcttttggtttatgattacatgccaaatagttctttgagtgtttacttacgcaaagaaggtccaatgttgaactgggaatcgagatttaaggtggcaattggtacggccagaggtattgcttatctccatgaagaatgtagagattgcatcattcattgtgatatcaaaccagaaaacattttgctcgacagtgattacacacctaaagtttcagattttgggttggcaaagctacttggcagggactttagtagggtgttagccacaatgaggggtacatggggatacgttgccccagaatggatatcaggcgtggcaatcacaaccaaggctgatgtttatagctatggaatgacattgatagaactaattggtggccgccgtaatgtggaaacactgccctctgctggtgataatgaaggcagaggagttactactgataaatggttctttcctccatgggctgcacgccagataatcgagggcaatgtggctgcagtgatcgatcataggcttggcaaggcatatgatgttgatgaagcgaggcgtgtggcattggtggcagtgtggtgcatacaggatgatgaggcaattaggcctgcaatgggggctgttgtgaagatgttggaaggacttgtggaggtgactgtacctccacctccaaagttgttgcaagcacttgtttcaggggagtcttttcatggagttaatgctgattctgggggtggcggcggggtacctactggcactggtagcgacttctctcctgagaatattcgattttcaaatgctggttcggaatcatctcttggtaaggcctcttcccctgtaaatgcaaatgtgaatggaccccatgatgttcgtgagcttaatataccaaaggtatatgcacatactatatagtagctttctttctcttgtaaaaatagagttacagaagaaaaagaaaatgtgattttctgtagattatcttgtgattcaaggatagttttggtagaagtttctaaccttttaaaacaacaaaatttagtctcttgttctttcattattttcataatcatagcacactcgagcatagagatggagttaggagggaatagattatctcaaaggttcaaaatatgttaggtatttatcccaacaagattacttaatgacaaagcttagcttctttctcaacaaatcagctttttttttttgaaaaaaagtaaaagaaaacatttgagtcttgtcttttaggtagtaatttgtgtggagctgtaatgattttgagagctagtaagtgctattttgactatttgtacttttacatctcctgtaaaggctacttatctgccaatgcctcacacggcctcattttagagtctttaagttgattatataaaaaataaaataaaagtctagtaagccaaaatataagctgaaactactattgtcaaaagaatcatagagcacttttctcagtctgatcaattatttatctactttattcatttctcctatttcattgtttctgatatatatatatatatatac

SEQ ID NO: 186050 - DNA, 1726 bp, Cannabis indica
ttcatcattgttaattttcttttcgataaacttgtttacttttgattgacattcacttgtgctcatctttcttgtttacgatcttcctaaatccgttgatgaaaaactacatcaacaattcggttttttttcattgagagcagtgaacacacgcgttgatctcaacttgtgaccatggttagcacgagggaaatgaattatgaagaagaggacattgtggtcaccttgaacaaagaaaacaccatggaccaccaacgagaattttgacctattgagcctgctggtgaagggacctctcgacctctaggcaaacaatccatgcctgacgacaaaggttaggtctaagatgttgggagttcgccgtctccatcacatggtttatgacataccacaaatgttcataaggtgttcatggagaatgatgtgctgtgtcaatgcttagatgagactcgctgacttaatagatagtggcaagagatgcatgattcccaagaggttggaagaccaccacgacacaaagctcatgggcatctggtatggcaagaagggaacgacctcgtgggagttgcttgattcgttatcctatcaaaagccaagagaggtctaggtcacaaacgatgatgactcaaagtcgagatactacacgtaataccataccaaaatgattgtctcatgagaacaacacccatggagggaggaatgagcatcctccgtcacaaccacgtcaatgggtgaccactccgagccgtgagaatagaagaaacaatgtgtatcctcccacacagcatcaaacccaaaaggacacgcaagaacctgttgcccctcaaaacaacattccacctcctctgcgacataactcctgcgaggcacgaggcacaacacgcaataacacaatttcaccttctcaaccatctcctacttctacatatatttgcatagatgaaggaggaagggatcatggacggaactctccatctccaattaagttccctctgtcaccaataaggtatcttgaggctcctcgtgctgattgtaacactttaattaaaaaaacgtcatgtgtcgtgattacattgtaattatcccgttaatcgagggtctaatataccaagtgaattaaataaaaataactcataaatgaaaaaagacttgtaataacttttaatttaaaccaatatgatattatatatctaggatcccgtaaaatcttttcaaaatattataagtatttatataaaagtcaatctaagtggaaaatgagatttctatagtaatctccttgtaggacccaattttcacggtctagcttagccagaacatgtacaatttactgtcaagctctcgaactcatgactggcctgacactattttacccttgcttatacattagagcacccaggaaccaaggctcagacaaaaaaaaaaaaaaaatcaaacccaaatagaaaaacatatcataattataaagacattacgttaataactctaattttaaggtgaacattcactataagtctatctgataactctctctttcttattagttggatgcttagtaataggggtggacaacattcaatctaatccgattgaaccgaaccgatccaatctaatctaattacaaaaaattagatatctaattacaattagaatggattagatgctaaaatttagattctaattggattggatcgattaaaggaatgttaatctcaaaatctaatta

SEQ ID NO: 186051 - DNA, 5842 bp, Cannabis indica
aaaaaaaaacaaaataaaattgatctaatgatctctcctgtacttgccttatcaacccaaacatggcctttcatgaaattcaatatgttatttattaatcctgttgagagctcaagatataattcaaaagcatatttataaaaacaaactcacatgtggcatttaattggagctgggagtcttggagaagagaattttaattaattagttacaattttttctaaagcttaatttaccaaacgtcaaacacggtgcggactcagaattcccaatcccaatcgaaacaacgacataaaatgcagaaagcgacacgtgtaacatcgaccaatttgtcggtgacattacaatataatccaggggtaaaaatgtcatttcactagtcacagtagtaactagtaactgaattaggctctcgctccactcactcactagcttactctttgtaaataacattttaccataattgtatatcctcttttcccgcggctttgaacgcggcttcactcttggctttctttctcaattctttttttaattaattaatattactgattttattttttaataaatatatatttttttattatttttgtaccaagtataaagggcgagagcgtgatctttggtagagcctttccaaaattatattatgggagctgccaaagaatcgaacccctgactgagacactatactcttctcccaggtatctatttcttcgtcttcttcgtttttttctttgattttgattctctgcatttctatctttttcaatccttgtttctttcctttctgtacggacagatcttactactcagtgggatcgactatttcgttaactttggttcaggaatcttcgtgtgtgtttttacatatatatatataaatattcatggaagtactgtattggagagaagaagaagagacaaattttggaataaagaataaaaaagtagtgatcgatgaagttctacatctcgacgtccgggataaagagggttacgatatcaagttcaggtgctggtaaagctgctccaccgtctacattcacaccgacggcggcggtggctgggactaggcggattacgattcggaccttgcttccggtggttttagtgctcgggcttcttttgccctttctatttgtcagagtaacctttctcgtgcttgaatctgccaccaattgctcatccactctcggtacgtcattattcctcattcaaattattagttattaataaatttcgaatgaaagttgttttggatcaaaatttctgaggctgttgtacattttctgattcgaattcggtaaaactgtactatgcatatatagcagtatatatgtgttattgccttgttattgaatcgcaatgaatgaaactcccaacgaaaatgaaaatgttatgagcctttgtctaatgttttttccccaaaaataaaatcaatattctgtgtatttcagtttaattaaattatttcaatttgttctttttcaaatggcagattgtataggacgaggtcttttcagcgggagtgattcgtctccggtaagtggatttatctcgctccaacgacaagtttttttttcttaaaagaaatgaattataatactagtttgttgaaataaattcagtaaattgtagactagaagaacattacatatataatagattcctacgtgttcactagagtatggctacttgagtagtgtggacccaattttgctgaattcttctaaaacctgacagaatttctttattttcagtcacactttttaagttattatatcagaacagtaatacaaataatttcatttttgttatttccatgactttttatttgagtattttaatgtgtatatatatagtagttggtttccgtaggcatggaatatactgaaatagtattatttatggtggtatatacaaatggaggcattacaaacaaatatcttttaacattttcctaatttccaactttgggagagagggtaatttagtctgtgaaatatagaatacagtgtgtggataagcgcattctgaggaattgtcggtattccacttcaaacaattgctttccttgccacgtggccagttggctgagaatcttattgttcttcttctcgtccacttgatctactttatttcaatttccagtgccattaattattttttacattagtgtaggaaacaaaacaacacaagaactttaataattcgcgtaatttttctatttcacatttgaaaaaattcattataggtgatgtccttgtaattactaaataaggagttgcattcatgttccgccagaaaacgctaaaaaagcccaactggcaatatagctttttctgtgtgtgtgggtgggtgttgatgcactcttacgtcaacacggtctccatggttatgatgtttttatctaatgtctatttttctttatcttttttgtctttttttttgtgtgccgactgtagaagcttagggatgagctgacaagagcactagtagaagcaaaagaagttgagcttcataatgaggacggcttggaatcttttgacgaacttgtaaaagagatgacatcaaagaggcaagacatcaagacttttgctttcaagacaaaggctatggtacttgcattataaccctgctgacttttcattatcaactattgataatttgcattgttctttttttctgtattgcgggattgaatagcgatgacatatagtagtagtcagcagacaatattgatctcgcattatcaactttaatgttaatccgggtcgagcgaaaagattagtagattattttgtatccatgtatgtttttcactcttgtgcatctggaattataattacttcagctctgtcaactgagatgaaatataatggtaaaataatagatatgctcttttgtagagtaatgttcaatcagggtaccttttattttgctctgctacacagtgattggctcttgtcaagttgcctaacactccctgtcatgaccctttgccttttgtttttgttaaagaaaaagaaaaacgcgtctttctctgacagttgagaaatttgaggtcgtcttaggcagtacttagctatacagattcttttctctcgtctttatgtagatatagctattgatccgtcggtatccagtttgtctcattccctttatgcagatgtgaatgttgcaggagactatcttttgcaggaattgttcaattattactttgctagtactgctatttattttggctaggttcgatatagataaaatcacagttgggtaatttcaccctgttgccattttgtacacgtgaatacatgtcaggttaataatttggagtacagtttggtgaaaaatataaagaattattcatttctttctttctttcccaacgaagttgtatgaagaacatgtattagcattgtcacataggactgaaactattaatatataataaatttgaagaccctgcattagctcttgttgaatttctctgttttctctacttgaaatggctgtgtagctatagtaaacctattgcaagtaactaccgggatgcaaatattctctctagatttcgtggtttcattaatttgagctatgagtttttttatctcacttccaaaacggatatgagattatttatatcgattgatgtacaaattttagagtatcaaaatcttttacaaaacaagtattctacccaatcgtatctgagtggattttctaatatgcagctatcaagaatggagcgcaaggttcaatcagccagacaacgtgaatctatttactggcatttagcttcacatggtgtccccaagagcttacattgtttgtgcctcaagttagctgaagagtacgcagtaaatgccttggctcgaattcgtctacccccgcctgaatatgtgtctcgcctttctgacccctcctttcaccaccttgtcctacttactgataatattctagcagcctcagttgttgtctcttctacacttgaaaatttggccaatcctgaaaaattggtaattcacattgttactgacaagaagacttataccccaatgcatgcatggtttgccatgaatcctgttaagtcagctgctgtggaagtaaaggggctgcaccaatatgattggtctcaagaagttaatgttaaagtcaaagagatgttggagatcaatcgcttgatatggagtcgttactacaataatttgaaagaagaagaccttgagcacgaaagtcaaaataaaaggtacttagaggccttaagtcctggatgcctttctctaatgaatcatctccgaatttatatccctgaggtaatccactcccattattttcatacaatcctcccctgttcgaaattgaatgtgaatttgtaatgatacatttgatttttatgggccacatgtacagctatttccaaatctcaaaaagattgtgttcttggacgatgatgttgtagttcagcatgacatttcatctttgtgggaaatggatctcaatgagaaagttgttggcgcagtagtgagttcatggtgtggagatgactgctgtccaggaaagaaaattaaagattacttaaatttttcacactctgttatatcatccaactttgatagtgatcgttgtgcatggctttatggtatgaatgtctttgaccttgaagcttggaggaggtccaacatcacagaaacttaccaagaatggttgaaacttgtaagtatcttcttgtacataactacttgattggttttgaaagcattttgttgaaagtttgtattaccaatcaatgatgatatgatatgatcttcttatttttgcaattgcagaacctcagaaatgggttctcattgtggtatccaggagtaactccaccaaccttgatagcatttgagggccatgttcatccaattgagccctcattccacttggatggattgggttttcgcaatccggacgttagtgatcggcagcttctggaagctgccgcggttgtacattttagtggaccagcaaagccgtggacttgagattggaaatccagaggttcgagggttgtggaataaacatgtaaaattcttcaaacaagtttatgagaaaatgtagaatcatggggtgaaaccgaaagagatagaaaagaagttgtctctctcattctttcacatattcattttgtttggaacaaacaaaaaccatgggcacagtttgggactagagggaagaaggttttgccttcagtctctgctcactctaaagctctggaccgagactagtataaatatgtttttcttgtccataatagaaaaatagagcatgaaggtacgtacctccgaaaatacaaaatagtcaaaatccttattcaaccttcaagagacattatatgattgtaattctctaacattaatattgtaaattttagttgcataattaggggcaactcgataagtgttccagcttatgtatcattccgtatcattctatggattagagaacatataacaactcgtgatcactttcacttccaccttgatttaaaatggtttataaaataatattatttttccctcgtagctattgtaatgggttctaagatttttttttttttttttaagtaataattatatattatgaagagtgcatgaaatgaaggatatattttcaattcatttcagatggataaaagttctattaaaaaagaactgaggtgtttcttgctttagatgatttgagatgtttcttgcattgtagactactaaagatgaaagactcagttggagggccgaagagagaaacagggaattaaaaaaatcaatgaaaaaataaaagagcccaaggttat

SEQ ID NO: 186052 - DNA, 1331 bp, Cannabis indica
ctatatatattccccccaaactcactccatcaccatttcatttcattcaatattcattttctctttcttcttaaactacttcgccgtccatagcccccaaataagaaataattaaaaaaaaaactttccgaattctccttattcttatttttttctaaacccaaaacataaattagaatcatggtgttgaagagagaaagagaccatacttttggtgatgatgataatattcatagctatcgtcggattgagtcaagcttggatatggctaattgcttgatgttattgtccaaaataggcgaaactgactccgatgtcgacactaataaattagaatcgtcaccacagcagtcgttgtcggagcgtgtgttcacttgcaagacttgtaacagaacattcccgtcgtttcaagcgctgggtggccatagagcgagccataagaaaccgaagctctccgaagctctccaaggcataccacagccaccgccgaagcccaagacccacgagtgctctatctgtgggcttgagtttgcaattggacaagcacttggcggtcatatgaggagacatagacaagctgcggcgaccgataatggtcgtgaacatcacgcgcctcctgttccagtgttgaagaagtcgaatagcagcaagagagtttgcgcggatttggacttggatttgcatttggctcctcccgggaattattatgatttgaagattcagttcaaggctcctcccaccttggaatgttttctatagatatatatatatatatatatatataattatttagccttgtgttgatataggatcgggatcgagtcatcgacgtagttgcggatttttatagttaatttatttattgattaattttattttattgcattactcatgttcatatttagagaactgatcattggattttttttctctttgaattataccggccgattaattatttgattttttttttggaattatttgtttaatttctccattcttttaatcactgctataaatatatttattgttaataattataattaatcaaccaaataatatcgaatctttattaataatttgcacactttaaaggaaagagaagaaaatttgaagaaagagatattacctttcgttgtttgaaagttaagatctttttatattaattagggaaaataaaaagttccaactttttttccccttaaaaaagaagttcaacttttgacgtgaaggaataagaggatatatatcttaccaaataatatatagtaaatgtccccaaatcatagaagtttgttagtttatgttcttattttaaatttttttttttt

SEQ ID NO: 186053 - DNA, 5382 bp, Cannabis indica
tctattttaaaatagaaaaaaaagagtataaaaatttaatgattttttatcaatattttttttttacttattttaaattttattctattccatttttattttcatttatatttttatatttttattccatctaactaaatgtcacagttctattaataaatttaattttccattcatttttgtcacttaaatgccaagttagaatgtcattgtataaactcacatacatatggcacaatcatattaatttaaattatttaattatttaattgttataaaaaaatcattttaaatatttactatgattaaatagaatttttttaaattgttttaaaaataaaatttttaaaaagttatattaaaaaattaaattatttttttctctgaaatttctctctcttccctcacgcatctccctttctctttttgattctcagcttgatatgatatttccatgtccgttcctaacccctatctccatctccaacggccaccatctaaagccgacacaaaatactagtctccaaccctgaaaatctcaaagccctctcaatttttctgcccctattattctcgtatttgcagtcgttttagatttatgatttaggattagaaggcttaagaaaattttgaattatttttagtattttatatttcttttctatgatttaaggaagactttgagcatgatcaaagtttctagaatcaccatttggacattcaataaaatagaatttgaggtttatttttaagcttaagggacattataagcaatttggatgtgaagatcgaagcttaaacgcctggaacgaattttttttgtttttgagaccattaattgtaggatattcatcaatccgctcaactcgcccgcaccacaaaaaatacagtttgaaattctttacagtgcgatcgtggtttaatttttttctaaaccgcgtagtgcggtgcagtttgtggttttgaattgttaataggtggttcaaaccacactacatcgcactttataaaaatattaatttttatatttatttaaatacactatatgaaggtctaacccaaagcccactagttattgtattgttgaaatttaatttttttctcatatttatttttaagccttataatatttttgacaagtgttgctcacgctttattgcattttcgacaagtgttacaatttaaattactccgttgattactatgtaaacttctataaaaatacagaaaagaaaaaaccactttaaagtgtaaaaataaaaaatctcctacaaaattacataaaaaatattaaaatatcaaaatttaaaataattttataacttaataatcaacctcaccgtgtttcctagttaatcaatatttaacatgactccaaattttttgataatttgactggaagattatgtgcaactttcgccaaagagaaatatctttttatttatttatttctcacattaagcaacaaggactattggagcctagaggaggtttttcagcgggagcacttgagcttaaaagcaaaacgagaaaacatataggagtactatcatttcaagtcaagtaataactccatcccaatactatttcagataaaaaccaacatcatcaagataactcttggaacattaaactctactacactatttgagaatcatagcacactaattgagaatcatcattatccatctacagtgacattctctaagccaacacctttgatctatcgagaatactcgcggctgcggctgcggctcctgctcctgctaaagctgcggctcctagaaccataaggtgaccttgaatatgaccggcccctgtatcttcggtccttgggagacattgacctgcattaatacattaagaaaaaaaaacactttaaaacacaaaacaatttctactatctattatttgacagaatgtgaaaaacaaaagatgagttggcatacctcgagtaatgtcttcgtctaggagatggggaataatagtctggactgcgagaataggttcgggcatagcgtggtgatcgggaatagcgacttgaagatcgcctaagatcaaaatcccaacgtgtgagaagaaatatagacaaagaatcagatgcagtgagatgtacacaacaaaatgatacgcaaacaataataaaaaagaacagctggaaatcatactcaataaatgaaagtaacaagttaatgtataagatgcattgaagaaaaaaaaagaggcaatcatgttcatgtgaaaattattccttcgacagtaagaatccttacgtataacgctctcttgctctcatttcagatggcttctttctgttttcttcagcaaatactactgtcaattctcgacctcgaagcacttgcccatccatatggtatttggcatctgcagcgtcagcagggtctatgaattgaacaaatccaaagccacgaggctccctaaaacaaaatcaagtttggcaatctcaataaaatgaaaaacaaaggcaaaaagcacattcatacaaaaatgctgattgcacctaaataggaacatgatcctgatttgagtgtgaaatgaaatgaaatgagaattataatctccagtgttttttcacactttgcataagacacagacaactgaaaacatcacgtggccgctaaccttgttggatgctaagacaaaattgagatgaaattcttcaagacttgaacttcttctcattatgtttcaaatgcaactttcttcatttcgtcaagtacactaaaagaaccacttgatcacttttattaccttgattgctctcttcaacacaacactctttattacttcaattgatgtcttcaacacaatactcttactacttcataccagtcttcaacacttatagaataaacagccaaatttccataaacggataatatgttattaagtattaataactacaatcttacggggcgacaattattcaaaatgatgtcatagaaccaaacaaaattcacagtatcaaaagaaagtattttctgatagcaaaacagaaacattaaaataaatactctttttgcaagtgatgcatcatggaaggcattacccagtatagtaatccttaggcaagtaaatgtccttgaggggaccaaattgctcaaaaggcccacgcagatcttctggcctgcaaacaattaatgaatagaaattccaaattagagcaaaatagtaattccagcttacctatgactaaaattcaacagaagatactaacataagaattgtttcataatttccataaattcttgccggacaaacaaattctcaagacatttcaatcagtaaatattcattcccaaacgattaaaaaataacattgttttgaccaacagacgatactgacataagaattgtttcatagcatccattaattcgtgcaagactcacaaatctcaatacgtttcaatcagcaaatattcatttcctaacgattaaaaacacaaaattgttttgtgcatactatacataagccttgtttcataacttccataaattcttgccagaggaactcacaaattctcaagccatttaattcagtaaatattcattcccaaacgattaaaaagtaaatattgtccatgcaatttaaagtagaaatttgcaaacaatttacaaacatgtaagctggtattcaaagcaatacttctcaaaattagtataacaaaaaattcacgtacctgcagtcaaggcgaagattgcgaaccaaaagactagtaggaagatctctatcacgacctccatacctacccctcgggctagggctccgacgccttctactgctgtatcctctggtgggcgaagggctgtagctgtagcttctacccctcattctcaatcacctaaaacttctattataaatagcaaaaactaagtcagaacaaaaattaagttgaatacttttccttatatgacacaaacaagaaattactttccacaaacaccaaccaaacatacaacacaaataaaaattgagaatatgaaattaattctcataattagattaaaaagaatgatctagcaaagaagagtataaaaactaaaagttcaaagattcacactagggtctgtggttgaaatcttgtcaaattagaggaaggaaagaaaacgataacaacaaaggtcgatgatgaaaattaaaaatggtggcaagatttagtaatatacctgataaacgtaaatcgtaagagctagctaaggtttgcactgagaacgtaatttctccgaattctggacacgaatcaaattcttgaaaaaactggttcttattttccttttgagttgaagaacgagaaaatttatgattcgagaactttctactcgtgaaatgttcaaataattctaaccgttgatttatatacagttcgacatcaaaccgatggttatgatggatgactacaaagattctcgataacgggcccatttcagagctcggagcccatgataaatgggcccaataagttttgtctgaagttactgggcttaaagaatcaaggcttaaacccagctgaatagccctaataacgtctctgttccatcgactatcggcttcgttttttacttctttgactcgttgctctaaaaccctcctaaagccttaacctttacaaaacacaaaacagaagtagacgaaaccaaactgtaagtagggttttctagcacacattttcttttattttccgggaatatttattttttttcccgagaaaatggctccgccttcgaagaaatttcagaagaagcctaaggatgccacaaagtttaataaatcttccaagccggcgtttaaagcgaagaaggagcaaaacggtcccgccaagtctgaggcccttgctttgcagatagaagatgaagttcctgattttcctagaggttaaatgattaattttgtgccatttttttatgattgtgtttgataaatgtgcaacaatcagaaatttaactacctatgcattttagtttgtggtaaacatttttttttttctgtttaggtggaggaagttctctgagtcgaaaagaacgtgaggaagttcgggctgaagtggatgcccagtttgaggtggaagagcaggagctgaagacaaagaagaagaggaagaatttgccgaagattagtcaggaagaggatgatttggggtccttatttggtggcggtattactggcaaactgcctcgatttgctaataagatcactttgaaggtataaagctggatgcagttgtcacttttaaagaaaaaaaggaaaaacaacaattaaattgtcttaaattttccttacaaatttgatactgttggagttacatattgacttagtttgactgttttcttctaaaaattatagaatgtagtgcatctttatat

SEQ ID NO: 186054 - DNA, 1163 bp, Cannabis indica
tttttttttcaaaaaaagaaaagttacacctaagaatcagtaatgactccgtgtgttctctaacaagaactaaataaactgctaacttttatcaaaagaatatataaataaatttaaaaatagggtttgctttttgccattggttttgcaaagtaggcttctttttaagctatatatgctagttggccaactctaatttgtccccaactagttaataaaaacctaggaccaccaacaacaaccaccaccaccaccagtccaccaatcccttctgtctatttttggtgttttggtatgaattaatataaagttaattataagacataacatacatgcatttaagatgttgacatatcttttattttctatttagatcaagtttggatgacattgatgataacatttaatcacatataacattttatagtagtgcacttagaattcaatcattatataagttagtttctcaaagggttaattggaggaatccaggtcatatcatatatactaattaattagagattaatcattataataaaatatatattaattcatatccgttatattattactagagattatgcaattctgatcattaaaccttttgagtacaccaaaatgtacaataattaaagaaacactagagacaatatatagagaatattgagaatctatttaattacaccgccccatccatgcatcaatgattaccaacattataatgtgtacttattttttttcttattttacaaaactttttatatatccttgtattacggtatagctagccaaaagaattaaaagtataaaagtctttgtattttctttgaacaattatataagtctttgtttgtgtgctactatattctctaaaaactttaaacagtctgatccattgctactatattgaaattgaactcttcatctctagctcaaattattcattcattcattaattatattttatcacataaatgcatatacatattatatgtcttaaacttggtaaatccaataatatcatagcaataagacttagtggtgttgttacgtaaccttattcaacatatatataccataacaacttttttaaactctctgcacacaaaaaaaaaatgcaaataacattttaggtataatataatttttttttgagtaaatat

SEQ ID NO: 186055 - DNA, 7828 bp, Cannabis indica
agagagagagagtttgtgagaatggagatggaggaagatatggaggttgaggctgaaccagtgtttgaagctgttgaaatcgacctcgagtacgagtttgatgctgtacggttctttgatttcactcgggaggagactctggccgaggcttgtgaagctgagttgtggttcgagtccgctaagagctaccctccttctcgtgagtctttaaagcttcttgctttttccccattgcgttgattattgctcttatgtgatcatttaccttcaatgtatatattgactaaaaatttgactactttttcttggcgtaatgcttggtgttcctgcatttttaatttttattttttaaatctttttgctgttctagcttttgtggcgaagttggttctcagagaggatgttttcctgggaaatgtaaacgtttcaccaaaatcagatagagagaatccgagttcttcactccatggcggttatcatgttggtgaaggtcatgaaatttgtgcaaatgatgtatctaatggaggtaatgtgtatgatttcaaaaacttagctgaaaaaatcccaattttgatttctgacattttttttacgtaacagattacgaagcattgaaaagagggatctttggtaatttacagaaagttttgaatcaaccacatgggttatcttcaggtgatctagttaatgctctggggctaacgcaccatattaaagctagctgatattcaaaagtgttcattacatttaagttgttattttatttttactaaacccaatttacaatcttggtgaaagtactgatttttagcaccatgtttataattgtacatatcagctctttcatgatatttatctgccatgagtttaattacccaagtcgtcgagaaatactgagaagtctacctcacaatcttaaatgtcaaaacataatgaaatttgtatgtttttgctttgcaggattatgcaatcacttatcaagtaacaaaccaaaaggtaaaactatcccttcggtcaaagcatcttgcaataggagctccactttaatgaagccaacagcaagtcaactggctaagcaaaatagacctgctcaagttggtagttccaggtacttccttcaaatcaatgtgattatagctgcattctattccttaaattctctgggtgtttatgattatgaaacaatgaaaggtcaatttctttaataacttggtattgttgctttttagatacaaaatgctgcaccttcaaaacaaagagaagagcttaaatagttcctctggagtagaaaatcaggctcccaagagacaaaagttagagggaggtcacctacgaaaggtatggagtgtctcattagcatctgtgccaagtgtatggattttttttatggctgtttgatgaagtaaaccttgctgtgatgcataagttgtaaaattaaggtttgggttaggtcacatttttttttctttctaattttaggtcactgatggaaagcagcaaactaattttgttcacaaggctcctaaaaaggtaagtttgttaaaagttatcctacataaacggtagctcctgtattttctttcctgtgaaatttgatctacgctttcacttatttaaacattaagaccgagatgcagccttttagcattgtcgaagtataagcgaagcttattaaatgcatatatgcattgtcttgcaggatgaaaccactgataaaaatgttgcacatgccaagttgaggcttactataccaagagagcctgaatttgtaacagaacacagagcacaaaggacaaggtcagtatgtttattaccgtatgtgtatgttgtggtgcagagtgctctgtagtgtgtggttaaattgatacatgtttcggtatcaggcctaggagtgaaacagaaattgaccaagtggcaccagctgttcgtagatttaaagcgcggcccttgaacaaaaaagtttgtacttgcagtctaattgaatttgaatctgtgaatattttatgcttttccttgttagcatatttaacatctttaactgcagatctttgaagctccttctttgccacttccgaaacggagtaccccaaaattgccagagtttcacgtaagcgcttgataattgttatctgcttcttgttcaaatgacttttcacattcgaaggactagcattagctactaagctactctatgtattgaagttgatactcacattcctaatctcatggattttaggagtttcgcctgaagacaatggacagggctatgcaaaaggcatcttccaattctgtgtctaatcattgcaatgaatttgacaaggtcattctctactcagtcttaaaactaatattgcatttactacactttaaagtaaaagaagttcctctttattagtttgacaaagtgacgagtaaaaatttgtggaagcaacaatgacaaactttataatgtaattaattcattgcaggggcctgacaaaatcagtagttccagtgttgtagaaaatgggagaagggatttcagaaggtaataagagagttataaagaataatttacaaattaaatgggcatgttcgatctatgttgtgcaattgtttgccagacaagaaaataatactttcatatttgcgttgcttagaccaatcacttgcgaagttcaaaaacaagatggagatgaaatacatagattcaaagctcttcctcttaataaaaaggtaatatgttacaacatttgttgatattcttttcttgcttttagcaattactaaattattttcttttatacaatgcagatattttctagtaaaggagaccttggtatttttcggaacaacaagcgagaaacaacagtacccatggtagttcaaagctatttatctctttctaatcactctttatttgatttcttattgaaagaagtttctgaactggtatcatgttttgagacatataggaatttaacttccatacagagaaaagaattcagcataatccaccaccaatagatctttttagtaaggtaaacttgataaatccattttttccatgtccctctgttatttggtatctatgtttttgtcatataacattaatatggacagtattttttaatttgtttgcttgtttaattgccagctttctctgacatctgaactccagccaaataatggatctcagttaaaagtgccttggtccaattttttatctggaaaggttatcattgcttcacttaatttttcttagacatcatattttatcatttcactttgcaccgtactgagttaatcgtatttttttggcacaagggctcaaaagaaaatagatttgacactttcaagacagaacataaggtaccttccagcctataagttttcctcacaaatatttgaaatctcgactcctttcactttcccagcctcacagtttgttcaatctatgttcttttgtctagttatgcatgtgttattttagccttttatcttatgtggtgcatatggtctcatattctacaggtagcaacagatcccgtgaacgaaaaaccttcaaactttagtcgaaagcagatcccatgtggaactaatggttgcatctctgacattggtgataaattgcacacaaggtatgcatttgaataaaaatattgcacacaaatctttaatacgctcatttcttttctttctaagttaaaacaaaacaatcatgataattacacacaggagctttggcatccgctgagggtcaaagggatcagaatcagatttcaattttgctctatagctgctggacaaaagactggaatacaatacataaaagcgatacatttcgttgtacatggaaattgatggaagtccacattgccttaccttagacatacatagttggaactagttttttgtattttccaaagttccaaagttgtaggtttcagttaaaattcaataatatgttgaaaggccggtgttgtacagccattgaaaggccaccttaccctcatagcttgttccataatctttttctttctaccatcttaacatgaaattaatcagagttggttcagttctccagcaaaaagagaaaaaaaacagagttagctcagttcagaaatatacaaaagtacagtccttgctcctcttaagtttttttcttctacaaaatagaagatttgtagccatttcttttctaatctgtgttttgttcacaggataatgatataaaaattacaatttgtaagtttaatgcaatcgactccttcaaactaacacagaaacgttaaaacttagtagctcctacactaatgtgagagttgcaaaataactagcaattacctgggattgttttcacaaatttcttattttatttggtgtattaaaccaacaccaaataacagggtgtaagactactttcttctggtagctttatttcatctggttgctttgggaatcaacagtatctcctccaaaattcttgttcccatgtttggtgagagcatgcttagtccagcgtttaatatcataagcttttttgaagggtttcttgtctttgtgatgtcttttgtttgttattgcaattgccaagtcatttggaaacaatgtgcgccaaacaaaggcatgaagaatagtggaaacaattaacactgaaaccattgcagtggacacgaaagaaagggttattgcgaggcccttgcttggaatcgaaggtacgtcttctgcatacttgatggtagctactgaagcagtcgtcattgggaaggtgtaagaccaccatgccactgaaaacctgcaaacaaaaaatgcttatcgaccatttacattttgttactagtccaaaccattggggcagaagagtgtagtcaatttttgagccaataactgataactgatatgtaaatgattagtgagtgtaagtttcatatgagaagtaaagcttaattattacctaaaccctgtgaagaatttgatccgtacaactagtgaaaagtagagaaacagagctatgaaaaagcaggtcctggaacaaccatcaaactctccatagatggttcgccaagcaagactggcagctgagggagcagctataaacattgagtagaccgggtgtagctccttaggcaaagcctcacttgttggcaacctctgatacaaagtgacaaacaccacaagataatgagcgaaaccaactgcccacaagaacttggcaggctcattccacccgaccttcgaagctagtatagctccgacgaaatttcccaccacggataaatgagtcgaggggtttacaactttgcatagccttctcttgccccctgaaagccactgtccatagatttttatctcaagaaagaagtaaggccccatgaaaatgcaccaaatggcagggtgaagtgttttaggggataacattggagggatactaatggctaagaacatgcctaccacccatggagcaaaaaagaagtttactcgaactgggtggaagtattctcttttaacagcttcaaagtagaatatgcatttgagaatgtaagtgaaagagactgagaccacaacagctagggctaagagccatatggcaaggtttatgaaagggcttatgtggagaaatttgatagccgggcttgctgccaaagctctccataaaacagcttggctgcttaggcctagacatataccataacacccaattggaaatcgaagtagaaatggccatttctcatctttgggtagaagaatgtcctcattttcctgccaaacacaaatataggcattaaatactcaaatctctgttgttatgcaattctcacagctaccaactacttctctttctttttaacaaagtaggagagaatcatgtggttctccacattaagtgggggcttagtgagattcaatctccttacccaacaaagaagggtgcctaaaaaacacattcccacacggttattgattttcacagctagtcagacattgtcaagtaaaaactttcgatcacgtatcacctaacatggattcttatcactaacgaacgacttagatacatcaacagcaaatcctagacttagactaagacaatccctgacataacaaacagggttaccttagaagcacatccctacaactacacttcaccacatggttgatgtttttctcttaataagttgctaaatatgattacaattactcgatttttcaactattcagaaattgtcaagtaaaactttttttttatccatatcatgtacaaactataatttactgaattgtaacaagaaatgtgcatgttaataataatattattaccttgacttggtcgagctcaggtcctgtaagtgcagcatagtacctcccaactggaacactttcattaacagactcatcacgctcttcaactgagccttcaatcttatgagattgatcaatatctttctgatctttccttaatggcaacaaagagttctgcttactaagagtggatttagttttgaacatactaaaatctctctttcttccttcaattccaatctggttcgccaaatcaaaacctccaaagctccttccacttctaggaagtgatggccccatcctctcatctttagctttagataattctttgttaagcaccgcaaaaccggtctcaagtgaaacttgtctactaaaattactccttgggttcctccttatatctctaactcgaataggcctattcacacgcttattagtattgttattcccggttgctttctcaaccatagtactagaagttatttctttttctttaacgttaggcaagatttcatgaacatcaacataatgagtttgatgagaacttgaagcttgggttattggacttttgtccatttttttttctcttaagaatgtaatatgaaacagtagtgatgagtttttaattttatacatatcaagattcatatatgatatttgatttgattggattgcatgtctgtttgtttgttggtgtctttattaggtttcacataaagttggaaaaagtacgtagtaaaggtggctaagctcttaattaggttgttggtttggttgtatggttaatgatatgtggtgtggcaaatgacagtactttttcgagtaaaagatggttttttaagggatatcccgtgagagaaacttaatccttcttttattttttttggttctgaagactttgactaataccaacttggacatatgtatagattgaaaatgtttatatatatatttatatgttattgttgaccctgcaattcaatttacaatgtgtaatatcaaagttattccaagtggaatagtctctaatcatgaagacactacttaacaatatgtttttggaggctaatcacttaatttaagtcattttaagtacttttgacacttattggtagaaatggaaaaataattgatagctaaaagttatgagtcctgacttgttagtgggcttagacatctttaaattcagaatttagttcaaagcaaaacatacaagttgttctttttcctatctttctaaaatatcttaaatcatctaaatcagagtaatattgagaaaattatgatcaaaatataaacagagcacttggcaggtgtctctcctcattcgagggggttgttccttgcccaagatagttgctccctatcactccccacccaagagagtctcccctcaccaaaaggggtctctcattacccaaaagatgtttcttctcacctaagggggcaaatatagacccccaaaagttactaagtgtaaattttagagtctcatggtcaataagagcttaatacttagagaactggttcttgccttctctctctctct

SEQ ID NO: 186056 - DNA, 3190 bp, Cannabis indica
tttaagtagctgaatttaaggtttattttggctaaaacgaattagaggaagatgtatacttgttttgttgagatgataaatcaattttgactacagttcaaatttccactacaaaaacagaaacgtctgaattcaattaatggctggtcagaattctatctaaaacagtcgtagaaaccaatttttaccgtttctgtattttacatttatattcaagaaaattgcaagtaatatttgtggtgtgagacagtgagaggcagagcaactaaaagttactgaaatggaagtttcgtggcctcaaaaaccacaaaataagatattgaaacgtgtttgagaattgttatttacacatcaacttttccactctgctgtttagtttatcagaagctacagtaataccataaagggttagaaaacaggtgcacaaagtgaatgaattttcataccaatggggatatgccaaattcttttgtccctaaatgtcaaaaaatgccattccattatttattaacttaactttaaaggaaaccaaactcattctttgagaatctctgaagagaaattccactataataaattacattacatagaatagccattgtcaatggcacacaggtcctaaattactgtacatgagatgaaacgttcatgtattttagctacatacacttaatagttctacaagatgttaattcaattttatacatacaatgaatgattagaaaggaaactgaccctatattgtgcataaaaactaccaatagtttccattcaaaataatgataacattgtaacatgtttgattccaaattttacacaaaagggaatgaatagaaagtttgatgaacaagagaagtgatattctagctgcactaaatacataaaaccaaaaataataattcttaaaaattaatatttagtttttataactatactcaaaaccaaaataaattaattaacaaaagatataattaaatgactaattacaactctgttttttttcttcactaatctcactaatcatcattgttagcccaatattccactccatttaatcatttcccattgtattgaaccccatatctaacgtcatcgaatgtaccggatacttagcggccaccggctgcggtggcggcgctgttagcgacccatggaagggaaaaactcgtcgggaaatgatcggaaaagaactctccggtggtcggacctccaagaccctccaaacccacgaagaaatcatcgctcatggccacatctgaaagcccaaactcgtcttcatcgtcatcatccattaaaatactctcgggtccatctttgctttcagtggttgtactgtgcgtttgaggaatagagacctcttcttcacctgaggtcgctggagaggaagtcttggtggtctgattgttcaagtcaccggtgccggagatagatgggggagtagagggtttctggcgagtggaaccggcaagtgagttacggtgagttggagctgggtggttgtgctcggcggtgtaagttactatgaacattcccgggtcagtccggtttcgctccacttgttttcgggccaaacaaccttttgagctactacatctataatatcccctgaaattaataaatacccaaaaatataaattaatgaaaactcatctttaataaataattaacaactatataacctaaaccaaacacaactggttttatagttttatgacaaaaggagaaaagtaccttggatatggggagcctttgatgggtttttgaccatatttacgccatgcccagatgtctgaagagagactctcagctggtacttggcaaactttcttcaactgattcttcctgaaatggaaaagtaaactaagaaagtaagtaaaccatataaaacgacattaattgtaaacaagatctacgatcaaattttaatgtacctctttttggatcgtggggtggtggtggagccattattatgagattgcttagtattgggttggtgttggtggtgaggttgctttagttgtcgtatttggtcatttgacctaaaaggagtgctagtactcgtagtactgctacatattgaagaaagcgatgaaagaggagtatgaatctgagtttgagatttagggaagaaaggcttgtaaagctcatgaagctcttcaacaacgaagtttctgggtctcatacaattgggatctggaacaagaaagagttgaccagagctttgatgttcactaatattactactgctattacaactagtactacaaccgaatggagaagacgaagaagaagaaaataacatggaagaggatgttgcagccgtggttagaaagtccgccgtgaaaacagaggaggctgagcctgagcctgagcctgagcctggtgtggccgttgaagtactggttgttgtattagtagtagtagttgaagccctgacaccggcgccggtgatggaacatcctctcacgactgcctgaagatcccagtcgacctccatggtggtgctccgacaagctctgtaacctgtgttggctcttgctctggctttgaggacagaggaagagaaagagagagagaaagacaaaagaaggcgctgacttttgatgagggagaaagataaggatgcaaatgagtgggaaaggaataatatataacaacatgtatatatagaaagagaaagcgggtttttacaaaataaataaataaatataaataaaataaaaaagagttctgactagagagacacaagtgggctttttctagagagagaaagaggtggggttggcatctctatgcaaagtttttcatttttttttaaaaaaaaaattaatgttatctgattaagtgtgttgaagaaattgaaaactggttttggttttggggttgactttggaaaatgtcaaagccggatttgatgatgttaaaaaattccacacggtgtctagggagtggagctatagagatataccgacaaaaagagacagaaacaattaaaataatacaatcacattaaaaaaaaaaaacaaaaaacaaaaaacaaaaaaattgtggaaaccggttgagttttgggtgctctcataaatttcttttagaatgatggttaattttggtaaatttgaatgggtcggtgagactcaaagaaagccggtctggtctctccaaatatctttgtaatatctagaaaaaatta

SEQ ID NO: 186057 - DNA, 2443 bp, Cannabis indica
aggcctatgataaaatggaatgggttttcctagacagagtcctcggtgctaatggctttgatggaaaatgcaggaagctattgatgtcatgtgttacaagtgtttcatactctgttcttttgaatggaagcccccttaaaaagctaattccccagagaggtttgcgccaaggggaccccatctctccttttttgtttcttctctaccaggaggccctttcaaaactcatttgcaatgcggaagagaaaggttttgtacatggaattaagatcgctcaaacagcccccctagtatctcatctcatgtttgctgacgatacaatactttttgcccgagcaaatgaaacggaagcaaggaagatacttgagtgcatatcaatctatgaaaactggtcgggccaaacttgtagcaagcctaaatccagtgttctcttctcaaggaacctgtgcagcagaagaaaaaatagcatactgagcgccctgaatattgttcaagtgagtgggggagagaggcatttgggaaatccttttattttcaagaggagaaaaaaggaggattacacaaggctcaaagacggtttaatgaagaaattggaaggatggaaaatgaagctactttcgcatgctgggcgcttaacgttaatcaaatctgtgacttcagcaatgccaatctatgctatgtccacttcaaagatccccttgtccagttgccgagaatcagattccttgatgaggaaatactagtggttgggaaacgttgacaagaatagatacatggcttttaaggcttgggataaaatatgtcaaccaaagagttcagggggtttgggtttaagaaaatgcgaagatatgaacaaagctctgttatctaagctggcttggagtcttgccactcatgaagataaaccgtgggtctcatgcttactgagaaaatattgtaaacatgagagcttctggtgtgttaagcagaagagcaacgattcctaccaatggaagtgcatcttggataccagagcaacgatcctcaaaggctcaatgtctgttgctgcctcgggtctttctatcaacttttggaaccaaccttggattccatggctagagtactccgaatttgtggcactaatgaataacattagagacagaggttacacaatacaaactttgggggatgtatcccaaggaaatgagtggaatgcagaggtaatttttcagatttttggtgaagagttagggaaccgtattatgaagattcctagaattccttttccctatcaggtattttggaagcaaaatccaagaggtaaatttcctgtgaaagctgcctatattatagaaaatattgtgaggtttgcgctagaggaaaagatatggaagtggatttgggaagcaagcattcatccaagagttttagtttttctttggagaatactgagtgaggcaattcctactaaatcccgtcttcactttctgcaggataaactgtgcagtttatgtgaagtggaggaggaaagtgcttttcaccttttctggaattgtagcttttccaaagccatctggtttggatgcaacttggctctgaaacttgatgtctaccagcttataatatgatcagtatgatggtgactttaattgatcttctcgatcgttttgaaaggaaggatttgttaacatatttaggatgcatcatgactgaaatatggcatcagaggaattccttttgtctccagaaccaagctgttaatgtccatgcagccttattaaaaattgaaaagaaggtggcaaatttcaagttatctattcctgacagacactgttgtagtggtgaaataagcgaagttctgggaaggcagggaattggcgagagccctggtatgttgatcaatcaaccttctaatggtatctgtaacatagttctcactgttgcatcgtgggttcaagcggaagcaggcattgctgcaatcagtgttgatatgtcaaatggttgctggtttgtcagctcgcaaaagattcaggcacaatcggttttggaagctgaactctcagcaatttttcttgctcttaacagggcagttgatgttgtgtggagagaagttcatatcctgttggattcgaaaacggcagttcaggctttaacaacaaaagcaattcctgactagacggtagcaaaagtgttctatttaattctaaacttgtctaaaaagtttcatagttgttgtttctcttttattaaacgtagttgtaatgttgtggctgatggtgtagctaaaaacgctagaattactggtgatttggcagtttgtaccaaggggagggtaatcctccggtgattcccatcaattttcttaatcaatgaacgagtagttctttcaaaaaaaaaaaaaacggttatcactaaaaatttgtttttagccacaaaaattatagtctattttaaattagtaaaa

SEQ ID NO: 186058 - DNA, 1908 bp, Cannabis indica
ttttttaacttcatggaaataaatttacatgaaaacacttctgagccatccaaactccaaatcatcttgtcaacttgaaagtgcaacatttaaatgatccaacaccactgacaaaactgaaacgtgtaaagctctctcatttaagttttctaataaactttaaattacatgagaaacccgtagatccactcatatccttattttctctaaacagtgctataaagtcgttctttgagtttgcaaccatatataatcatgcaaatctatcagccaaagtcaaatcactcacccataaattctccaaaaaccaaatactacccccatgcaaatcttctaataaaacttctgggtgaattttaatagagaacacaactcaatattatataaaactaactagtgaaatataggttcatgttctattgagtctcattttaatatattccacctcagattgactgaacgttagagaaagaaatcttactggaagtcaaaaaggtatttacaggaagagaaataaggtgtccttgtataatcatataatgaattatgaaacgattgcggctacaagttcaacccttgcacatgtaccaacatatgaaccatcgtaaaataaaaacacaagaaatgtagacagataggaacacagatataacaatggcgattctatactcaataattccacacccactactaacctctctttccctatttatatccctcaacagctagaacattctatactcaaccatacagccagctatcatagctaatacaaccccttatcccaagtcctaacatagacttgctctaatcctaaaaatcagttccccaagccaaggcaaggcagtggtataataatcctatcctgtgttgggcatatttaatgaaaggatgcaatttttgtttaactaattcaaatgaaaccctgtcatcggcattgtgcaataaaaacatagattttgttagtaaaaagaaaaagtagaagaaatgtaagatgaagagttgttatacttatacccaacaggactgatgtgctatctatctgcttctaactgaaagattggccaaggtgatattacttttatcctaacctaatcacttggattgcccagcatcccaaacatgcgctaactaggttactaatacaacaattagaaggtcaagcaaccgattagttagcataagttttttcatggaacaaagtcggtggtaggaagactgatctcaaattatatctatattttgatttttctttatttatttccatttaaaagatatccttacaaaaaatagcacctaagccccataaaattttggaaaaactatgtagcttaagctcactacaaatttcagttctgtctctgagtgaattgtttcatttctcaatgggttatcattacaatttcaagagtaattagaacaagctacaagtaatgaaattccataaaaacgagaactttaaatttatctaaagatttaatcaaacttacatacagcaaggaactgaaaaacctttctcctcctattaccaaaccctacaaacatggccttcttccataattttttctaacaaacactccatcaaacagtttacaggcatgattctcaaacagaaatatagcataataatagccagaaaactcaaatgaaatgagaaagagaaagagaaagaccttgggattggtggagtgagagttcttgcggatctgagaagcgatagtggaacggagctgggagacggtgacgacgtcgtcgagattgtagatgtcgatgatggaaggaatggatctgcaagcagttctgaagaaatcgaagacacggtgcctagcttcctccaaggtcgctgaattgggcggcaccttcacgcttcgcaatgtaaacgcattttcccttcttcttcttcttctt

SEQ ID NO: 186059 - DNA, 2254 bp, Cannabis indica
aaaaacttgagttttttttttttccagctgctttccacagttttacatccatggttgtatcttatacgtttttatatttctaggtctggtaacttcttatttccgttttcttaagtaattttggcaaatggatttcattatgttgcagttcttaggcttattctagagttgaaacatggggttattatgcaatgctaattttggcgagtcccttgcattgttataatttatttctcctgttttgatatatggcctattttgtaacatatgttttcgatgtaagcagattgagtttggtcatgtcttttaattcttgcttattctgtacaatctgttttgatgtattgattgagctttctcactgctttcttttttgctgaaattgatccatcctttgtaccttaagaccagatatctctaataataattttcaaatattgatatgtaccttcaagaccagacctctaatataattctcaaatattgatacaagactaggtacctttaagaccagatatacctataataataattctcaaaatatattaacctcttcgtattcttcttcatattgtattctttttttatgttgatatgttcatcctacttattggaagatcatagatgctatacctgtaagaatgattttcaaatatagcagtgtgatatgctcattagaaaatgcccttggcaatttatatcactttgttttcctcaattgttgaataatgtcaatattggctcttaagtttcatataaattcaattggtatcagtgtcagtgcgttattttgtgcaatttttattctaaatgttcctgactttaaacacctatcatataccaggtcccttaatgctatacaggattgctcacttcttcccaagttgactatagctgttggtctctctatattttctgtctggggtcttgtgccacttattcgtctgaccagaaacctgtttcgtaacgtatgggtcttttgttctttccattttgtgaatttatctcatctctgtatttctaatttgtttatagcctcttcttctgtctaatattgcataaaattgggcagaagaatgataacaactggaaaaagagtaatacatatcatataacaacatcatatattcaacctttgcttttatggacagcagcgatactcatttgcaggtatccttctcattattctgttttgattgtctatttttaattttgaaggaatgaagttacaagtcatccactcatatcttatacatataggaaaacaaaaaagaacttacccactcttcatttcagttctatggggaaagaagagagttgaataatgagtagtacttcctgaagtttgtcaaaaaagagttggctattatcttcaatctcagtggtccatgtgacacaaatgtaattagctttgtggcactttaacaatcttagaatgttttgtagcattggcaagtttaacccttgagagagagagagaaagagggagagagagtgaaaggggtgggggcgacaaagctgttttaatttgtttgagtttttcttattgtagtgaaaatcttgtactcttgcagggcattggatccagtggtcttaccttcagaagctggcctggttgttaaacaaaggcttctgaattttgtaagatcgttatcaactgtgctggcttttgcctattgtttatcaaggtcagtgttttcttgcattggtcttggtctttataaatgcccttttgcgtcgtctctgatttctggatattgtctcattctatcttcttcttctttttttctttctttctttcttctattttcttttttttttttgaggaattctgttggacctatcagtcatgtctaatgcattttgttatgctaatgtctatcttcataaatcatactacttccacccttcaaaccagttgtgacattttctgagttcttattcgtggtgacaaatattacccttttcatgcagtgttattcaacaagcacagaagttctttatggagactaatgagtccagtgatacaagaaatgtatgtctggtgctactgtgtaatcctatactcatgtttaatatcattaatttactttgctgtaaaaaatgttatcttgtgtcatggtataatttttttgcattcattgatttgatgcattacttatgcatttaatgtacaaactacaagtttcaagtcaagtagtaccatacaagttccatgcagtttctataactaacattcatgttatccaggcaa

SEQ ID NO: 186060 - DNA, 3936 bp, Cannabis indica
ctagtaaagttctaaatggatttggaaatttctcttatagacccactaaagggtagtcttcttatgaaattgaaattgggtttccccctaaaaatgccaaaatgtacaatcattaaaggagtgggggtgtggaaccgtcaaaacacgttcccctatttctcgttttaaagtattaaatgttgagattcgaagagactaaagaagatacactcgtctcgggcagggcaaacgttatctccggtacaacatgtgaattctaacatgtattaccaatctaagctatgagcagaccttggaagtctccatgtgaccaacatttgccacacgaacttggggaaaaatgttatcccaattttttttacaatatggtgtggcattcaacagggtaacacacatcaagtaatgcttgcacctacctggaatatactagttaagggttccatctaggatgattcagagtcgaacaacttaagtctagttcttcagcaagtattatccgagcaagttccatgccttgcatttctccaagcaaatcagatatgcctaactaagtttcattctccgtatagagggaagcgataattaaagatctccaaagatatactcctcaaatatctctagaattatagcttaattagaattcctatttttatgggactgattttacttgattgagataatgatgagatttgatattcagtttcccaaattcttctcttattttttcaagacattacatcttgtattttttctataaatagtggagtcatttcactgagaagggatccttttctgaactttcaaaagagttatcctgttgccaaaatatttgtaagctttctcgtgattgttaagaaactcacttggcccgacccttgtgatcttaataattttctaagtaatacaactaaaagggggcggactattaccattatcacggtgccgaacctctttaaattctttgtgttcttattgttttacttcattattattctattaattaatcattcaattcgatcactttaagaaccgagcatcgttggctaaaagcgagatcgacaaattgcacccataacaaccatagcataatcaaattacacttttcagattttgattcgaaatcataaaaaataattataaatgacctataaataattgctaaattaacatagattgcatgaaattgaataaaagaagaagaagaaattgaaaaactacattaatataaaaaagattcaagtgagtcacataatagccctaaaactaaaattagctcataatagtcattctaaacatctaacgattcaatcaagaacataaaagattgagataaaagagataaaacacaaagtggaatctccaattgtgtcctcctctttccagcttccactcctagtccccaatactcaaaaaaattgaaaggaaccctcaaacgtagccccattttgttattttatcaaaatttgaaagttgccaaaaaaaaagtcaagtgtcgcaacctttggtagagagtcgcgactcttgagttttcttatagagacacgatttttcaattcctccaagcgtcgtgaccttgcttcgaaagtctcgactcttgccttttctcccaaaaatgctccctgtatagattagagagctgcgacctttgatgctgactcttgaaaacttgactttttaaatcttctggaatgcaccaagttaagaaattcaatcttaagattcctttttgtaaaatttgatcattttcatcaccaagaaactcgagaaataccattttttcaccaaaaagtgaaactctcttcatttaaaacctaaaattaacataaaagcaaaaataaacgtaaacccgaataataaaacataaaaacaataaaaataaccctaaaactagactcttaaaacaacctaaaaaataagcctaacattgcttaaaatttatgacatgataaaattgatggcatgataaagtttattgaatttttgtgaatgctcgagggtatagttgtgtaatctgtatgataaggttgaagtttgatagggtacgatgatgatatgatggctgataaaagtacaatattacgatagtggtacgataagtgcttaaaatttatggcatcaattttaagcaacaagttaaaccctatcgtaccactatcatactttatcaaatatcataacacatcgtaccatatcaaactttcatccataacttcaagattacactactattgtacccaccatcgtaacctatcgcaaaaaatacaaagaaataagcaaaaaatacaaagaaaccacagatcgaacatctaaacaacaatagcaaaaaatggtctcgatggtttcttcgatttattgggtttatggtacacgaattggggttcgcgattcgtaagtggccgagcttcgattcccttttctcttttcggtggttcttgcgatttgtggctctcgattccttttcttttttcagtggccatcgtgtgtcgcaacaggccttctcgttggtcgtggggtacgaagacgatggtggctctagaagtggatatgatttgggtcttagttcttgcattaccaatactaatggaatggaacaagagacctcttcccactaattttccggaccgtgtgcattctaccctaaaaaaatatgaacaataatattttctaaaagtataaggtgaattaaagttatgccttatagcatttttactggattatctcaatcatttatttaaattgtagaagttttcacaccgaccaattttcctcaccaatgtaatgtcaaattttaaaagataaaaggaaaatgaagtttatgtttatcctaacagtagaaagccattttctctcgtgtgcgttctcatcgagctattcaatcggacggctgggctgggttgctaaatctactctaaatggtaaggtttatcagatccaacggtttcaacatcagagtctatggtaaacacgtagagactcccataggaaattttatcttatttccgtacacgtcgttcaaggattggacgaaaatatattattattatttaattttagtttggaatccacactggggcgtgtctccgcaagcttcccgggaccattacccactttttcagattttggcagatctaagctaagctaagctataaacacaaaatccgaggcattagaaagaaaataaaaataataatgaaaatttgaaagagctcgtttgacgagaaaaacacttccctaaaaagaataaatggagtccgagctcaaagacatgagttccgccgtacattcgccggaacccaaatcggccgagtcgatccccgacgatggttcctttgccaaggacgaccgtcctcttctcaagccggaaccctcctccgccgctgtctccggagacagcctcgaggagatggagaagaaatttgcggcgtatgtacgcaatgatgtgtacggacccatgggacgcggcgagttgccgttgctagagaaggttctactcggtttagctatggttactttggtgccgattcgattggtggctggtatggccgttttggtactatattacttgatttgtaggatttgtactctgttttggtcttcgaatcgagaagaggaccttgaagaggaagaggattacgctcacagtgggtgggtggaggagggccgtcatcgttagctgtgggcgaatcctctctagggttatgcttttagtgtttgggttttattggatcaatgagacttatcggattctcactactgatcccaagtcaaacaccgaggtatatcatatttcaatacaatgtttaaatggaatttgcaatagcattaagtgaattctatagtgactttctctctgtattcagaagagaatgagtgcatctttattttattttaatgaaagaacgagtacaccttattcatctatattgactttcaaaa

SEQ ID NO: 186061 - DNA, 3306 bp, Cannabis indica
aaatgtctgctaataatgcactttttataaccaggttctaaacaccacaatttatacctcttcacaccattaaatagcctagaaacaagaacttgagtgctctaggcttaagcttgtcttgcctaatatgagcataggtagtggatccaaacactcttaagtgttccaatataggtacttgacttttccacaattgtagagtcatgaaaatcaatgcaatagaaggacatcttttccagcgaggcttcacacgcttcctgctcccacgcgcacgaccatcattttctcccttcttcttgccttcagcttcttcccttctttcattactggttgtgaagagtgttttcaagttctttctgcatcgagtgatccaatgatttcttaacttgctttctattatcttagggtccaaaattattgggcctatgtcttcggctgggctatcaaagtctatatcaaacaaataaataaataagctatttggaatattcacttataatagagtttagtaaaatttaatttaaaaggacaatttcgatgcgtttttttttatgcttgattagggtctattccccacattgagaaagactcatttgtttttacaataggtcttttttgggagacaatgacaccgataaccactacaccaaaacaatattctatcccttttccattgttaatggaccaatcgcgctagtgctcttcacatacacagaattctattcattaaatctatcataacttattccgaaagattgctagtacacacaagccaattacatccacttattgaaatgattatgcttctttctttttcaaaagtgaaaattttgaaaaatgtttttctaaaaattaacaatattaaatcaagtatagtggagtgatgtaatgtaacgttggtcagggtaaatattatatatatcaacaacttaattattcatataatgtcccactccaatattacaacatataaatatatcttcttggtcatcttcttttttaatataaacagttaacaaaattcaattttagctatcgaaaataaataaacaaataaataactgtagcaacacttaagacaccaaatgtacccagcgagcaacacttggcacgccctgattgaccgcaaaagccatataataacccggcggcgcaaccatactattaggcggagccgtacaaattattttataccggccgtcttcgacgggaacggctgggttgacggcaagtttgactaaacgttgaccttgagaaaatgagtgagtagcaaacggcgcgctcccaagattgacttcaacaatcccaacaaaacccaaagttgctgaaaccagcacatcaaatgcttcgccgtaacgtaccgtctccggaatcccctcaattacgggtcggatattggcccggtccgggctcaagtactcgggcgaaaaagcttcgatcctcaactcggtcggatactcagcttccaacttgtaaaaatagtgtgggttactcccagcaataaggacccgcccatcgggtaacaaattggcggtggagtggtacattctcggtaccgtgcccggagtcaaggtcatgaaacgtaacccgattggttgatcgggtcggtaaagaagcgggtataaacacgggttcgaacccatttcgaatccttgagttccagcttgagctccattgataatcaaaacctcaccgctcggaagcataaccatatctcccataatccgcccgaacggcatgtcttccatctcccaaaccggatcggggcccattgccatgatccgcccacaactcccgtgggccggtgtgtccgtggctttctcgataaatgcaccgaatttggctcctccacacactacgatcacagccgttgaataatctccttcgagtgcaagcatgacggacgatccagctgaagggtagttcctgggtccaccatccaacggtggatattgccttacgattttgtttgccacgtggtcatacgacaccgctttatcgttagcgaaaatgaagagatacccatttgggagaagatgaacataagggtatagattgtccatttggctatcctcaacctccgccaaaaacgggaaagaaacggcgccgttttctctcggcgggtaatattcgacggtattagcagctctacctccgaccattatgacggagccgtcggggagaatctgattcgtggagtaccacctcccctcgaccaatgcgacgtcgtctaactcgacccaatcgcaagctccgttcgcatcacacggctcgaacttccgtatcttccggagaccgtcaaggtcaccgccggtctgaagaagtgttccgtcaggaaggaactgacctgaggagcaccacgtgtctgtttggatcatcagaggtcggattttgttggtgttaaggtcgagaagtacggagtgagcgtaacaatcccgtttcaaaacgacatcgtttggatcgttacgacaatgaccctttctcagcattttccgggtcggtccaatattagtccgatcgaggaggacaacggtgttgaaccgggtcacggcggtgtgcatggaagctatgccagcattctccactattacctcccacgtgccggggagttgtgcacgtgcgagattgaaaaagtagtgaagaagagaaaggagagccaatattggaaagtagtagctgccatggtttagtaaattaaggacactgaacttcttttcttcgtgttttaactttttatatagtattattagtgtagttgaaaagtgtttgaatcgtatacggtaacctgcatggtaagtcaatgttaacggtcagaaaagtttgttgggaccctccttgggttaggattgcgttagtgggacccagttgagtttgaggttgacgtgaagagaaagtgttagaaaaaattcaagtggtgggaccaagtatcatgtgtgcattttccatgtgtagtgttggcatgaatgcttcctattttgcaaggtttggcattattttaagtaagtgggaccaattgttttagccgacaaatgcattaaatggtaaagtactggagctatcttctcttctaactctttttctgtactattcactgtccacaccatagtaaaatatactgatatatacacagattcatttatgtccacaacatactatccataaatgacatatatagatttattaagaatgaaagttaaaaaaaagaatgtctaaaactataaaaatcaagattatagaagaattcttggagacaaaaaataatctatgtttgggggaaataatctatcaaacatatgtccttagaga

SEQ ID NO: 186062 - DNA, 4094 bp, Cannabis indica
gaaagcatacatcatttgcttctggttcagaacgatcaactttaccttctacgggcaaattcttggaattcttaatccaagtatttgtgtgtagccatggaagattaggccactgagctttgcatttcccgcttttccctgccattagaatgagacttttcaccaaacctgctcgaactgctgagtgataaccaagcgttgataggattgccaccgcttcacacgatttagcaatattctcaatcttttgaagtgcttgtccacctctttgcataggatcaggaggaagaactggcacgggtaacaccttggctcttaagcatccaaagaaggcatcgatgaagtccaaacccgggacatagacaaggagaaccctatcaccaggcttgataactagctttttacttgtcaagaggttttgagcaatacaagaagcattgtcatgcagttctttgtaagtcctttggccaaccactgctccttcttcgtttatccaagtatagagtgtcttgttttgagtgatgttatgagttccccagtgattcaagtagccatcaagtgaaggtagatcgggaaatttcactcccgggacctcatctaaacctttgacactctttttcccacaatgtttttgcaaaggaaatagattctgcaaaaaccaaaagtgttacttatatgaagtgaataattatctcatcaatcactagataaatttttaggactatgggattaccttgacataaggaaaaagtggtgaagattctttatttgcaaagtgcttgcagactaaggccatggcatacgatgagtttctctctgtaagctcaaacgccataagcccacctacgtagtaagtgttcctcgagccttgaagttcagattctaatttgtcatagaacccttccttcatatctacattaaagtataagaaattagcaccacctaacttgttagaaaaaacttgtgatggagacaaattagtaatgtaccttgactaccaacatggggaaaatacttgaatcttcgttgtagaaccatctcttcaacttgtccccccatactttcaactgttctcattgcaagctgagagacttttggtcctttaatgtcgactgaatttccatacgaccaaaataagaatatatcagtgtcagcataaaacctttgcattgcaactggatacccgatttttgtaggatcttccatatattcagcaaagtaataaaaaccaataggcaaatggtctaggcctttgatcttcaaagcagtggtatagtaatcgattgtctgtactttactgaacaactctttctcaagatcaccaaaatcaattgcttcagtttcattttcgttttctgttcagaaaagttcaagttagcatgtagaggaaaatgggtgatattaaagcacaaataaaaggaagtagagcaagaaacctgtagaacttgaatgtggtgatctataaatccttccatttttaaatggaaaagaaccagaaatgatgatcttatcaaagtccataaccttcacttccccattgtagtctttcacatcaactttaacaccttcaaaatcacgtcggattgccaacacttcagtgttgcaatgaacttctattggaagtgattcgctgatcttttgccaaagactagtgtaaccacctttaaaacgccgaatctttccagccatggatgtacgagtgaactcatgaatgtaagcataaggcatgtcttggacaaatccataccccgaagcagtatatccataagccacagacttgggaatggatttgaatccacgatcgttaagatactgaggagttaagtctgaagctaattcactcacagcatgcattcctagtcgacttaaattctttgccttatcctgcaggaaacgaacttcaagttcaatactttttcgaactgtgagaatgagatcaacatttaagtgttgctatttacacaaaagaagaaatttaacctgaagctctaaagtcagtgatatcacagatacataatcatctgcaacttttatatcgtgatactctcctgtggaactgtcaatgagagcaagcttatgggaatccagctcttctagttcagaactagtctctcttgccaagtgaaagattacaggagcactgtttgcggcaagaacttgaccacccaaatcatatatcttccctgcaaatgaagaatgtatgtactaaatatccaagcatataacaatgtttgaatagaagaaaccattatgttctctgtacctcttatttcgacagactcacacattccaccaacagaatggtacttctccaataatgtcacattagtgtagccaagttttgccaatgcataagaagctgatataccacttgggccaccacctactatcccaattcttgtgtttacaggaagacatggatgcaactttgaaaactgatcttctatcggtttttctgggtccatgttatcaaatgttctagcttactcctaacggtagtacatagtgaatattaagatcaaacaattaataatgttaagtccatgatatttatatgtgcacatctagttcaaggctctacataaaaaaagcatctcaccttgaataagtctgttcagttgtttgattccatggtgagaatatgttaatatttgtcgctttactcttgcttcatcaccatgcaaaaaccgagtgagttattcccttttgaaagaattcctgcatttttcagtacacatcaaccaatccaatcacccacaacaacaatcaatttcccacctcattacaatgatttggcattgtttcctaatgctattaacccctttctctacatccttccgagaaaatttataaaggcgcaacaaatcattacatgatcggaaattcaaaggtggaaaaccatacctttcaaaggtatttcagccacagtcaccgagcgccagcaccctacaaaaaagtgtccctgtaatgccattcccacgtacaattttgagagaaaagaaaactcaaaagaaaagaaagtttcagctttatgccaccaattcaacatagcaacacataaagcacacactaatatatatatattatacaagttccattctcactgagacaaaacatcaaacacattgactacatgaatttccaacctcagcccaacttaacaccaaaacatatacttcctctaaacatattccaaaaccaagtaaaaagagaacaaataactaacctctgaaagctgaaattttggggaaatgtggttgtagaacagagtgccaaatggcaaaaaagagaggtaaaaatgagtaataataagaaaaaaagccggtcttgatgatgatgatgatctcagattgaagataatttcccatatttaagataaccaagaagcttcttccttccaaaaagtaaacgacaaaggtcactgtttccttagctcccaatcaacacaacaacactctatcttcgatgactacgagaaatgggtctctcagatattctaatattattcctcctttgcctcgttaagactgatgatgatgacgatgatgattgtgatggtgatcttgttaaactcactattaaagtataaacctttgttaattactactacataatcacgtcattaaagattaaaactttatatatataatttggagaagaatataccttttttgtaatgggaatatgtaatgtttgttttggtggggcgagaagagcgaggaaggaacagatcatcatcaatggcggatatagctgaaaaaaaataactgtctggttttcaatttcgtttttatcgttttaaccgtttattaccgttataagtaactaccgtatttattttattcgtttttatttactttttagaggtttttcaattatattttacacttttaaaacaatttcatagcaatctatatagtaatcaacggagcaagttaaattataactaaaatctatataacaatctacaaagaaattaaccccggagcaatacaaagcatatttttttttaaaaaaaaaaacttaaagttaataatttttttttaaagtaaattaattcctatatattattttttttactttttttttttaaa

SEQ ID NO: 186063 - DNA, 1461 bp, Cannabis indica
tttatcttaacctaaagaggtgatcccatatatcaaatgtaatataattattttaggtgaataagggtgacatgtagtgaataattgagttgttttaggttattatttatcgcgatttttagaaaccgattataataagagaatagaagctaaagaaagatgaaaggaaatgaacaagagatttataacatggttgggatgttaattaattttagtccacgaatcactatattagatacttataacaattatgttttaaactctttggacatgatttgtgctatataaatgctaaaaatttgaacctcttgcatgataagtcttatttataaaacaccatgcattatgggtcaggctgaccccaaattatacttaagtatttataagtgtcatgtttttttatggaaaattatgtttattactggtttgtctgttggctgtttagttgcattttttgtagctttattagttgtgcatctaagactgtggtgcatatgtttaatctacttttatttttcttttgttaggctaggttttagttcgttttatttattgttcagctttttgttagcgtggctaagctagattatttgttggttaagttggttattctaaagtgttgggtataaaaagctaatctagttttttctaactaacttcatctttaatagaatcatcttgagattcttgccttgaaaaaaatccttttctgtgtattctgtgtgtttgtaggttgtaatttattggattttcaaggcttgaaggaatgttgatctgcaatgtttgaaggaaattcagagaattactaaagggagttcagctcgttggaagtaaggagatcttgtcttttctgatctaaggggacttagatttttgttattgattgtaatcaagtatatttgtaacttttgtatgaaaacatttcaattgacgttgttatagtgaaggttattttactcggtttttggaaactcaagaaatactcggtttgaatgagtttctaatgttaggggaagtttgtgatttctatgttcattgatttacatttataatttttatactttagttgaaaacttgaaattgattaattagcttttaaataatcttaaaattcgttataacgcaaattacttttttttttaatcaaagtatttctcaacacatgagaactttatttataacgaaagagaaatattttagttgtttcttgaagagatggtttcttgaatattattctagaaaataatagtctactattccaattcttgaatatgttaatgatgaatgaattgcttaaccttattttctaatttctatttcatcatatagtatatataggctagatcaattttttttttacgtgtaggctaggccattttattattcatataataagaaaataatgtttaataataaagatgatttaaattaatttatgaaatagatttaaaaaaaaaatta

SEQ ID NO: 186064 - DNA, 8811 bp, Cannabis indica
aaaaaaaaagaaagaattgtagggaaaagtgattgaaatttctggaatacaaatcctaatccaaatcaaacaatcactctcgaaagtttctaatgatcaaataatcactctccacgaaacgaattcgctttctctcaaaaatctgtgaaaccctagaattcccaaatcttattatctccattgatttgtctccatcatcgccttcaatggcgagtcattcgtcttccgcagctccttcctccgccgccgccgccgccgctgctgctgctgcggcctcttctcagtacacttatgccaatggctcctcctatttccccttaccctttcacctccagcaacctcagactgtctctcaataccccgcaccttacgcctctgtagcgcctcagcctgctccgccgccggtcgttgctcccgtatatccagcctctgctcccgtcgccggtgtttacaccttgcctcagtaccagcaggtttgcattaaaaccaatatttgtccttacgtatatatttactcccccgttttcaattataacatgaattgagggttttctgttttctatttgctgggttggatttgaagttaacatcactactttattgactcgtattgatcggatatgtgctggaattgtcgtgcttatatatacttgggtttgtgataatggtgtataggcccagcaattatttcagagggatgctcagacaattacgcctgaagctcttgaaagcgtgaaagctgcccttgcgaacagcgaaatcgagcacaaagcagaagctaagaagaaagctgttccccgtaaagctgctgggctgagttgggaggatccaacgcttgctgaatggccagaaagtaattttttttttctttttttgcgtctgtttgcttcttgcactattagtttattagagtttttagattgataatagtgaaagaatttgacttcacttaagctagaattaaagctgctacacgcgaaatattcaatccttagttgatacaatacaaatacttctattttggttcatcgacattgtcataataatgggaccataattcctcttatccccacaaacttacagtaggtctaaggttaactgatccttaagaattcctgggggtagaaagttttgtgctgaccaagtcttttgcactgaatatgccaggattagtggacttggcagcacaagacttgttaaatattttttagtttttctaattcaatagatttgttgaaatgtcatttgttaaaggaaaaccatttggatttttgttgatgtttttgaacaaggtgcaccttactccatagctgtctatttgctattacttttcatgagtttgtcttgatcctttttttttatatctttttatttccactgggtttttgcagatgattatcgcttgttctgtggtgatcttggaaacgaggtgaatgatgatgttctttcgaaagcattttctcgatttccttcctttaacatggctaaagtaagtatatattttaaaatattttatccatgctgttcttttattgacaatttttttcttggtatgaactttgtgcatttcctcttcagatttttatttgaagcccatagagcaatcaatgctttgtattttttaggtaggtattgtctacaattcacaaaattatatatgaatatcttgaactatggaaactttggaacacaaatgttttgtggtatgcatttttaatgtactgaattttgtgattttggtcagtagatttgaagtttaaattttaatttagtagcattatctgtttatatttgaattctgttagttaattataaaagaaaaaagaaaaagataagaataaaaagtaatagaaaaagaagaagcaaaaagtattaagaaagttttggttcaatgttctaaaaacttaagatattgattgaatgacaaatattttgggtatgcagttgatggattgtgtaaattcattaggtagcacatatgctaataattgaatggtgagtttcagatcaaactaagcaatagattacttatgagtaaaactttgttgggaatactttaaactatgaccaaaaggatgtgggatttttgtgaccaaattttacgttaaacttcttttgaagttattgttattatcattaccatgatcgtgacattcaatactgtacactctagtctaatggttgtatctcacatgcatttggtttcctacttttgttatgagcaaggtgctacaattctgtgttaattttggcatgcagcactaaattttgtattagattcatcattcaactttagaagtaatattatgttgtacactgtttttaggttgttagagacaaaagaactggaaaaaccaagggctatggatttgttagctttgctaaccctactgaccttgccgctgcgctgaaggaaatgaatggtgagaaatttttttttttcgtagtagaaaaagaaaagaaaataaataatgaaaggttaataactaacatgtatttattaatatatcaaagaaaggataagaagataagaaggatttacacaatgtaatcccatatatgaaatttcttgttgttttagccatctgttcttgttttttcattctcagcactcaaatgaggttttttattttaaagaaaggataaaaaggatttacacaatgtaaccccatatatatgaaaattcttgttcttttagccatctgttcttgttttatcattctgagcactcaaatgaggttttttattgttacttttttagtaacattctgttaaaatatagttatgcgttgcctgcctctaaccacatgaaattggatcgatcacgcaaacttacatgtataatatgaaaactatagtgatcatgattttgttttgagctttgtacatcagataggcgtagtttacaaaatgagtgtttctttccaggtaaatatgtgggcaatagaccaatcaaactccgcaagagcaactggaaggagagaacagactacgatgccttagagagacataaggtaatacatttttatgtgtatacatacatttgaggtctcttttgttgtgttcaaattgttcttatttgacccccagttggtttgttaaataatccattcactgatctcattattttttatttctttgatttatggcagcaccatacccaaaagaggccaaagctttccaagaagagcatattacacaagtgatgaatttaccaattaccaagttgtaaacttcaacaaccttattcaaactataatttttattttcattttcattgtattgaagtggttgtagtaatgttctgtgaaactggttatattgacaatttcaatgagcagaaataatgcaatacagtaagaaattccttgtcaattttgaattaaaaaaagccatgcataactactgcacaaaacagaggaatttacttaagagtgaaacaatgaacattttcttcgttgaataattgcaatctaatacaaatgcaatcaaatgaagtattcacaatcataaatttgagcaaagcaaatggcctacgacagctctatccttttccccacaaaatttttttgtacattcccttacaaaaactaacgaacaaaaacaattagggtaaaaaatccctctaatttttctcaagattttgcacgacgactgaacatgttgctaagtacattattttgtttgtaaaaatcctcgaacttctatcaggaaactgttaagatttttcctgaaaatgtgaaagttcttacgatcaagggttgacgatagctgatttgcacttgttaaagaatgcagtgcattagccagtcttgatttaaatgtgggatttggctgcctctctattaactcgtggccgagtctctgaaagccaagtaccaaactcagaaaaccatacatttcaataaggaaaatatgaggataactcaaaaataggaataagtaaatcaagtacctggtaaagggtttgttcgcatagtaacagcggaagaagagcatcagctgcgctgctgatcaggtctgggctgaagtcacaaacaaagcttttgttgttaatagcgaaacaagcagaattggtgcatctgaattttgtacaggaagtttacctgtaatcctcgaaaaggagtaactgcagtaacgaacggaggaattgacctaaaatgccttcggcagcattagagccaagaccgagtctaccaccatttgtatccgcatagtgataagaagcaatagctcttaaagatctcagacacatatcaatcacttctgtatcctaacaaataataaagaaaccgtttctattattttcttgaccaaagcaagaaccttagacacataagaattctcataaaaatggttaagtcaataacaatggatgcaatatgatgtacctgatggtgaagaccaaattcaattgttccaattacatgagaaaaggcctccttgtttagctttgcaactgtctctggataaacctccagcatatgtgatagaagtgaaaagtactgcacaagaacacagtcagaaaaatattagcagattgtcaccatggaattaaaatcgtcgtcattgttgtaacaaaatactatccaatcttacatcataacacagcttgggatatttcagcaggtccaaagttatcaaaggcgtaacaatgtgaagaccatagtatacaacctgccaaacaccaatgcatcagtgacaaaccccaactattctatatattaatatcgtcttaggaatgacatccgaattacctgagatatatttgtgcctggtgaatcagcagaatcagatgaaaagtcaacctacaatggaatgtttagcatgaacggtagagtttggaaagtagggtgaacaacaatcttttatgtgcaaacaacaaataagccataccagatctttcgagcaaagattagaaaggagttgaagaagagcacgtaaatccttgtacttgtcagtttttgcttcacttagcaaactgcttgaaagacttatcgatatctggaataacaaagagctaaatgagtgatagaatttgattaagttaatagttcagaattgagactatctaggatgggatccctgaccagttttttatttcctttccttttcttttaattttatattatttcaatggatgtttgcttcaaattaatattcagaagaaaacagaggaaaagtaccttgccaatattgtgcgacgagtaaaggtgaatcaaattcgtgcaaaagttaactacagcagcagtttcttgagcctctagatagcttatttgtccatcaacccaatcaacaacaaacttgagtagcagataaacaactgcagactaatcagaaattaaaagataagcgcaaataagcggatccccatggtgtcacttgtattttcaagagtaaagaaaactggttttttgtcccaattatgattatcagatggctctgaaaatacgtagttatatgtttaacaacagtcctgctgaaacctccaatcttttaggagacgagaaattcaaacatattacgaagtaggtccaattacgattagagcaggaaaccaacaaaccataagcctaagtaatcaaagatatacaaagatcaaagaaaaataactgaagaattcaatgcaatttccacgaataaagaaagttacacaagagaatcagttttcatggtgcaattagtacctcatgtttgtaaacgtcaagcaatactaagataggattcattacagagaatcccaactcatagattgctttctgtgttcgaggctctgaggcattagctgctccacgaagccgctccaataagcagctgacctaaaggatgctgaatattatgttattcttgaataggaattagctaatgaatctatctcaagtcttttatcctcaccgaatggattatatctggttgttgagcaacacttttgaagtcattctttgttgaaagttccacaaaatatgttgtcatatgacccatgagattccttacatacctttgaagaaatagtagacatacattaacatttacaattaaattacatctacactttgacaagatcaaattttatagtttagaaaaaggaaaacttactggtttgataactccagattactcaggccagatgctgaccgaacaagggtttgagcaagcgatcgctgaaaggaaggagaaaatttttctgtaaacaaagagaacaatagagaaagtacaaggcatggcatattatgttcaacctggtgcactgtgtttaacagtagcagcgtcttatcattagcaaaagcacttgctaggtcacgccaggaatcctgcaagtgtgattaatgtaaattattaacaaagatctgcacagtgtacacccttgcttacatgaaaataaaacaaataagcactgttgcacgaaaagctcaagttcttaagaagtgtcaagcttttaaggttagaaggttatattagggaccctctttaatcatattcttttataccttgtctatagttacaaatatttttgtatggaaagtgattagaatcaaagggtcaaaaatgatttccctacagcaagtgattctttttttttggggggacagacagaccctataagtttatatgtatgtctgatcatagatataaatcatgttattacagtgtaaaacatcagaagatccataacaaaataaaatggaaagaggatcctagccagattcaagatcatctaaatctttaaatcaaattgacgagaaagatcttataaggagtaaccatgcctttgaaaagtttatagacaaaagaaaaaaagctgttataaaatttcttcatgaaaattctcttctatgagttatgttttaagattctagttatttccaattttatttttaatagacactaaaacgttggacgaaaggtcaatccaaattttttactcatagaactctaatatatttcaagcattttgacactctgaaagattgagtgactcaccaattgaacaagatgcgcacaaatatgtttccgctgaacaagtgaatgaagtagctggtaacaagtgagcgcctgaaaaataaggacaaaagcatgacacccgcaatacacataatcatattgcttaaaagtaatttcatgtctctatatgcatacatgcaataggacatgcataaaagtctagctgaaacagcaccaaaacatacctgtagatctttctctccaggatatgtaactagtgctgttagggatattcgaataataatgtcaagcacaagttttccttgattatgtagtccaaaaaaggtcattaaaactttcttggagtttgtatctgtattttcttcaggtggcattatatatgtgcaagaccatcttccaaggaaccatataacagcctgcacaaatcatacgttcaccacatctaaactcatagcatcatttaacaagtaaatttatacagataaaaaacttcactatgaatatttaaaaaataacgtaatatcatgtcaacacaaccaacagaaacctaaaattcatgtgacctggacattctacattcaaggttggagagtaaattatttggccaaagattcatggtatcacaatttttcaattttattagtagctaaggacccatggtcatagcaacacaacagaattggacaaggccaagaagagtctacaagacttggaaggcaccaagacagaggctgaatttactatgactatgggtcatagtaaattttattagtagctgtaggtttcagctagatcaaattctgccaaagttaccatgtatggactttacccgacataacaacacaacaggtaagatgcaaataaaatggtactacctccatgagtcgaggactgaacactgaggctcttatttctgggtttaaactctgctcggcaaatcctacgattgagctggattaaataaagtgatcatcagtagagaaacacatactaaaccttcatattccctctgctttcaaaggtgaaaaaagaaatttgatatgacattgaaacatggatatggaatatcgacgtaatttgtaaaattaggccaacaagccgaattcatagaaatagtaatgcaggtaatttccaaaatagaagacgtggagatgcatcagtaactgccttggaattacaagagctcaaggatttgaatgatcttaaccttgatcattgtggctgtgcaacctaagggggccttggcccctcctttatttattttttattttctaatattattatatgtaatttagatagctatacttgatattttgaaaaaattatattttggcccgccttaatttattttcttagcattttcccacccctaattgatggagctacctccatccctggccaggatctattactctataatcttagcttgacaagaaaataaggcccgctgattgacagatagaaacaacatttcacctgctaagtataatgacaggatgctgctctgcctcgacaatatcagaaaaatgggtttgtatggcatttggaatctgtatatacgaagcaaaacatcagacaaaaccatgagcaatgacacaccaccttcgataatgtaagaaaagaaaagaaaaaaaaaaaaagaaactcaataatgaaaagatataatactgtgaataaaataagacaaggcattaagaaacacagtgtcttcacatgtaaccaaaaagtagaataacaggattgagatgataagcgaataaaattaataacggaaggcaagttaccaatggtgtttcctccctccccttcatcagagattacatggccggtgattaataacaatgagta

SEQ ID NO: 186065 - DNA, 5588 bp, Cannabis indica
agtaaaaataaaaaataaacatccatgataaaagtgtagaagaaatccaattttaaatgaagtgtgtgtaaattaataaataatctttgaataccaagaacaagaacataggaaaggaagtgatatatatttggttaaacaattaataagggccactcaatgataaggggtacatgtcccattattgcgagtactatactactgtactgttttgtttttcgaccagagaagtcataaattttttatgtcctaataaaccataaaatccaaaattaaattaggcagggaaaattaaatttcagttaattatattataacattcatatttccatgacaccatttaagaaaaaaacaaaataaaattaacaacttctatgatataaaataactatgatggagatgaggtttgtaatgttaaaagtggctacgtattagtgtggtcgttctaagtagaggagggaggtgtcgattcatctaagctaattcattggtggaatggagtttgaggtcttgctatgccactaaaagtgaaagtttttgtttggcatatgttccatcgacattaccagtagcaccacaacttatttctcaaaaagttcaagtacctctttattgttcatgatacggaaatgaacatgaaactcctaagcatgttcttttttcctgttttgggttgactccagtgtggcagcagatggggatctggtcggtgattcgtcgaggtgaacatggatcaatgcatgatattctcttttttctttttgaggagctatttcgtgaagcttttacatcactgatgacaacactttactggattttgtatgatcgaaactcagtgttaataatttggttgcaagaaatatctagattagatgttattgtcataattgtcgaataatcacctagtggagtttaaggaatactgtaggcagggccttaatttggggttaggccttgtaaattcaactgtaaactgacctaatcgatggactccaccgccgcctgagtcctttgctctaacgattgatgcttcggtggtaccaaggaggggttttgtcagttgtgggggggggggggagggggggggagtgatacgagatgctacgggagtggtttggatagcgtaatcatctggtgtgttgggtgatttctatgttaatgtggcagagttgcttgccattcggttgggtctctcttatgcatcaacatagttttcgtatctccactattaatagtgattctacagcagcaatttgttggattaataagcttcacatgaattttagtgttcaatctattttattagatgtttattctttattagttactgttagtggtggttcttgtagcgatccgcgttcgacgaatggtgttgtccacacactaaccatctcttttactagtttaggagattatatttggtttataaatattattgggtcaattcgttaaaaaaaaaacactttgtttaacaacattaaatccacctaaaaaaaaatcaaataaggagtgtgacataagaacaaatatcccaccataaattatttttactaattaaattttttcaccaaaaaaaaatctcatagaaggaacaagaacacaagacaagatatttgaatagaattccaagaccaatacccatatttatattatgatgattatagcactttccttgcactagacgaaaagctcaactactgaaaatttaacataataccataattttgacctttgttcaaaattccacaatccgtgtggtcaacaatattgtattactaaaacatattaatattaattaataataatatataatacgaaaatcataagatcaaaatggtccataattattcaaatcattaaaaaaaaattaaagtaagtagtcaataattccaaagaggtttgctttagaaaaataaactaataataaatttgtaaaaatgtgtttttatttttaagagaaaaatatataaataaattaatctcatctatttcatgttgggtccattttcacctattggcctatgaccagtcctattccagatgtgaactgtgaccacacgtgtaatactccaaacactagctttgacacgtgtgaccaaaaaacaaccaacccaccaatccctatggcattatcgtaaataaatcaaaaaacaagcacaattaaactaacattcattcacactaaaactgctctcgctccacttacacagcttaaaacgacggcgtttcttccatccaccaaggtttaccaatcgacgaagtccaaaactaacctgagttaaattttaacccgaggttaaaaataaccagggttaacgtgtctcccccaatcaaaccccacacactgtcttatattaaacctgagccaaagagaaaccacagagagaaaattgaacggaaaagtgaagagaaaatctcagagaaaatcgttttcccgagaaaatggcgttttacaccgatgaagatgaggtatggaaatgttcgaaacatccttccaagcgtcgaagaagcggagtctgtcctgtttgtctccgggaacgacttgggagtctttgtcctgattgcgcaaacgttaagccttgtggttgttgcgcaacgacgtcgtcttcttcatcttcttccgtcgacggtggttcaggtcttggttccgttggccgattgtcgagtctcatcgagagcgagccagctttccgtcgatcgaggtctgtagccattccttttcttcgttccagatcaagattcgtcggtggagattctatttccgatctcggcggcgatcggtctgaattaccgccttccggtgccggttcgcgcgggaaagcgtcgtcgttttggtccgtttttaggtcgtctaagaagagtcggagagaaggacacgatgttgattcggttaagaaaatcgaattggatgaagataacgccgcgttgaggaagacgatgatgatgaggtcgaggtcagtggcggttccggtgaggtcggtcgattcaggtacgggtgaggtaaaatcttcaaagaatcggagttggtattttccgagtccgattaaggttttccggcaatcgaaattatctaaaattgttcaagctaattcgcctttgtacagaggttaatataatagtattaattaattatcaatatttttgtagagaagaaattatataatctctaataattaacaaaaaaaaaaagaaaacctgataattattattattattttttctactaattaaagaaaaatattcttgtacaattcaagtttgagtaatatttatgtgaaaaacagagatttattacaatttcaaagtgttgttatataattcatatctattttgtgtaataatttggaatggaacagtgaatttttcacaaactgtcaaaaatcgatctggtggtgatctgtttggatgatgagaaaatgttcttttttttttctcggaaattattacgtggatgattaggatcagaatcttttggtgttcattattcttcatttcggtcaaattaaagccaatttagtccaattgggcacgtgggtccttttgaaaaacaggttctctatatatatatatatataaatatgaatgcttgtatttgtagtatattatgtatatgtatatatatctatgtatgtaatgtgtacgaactaccaactccaaagtgatgagttaagaaccaaaggaatattagtgttgtaattgtacttactctttttcgagcatatattattataattgtactttacttattaatatttatatatatatatatatgtgtggtatgttagctacccacatttttaattagttaagtttacttatgtcattaaatcattataccaccaatattttacattagttaacaagtctacaaattgcgtgttcattgaaataatgtacaaatataaatacatatacaatgaattttgtctttttattaaaatatattaatttttaaccgttagatcaattcaatcttacaaattttacatatttgtagttgtaataacaaaagtacttttgttttataaatccatttatggtcaaatgacaagtatttttcaagaatttttttggcaaactataatatcgttttgtctatttaatgtatttttcagaagaaattaaaaagaaaatgagaattgagaagtcctcatcataatcacaaacaagtagtgatcgaaaaagtaatgaacaaatacattgtaatgaaatatacacataattattattttttatttatttatttatttccataaggccaattgatgatattatgttattacaatcgtttcagttggtccaccatagatttacaaatttattaatttggaattgtctgataacaactgttttattctatgtccttaaacggcaaaataagttttgaggtccataattataagccctaattattctaattttaaaaaatatatttttatatatacgttttcagaaattatatttatatataatgagttaattggaatattgactttaagaatgttccaggagttttttaatcagtgattagcatttaaagcaaaaaataataagtaattatcggcatatatatatatatattgtgttttaaggttttctttttttcttctcaaatattaaatttattttaatgacatgcattcaccaaacgttttttttaaaaaaaatgggcaattggacaattataaataattattatattatcacatttaatatttttttcaatcttaattatgaagaccggattatttgatctataaatttaaatcaaaacaagaactatatgcttatatccattattgagagatatatacatatatattatatataaaataataattatatgacttgtttaattaggtgatgattataagaatattagatgtcaattaattatttggaaataagataaaactagttgtattgtctaatctcacttttaagcacgtgaaaacacaccaaacatatggtttaaagaatctgcaatgtagattcgatatatttaactacgaattttcttatatgattttatggaacattagcacatggatatatatataaatatatatatatataaatattacacagtatttgattaattaattaattaacaacatatatatctttttttttctttacttatcattcactttgacagataataaattgtaatcaaagttatttaatcttgattaaagacaccacgctccaacaacattttattattattattatattttataacaaaaaaataataataatgaaaaaactacttatgtatttagatatgtttttaattaatataataaggtagctgtttaaactttgaatatatgttatgaagcaaacaaagcattaagcatggtaataagaatatttttggatattatttaattatttattattaattaattcatgactttacaaagtaattaaatggcggccagtgatgtaactaaatgttagtcaaaataaatttatatttataagccaaaccgttaaaaatataaatataatatgatcaccttccgaaaaaagaagaaagtaatctataattaatatctcattattaatttaaataataataa

SEQ ID NO: 186066 - DNA, 3491 bp, Cannabis indica
aaaaaaaatcaacaaaaaattaaagatcaaccaactaaacaccaacctacaccatcaaaacgaataataacaacaaagaaccaagatgctctaaaaatcttgtacagtggcaattttgatgagaaacaaagagaaaattgatggcgaggagagaaagagaaaagtaaaagggatcatggatgtgaagatgaaaatttgttatgtgagaagtattttggttacctaatcaaagatgatacaatttgagaggataaccaattttaggttatttttaatttttgctccatttaaagcataaaaaatcaaattcccaaaagaattgataagaaaatattcatcttgcatttagaacggtatttccttttatttcaaaataaaataattattctgccaatataaataaatcattctattagaataacatgctaaattgccaatattttaaaatacaattaaataaagaaatgaaataaaattattgtttcttttccttttcatttcattttattacttctaactaaatgcaacctaagtgtatctgatactagaaagaatcggattgaggaaaattcaagtaaattatacattcgaaacaagagtttaataaaggaaatcttaacagttgagcagaggaaagtagttgccatttatttttgttcagatacagttttgatgatcattccttcacactgctagtgtcgagtctagaaactagaacttagactgcgttgaagataaacataaacaggatttactgtactacttccgaaattacaggagttaaacagactccaaggtatttacagagaattgagtttttaattattaagtgcctttcattatgtactactaactaacatcaatgtacaatgaaaagctagaaactacgcctacagcttaatcacaatacgaggattatcacactagatttatgatatgcagttggcttgagtgagattaaggccaacttcctattaccaaatgaagcaacttcagtgaaagagatgctttacgctgcctcatccattgacagaagcgtggtgctagagctcgttttctcaatctgagactccttggtctcaatgtcatccaagttgtcattggggctgttcaagcccaatcccaaatccaaaatgctcaggtctgaatcctgcactccattcatctctgttacctgtgtacaatacataaaacgaatacattaccacacattcataaatttaataagaaaatccctgataagaaagggaaaaatagacattaacactaacgtttagcaccaaccacatcttgcctgctatgaagaaaacaatgagtacagcaatgtgaagtgatgttgcagtgtacgacttaaaagaaagtatgacataaacagccatagccataaaagttgttgagtacaacataacaagaatacctacacagattaaagggagtgattttatgctactttacttctacttactgattcaattgtatacttaaggccgtgtttgaaaagacagtaattatgtaattagaagtaattgagatctcgaagtggaagatccgaaatttttcccccatgagaattgggtgtacactgtgtaaatacaaaatcatactatttttaggcaattaatgttatttttctatataaattacttaactgccaaacaaaaataagaattcatatctaattactacttgacatccaaacacatattttaattactatgtgtaataactagggaagagatattttaattttgaaaaaaaaagtctaagggaagaaacttcaaacttgatagagatatgcatgagagctccaaaacaagagattaattaagagttttaagttcagagttatcacattgttttcttccttcaaaacatcatcaatgtttggcttttcatgcttctcgtcactcatggttgttggcccagttgtcaattggtccaccatctcatttgttttctcttcatcttccacctttttctcagcaatcctcttctgttcctccagcacagcaatctgcaacaaagaatttgattaattattttttctttagaagtcaaaataagatatcaaatttcatttgctctacaaataaaggtgacccaaaatccatctatctctttcctaagaaaacaccgtttattccataatttcataaatcaggttctctgttgagcgaagaatctagcaatagggcactctaagtctctaatgatctcttcagtataaacaaacaacaaaattatttccgaaatacctatttcgaggaaagtcaaaatatgaattatgaaattatagcaaacaaatacagcagtaacattaccgaatcacccaacttttaatttatatgcgaataatccaacaccaagaagaaacgcacttaattgtaactaatagtctcacacattattcatgcttaaaatggaagggaaaaaactcatatcttggattattgaacttttatttaattttattttgtaaagataagtattggaacttggaagtcaactttccctatgcacacccaattgtcctaaactgaaaattaaggtctcagtcgaacatgcaaagcataagattttacagcaacagagtaccgtaacttattctttataaagaaaagaaaacaaatccatatttcatattcatatgcataatctaaccaaacacagacacgccaacaaacccatatatgtaacagcagaaccaataatacccataaaccctaaagcataatcaagtgattttcacttacaggagtataccggaacttcctcctcggtggctcttccaactgcgttccgccggagccgtcggaagcggcggctgaagtagcggtggcgggagtccatcggcagaggaggaggcggggggttggggtgccgttggattgtgattgagggttgtggttgtaggcgttgagggttgaagaagaagaggaggaggaaacatggacccatttcttcttccacttcctaactgggccgttgaagacggtggctgctgggccgtaacgggaggatgctcggcccaatcgtgacccaactccctccattagaataccctccgataattttctcttctactcttcctttccggtcgttaatggagatgagtgacttttggttatagtagtacgaggttaagtaggttgagacctcagacaaaaaaaaaagcagatagtttctgctgctactactacgtaaaacgacgccgttatttatttatttatttatttatttttttatgtaaagtaaccaataaagaaagagcaataagaaaaggttacaattacaaatactgatttggaaaagaaccattccaaacgatttctctatctaagtctaatgatttcctagcataattatattcacgaacaatattgttccttgaaatgtgataaacagaaatattaggaaataaagataaagagttttgaaccaattgtacaagatccgagagggatgatctatctctccatttgtggggcggg

SEQ ID NO: 186067 - DNA, 1116 bp, Cannabis indica
aaaaatcaatataatgaggtgtatgataagatttatatatgaggctctaccttaaaatgactcactgcattttaccaatatcaatcgactatacatgtgaaaatatggtatggttggaaaagtaaaacgaaatataagataagtttcatctcaataaattagtaactaaaaataagtaaagtataactcatataaattttatatattgtattaagttctaattatacattatgtattttgtgaaattctctagtatgtactgttatagttgagaatacattttgtaaaaaaaataagaaaagaatattaattatcatcatttaatatccctactcttacttaaatttaacttaagagctatagctagagcttaaatttaatttctacccaattcatatataattatattaagactattatattgagaggttaattaattatttaggagtggtattttatagataattactaatgatattaattttatatatattattatgtatataatgcagaagctactataggtgcacgcatcaaggttgtaacgtgaagaaacaagtgcagaggttaacgaaagacgaagggattgtggtgactacttacgaaggcatgcattcccataccattgacaagtcaactgataactttgagcatatcttgagtcagatgcaaatctacactacttccttttagttatatacatatattattcacaattagtttaattaaacatacacatatatatactactagataaattaatgctacctagtatgtaaattattataattattacttcttttaatttactttctttctaatacacaaaccaaataaaataatatatggctgctaactgggtttagtgctatatatatattgaattcttttgttatgtatgtacgtacaatcacaaaataattatgaacagcacgtacgtacctattaattgtatttttgtaccaattattttgttcttaattttactcctatattttgttacaaattattaattattaatttcagtttgttatgcatgatttttcctacgtaattaaaatctgtgtaccattaatatatattcttgagaaatgttaagagtatctctatgggagc

SEQ ID NO: 186068 - DNA, 3191 bp, Cannabis indica
aaaagaaaaagaaaaatggggattaaatttaaatctccaatctcatcaccgtcgacccatctcctcatttttcttttagccgccgccgccgtcgcagccgtagccgccgccgctgcccccaatggcggcgttctacggtttaaagaagctcccaaattctacaactctccgaattgtccaaaaaatgtcacgtgctcctcctacaacgatgtcacgtgctcggacaattcagtacacgtggcgatgaccctcgacgcagcttatctccggggatcaatggctgcgattctctccgtactccaacactcttcttgtccggaaaacattcaattccacttcgtcacttcttcctccgccgattcagattctctccgctcagccctctcaggttctttcccttacttgaaattccaaatctaccctttcagcgatgactccgtagtcgccggactaatctccacctccattcgctccgccctcgattgcccactaaactacgctcgaaactacctcgccgaactccttcccaccaccgtacggcgcgtggtttacctcgattccgatctcgtcctagtcgacgacatcgccaagctcgccgccacacctctcggagacgacaccgttttggcggcgccggagtactgcaacgcgaacttcacctcttacttcacgccttcgttttggtcaaacccttctctctcgatgaccttcgccggccgggaagcgtgttactttaacaccggagtaatggttatggacttggagaggtggcgcgtgggcgggtacacggctaagattattgagtggatggagctccagaagagaatgcggatctacgagctgggttctcttccgccgtttcttttagtgttcgccgggaatattgctccggtggatcacaggtggaaccaacatgggctcggtggtgataattttcgtgggctttgtcgtgatcttcatccgggcccagtaagcctgcttcattggagtggcaaaggaaagccttgggcccgactcgatgccaacaggccctgtccattggatgctctatgggctccttatgatcttttacaaacaccttttgtctcgagtcttagatttttgacggtattttattttttatattttttgaaaattttgagttttggtgggatggagtatatatatattacaatatatacatacactttgtgctcaaacttaattttacagcgtcctttagtgagatggaaaaaaaaataccaaaaaagaaaaaaaaaagtgtacattatatagccattaatagactttatcattacaataatatatatgatccttttcaattttacttcttttcttcttcttcttatcactatttaaattttttaacatagagatattatgatttgattggtttggtttgttgtaagtttaaatatattctaatattgtttgattttgctattgtaagacaagggtatattgtcctatagacaaaagcgttagtttgatttgatgatattaaaattgtctgttattatcactttgaaaatatttttaactactttaattataattttgaatgcatgagaaccatcactattcacttcattacatagtactttcctattgatttttgagagactaatttgttttgacagtattcttattggatgagagcttttgaggtatttaaagaagaataaggtatgagttttccatagctgagtatggagagccaagggatggagattctttttttttttttttaatcatgaaagtaattagtattatttatagttctatatatacagatcatctatacacattatggttaagggtttttctatttaataagaacctcttaaacttgattaaataacactagcacatcataaaataatatatctattggtaagatgttatcttcatgataatattgtacatcattaataattaataacaatgttaattataaataattacaaatcccactacgaaaaagattatttttagtgataattttttagttacaatataattttttttaactaaatgagacttttagtcacaacaaatattatttgtaactaacaaaaatagtatttaaatataaattatcactaatttagttttagtcattgtaattaaaaatatatttagtcgcaataaattataatttttatgactaatacatttattatgaatttttcagtcctaacataaaataatgatttataattagtcacaaattttttacttttaattataagttttattatgagtataagtaagattttttgtgtgtacttttaataatattaatattattaatttaagatatttttctaatgacaaaaaggcaaggccagagtagctagctttaattttgctttggcttcttttttactttaattatacctttgtttttgaatgaattagtgtatgtgtaatgtaatgtctcaccaaagctagacactgctttgagaggttttgaccttttttttttcttttatttaaaaaaatatatataaaattggtttaatttaattacctacaacacggttatacgtacctaattattaaaaaatggtcactactttgcacaattattatttaatataacaccttccaattgtgtgtagaatggtgtactatagtaccatatataattcaatttcaaaagattattttgggtactattcaatattcattcatctttttctctcttttctgtaatttaacactttgaattaaacctttttagttttcaacatacatatagccagaataacagagaagaaactaaaaacacatcaaattaattaaaaggtttttttttctagaaaatcttaattattaactctaatcgtgatgacatcaaccaatataaattttcaaattagctagggccaccattaaaattcacgacacgttttatctagctagctctttatgtttattaataattaattagtttcaaactttttaataagaaaatttaaagattttctggtgaaagaaaatatttttgagtgacgatatattttaatataagttgaaaaactaaagtagtgctttgtcggtgacactgacacctcttccatgatcaatggatacgtagttctcaatatagaaaattaagcctaataattaattaattaattaattagtagttaattaacgggcttaattaattttaattaagatgt

SEQ ID NO: 186069 - DNA, 2584 bp, Cannabis indica
tttctccttcctgacactaactcaaaaagcatcattccgtagctgaaaacatcggctttggatgttatagccactcctgcaatccattccggtgcaagatagcctcttgttcctctcatggttgtgaggaccctgctgaagtcccttccaatgagttttgctaatccaaagtcagctattttgggacataattctgcatccaaaagaatgttttctggcttgatgtcacagtgtatgatgcattccctgcatttctcgtgcagataaactaaccctctagctatacccagtgcaatttggtaccttgttttccagctcaacacatttgaattacttccactgaggactgaatctagagagccattggacatgtaatcatacaccaataatcttttagtaccctcagagcagaacccacgtaatctaactagatttacatgttgaattgttccgattgtgctgacttctgttcggaattgcttctctccttggctgacactctcaagcttcttcactgctactacagttgagtcggccaatacccccttgaaaactgaccaaagcctcctccccccaatttatccgagaagttcttggttgcattttgcatgtctctgtagccaaacgccaccaacgaaccctccacttgttttccttttccaactgttctatttcttcgccttaaaattaagaacaccataagaccaacaacaaccagtagtcctacaactgagcccaccacagcaccaacaatcgttccttttttcttcttcggattaggaagctcagaagctgcaagcctaacgtaaagattgccactgttgtcacctgctgctgttagttggttcagatttaagagatctcctgtccaaattgaacattcattgttttcataggcataagctgtgcaagagcagttgtctaggcagcttgattcacattcatcagaactccccacctgcaaagactgtttattttcaggtaataacatgttgagcatctcttgaaatctgtctttctccccattaggaaggctgttgttaccacattcaagattggttactcttgtgcatccaccagaatactcccccaagtcccattcactctgaaacgcaggcttaaatcccttcaaacatttacaaaatggcaaggaattctcattgcagcttccatatcgcccacacaaagcataaacttcacattgttgtctcggttgagaccaaaacaaattccatccattattaggcagataattttgttgcttaatctgcccagaaacatccatcacaaaccgagatatgaatgcagaagtgggcttaactgaatatgtaaaatagctttcattttcattcgatacaaaattaaaatcatagatataatctttcctcatctcagggactaagctaaaaatgcgtccgttccaagatccgctggtccaataactcctagacctattccaaagtatggtataagagttgtcttttggtctagctgaagagtaaagaggccaggagaagggtcatcggcattcttccatgaggtgagaacttggtgggttttggtttttttgttgtacgcaattttactaccaggaagccatgtatgagcaggattatcaaaactttgccataaaggatttgaagaattggaaccatcagttaacactagatttccattatccccaagtactacttttacagttgaggagctactggagctcacatttgtggaccaaactgaaagtttagactcattcaaaataactaaattaccatttgagatcttcagctctgaagaaaatttatctgaaactggctgctctctatttgccacccaaactatggtctgctcggtctttattttctcgtaccacatgcctatatagtatttagaagaattacctggagtaaagaatcccagtctaaagactccacctggagagacaatggtttggtcaccagagagggattggtttccagagatggtatcagctccaaaagagagattgatcttcaaaaacagccagattaggagaacaagcaggatccttctgttggtcttgatatccatggctgcaagcaatattgtagttgcagagaagctacaattttaatttaaatgaaacatcacagagatgatatgatcaccagaacaaagaggaagaagaaatctctctacttgacaactcgatatccatagtcattctccaataaattcaagaagctgtagttcgttttccatgattttgatgaacctttatgttctgacgacaacgcccttggctgtgaactataatagttctgtacgtattgtgcatcataaattttgtgtcaatttattctggttgggggcatttcggtaatcttaagtttggattagtacctccaccagtttagagaagaacaatcaacattaacgaaaagtcaaatgtgaagctttcaaaatcccacaaccgcatttggtaatctgattttttttttcccttttctgcactcatatcattctcactatgtgaaattcccttagtgctacggctgcccccgaatatgacgaggtcaaacttcctctaatcattttccacttt

SEQ ID NO: 186070 - DNA, 3494 bp, Cannabis indica
taagctcctcttctaccatcttgtgtatacattagaggattttagtgtcatagcaacaatagaaaatgtcaatatgggaagtatgtgtatttcttatattgtgatgctctaaataaaatatacaaatcttatttagtgattatgagtaataatgattagtatataatatgtgtgtttgaataattcataatctttaaaaaaaaaaaattaacaaaatacaccaatacatattttttcaaaaatttatcaaatttattaaactgaaagtacatacaacaactcagtaagaatatccctcccattaaaaaagtacaatttatattttaaaatagaatgtaattaattactatattataatagtataagtgtactatctaataattacacatgtaacttctaaatatgtttcaaaaattattgtcaattacaatagtactcactcgcactatattgttacttccaaattaaaataacttcaattgcttgtaattaatgattccaatatgtcctcttaaaaacccaaaaactaataatgttcccaacaatggagcgtggtgaaattgtgtttaatatataatcatatcaagttgtgatgatgtgagaaatcattaattattatttgtttgatcattagtgagccaagtctctaaaccctgtaaatcaagcaagaactaattatttgtcttttctttaatcttaaaaagataaggaaatacattattgtagaataaatcaattattctaatgctaattattaataagcaattataagataatcttatatttagcataagttaagattattaaggtcttaataatatgaggtagattctaagtatagtatagagttgggcactatctctttttgctgtgtagctttagaatgagattctaagaagtgtagtcttgaagctcaacatttaaaatttgaatattgtttttaaatatatatacatcattcttttctaaaagaaaattaatttgtatcttttaattacttcgtctactatatattaatttgaccaattctactaaattgagtatatatgataatacctaatataaatgagaattgaacttaagatcttattataaatattaattaatgacttattccaccagaagatttattttagagcattgatattgtatatcagtggtacttaactctagacatgtcgccttaattagaatgactagtgatactctttaaaagttattacattaaattttatgggatccgatacttaattagaccaataacaataatgacataagaaggtgttaggcaccactaatattttttagcatttctctttattttaccctttgttagagcccaagtactagtcttttggtatagctctatataagtgaatatagcgtgattgctacgctttgtgcatattaaatacccctttaaaatgagaaatgctaaaatacactaccaaccgactttagtattcttttaaatatatcaatattattactgattttattaaatatcgaatttatataatttaatataataatttttaaaaaataatgctagctaaccaaatgtaaaatgatacgtagctaataacaatactcctccaaaataatcactcatttattttaacagataacttttccatataaaaatctaaataacattgatagataatattatttatcttattaatttatattatggagtatttttttttttaccactttttagcactattgtgaaagttcggaaaattaattttaactaatgtaaaagtctactttaatttgttacatctctttaaaataatttttttttaaaaaaatgacaaggcatctttataaaaggctattcctctctctctctcttgaaactgctatttttttctcatttaaattattaatgtgtttaaagtagtttttagtaagtatcatcaagattttaaaagcatatatatgtatatatatttttttaaaagtaaataggaattaatatttattaaaaacaggtaaaatttattacatgatgatcatcatgatgaagatatgactcaaagaatataattaatcaataatattaatagcttagcaaaatcatttacaataattaggaagagaaccttaacaaaatcttcaattgaaatactgaatcaagaacaactttttataccttgtttgacaaaacatcataccatagaaaatacttcaagaacatctgcaaaatgaataaaactatattgaacaaaatatcgatggaaatatattaagatagataaaaataattccccttttaaaaaaaagacaaaaataaattcaataaataatacatacagatacaattacgaacaaataccaaatcactatatataattcacaaatatatacgaatataaatacttttgtgagtaatgagtacttacgatgaataaataatcaatataaattaaaatactataattattttaaataaacttccacttttatttagagcatacaaaaaagataactttttagtgataataacataaattttttgtgactaagtgtaatttttaattacaacaaaaaattaattatttgtgactaaaatatattatttagatattagttgttactaatttaattttagtcaacaagtattgtaactaaacacatttagtcacaataaattgtattttttgtaattaatacttttagcaaagagccttttaatcacattataagaataatgatttataattagtcacaattttcttatttttaatgagtggatagatagaatagatctctatatcatcaaaaagtttcacgatgagtgggacattccaaccacttaaggtaagtttaagatcacaaactcgttcaacaacaatattttctcgaaaaggagtaggaccgacccacatcgatcatctttcgaaatccaagaatcatcacgaactcgtattcatatatctatatatatataagtgtacatggaatttcattacaaaattatcatatgaagattaatattattttgtttgtgaaatttttgccaaagagaggaggagatgcgcggtagtacctgtgattctccgagtgtagtgaaacctaaatttattatatagaattagggttttagtggatttttttcttttctttggctcatttgtttcggtttgaaactgacacataatacggtcgattacaaataaaagcaaaaacccaatcaataatatttgtgtcagttttaaatattaacagacgtacgtgttgactaacgtaaaaatacaatattagatagtatagtaaaagtgtcatattttgatatgagttaaattaattattagctatatgtatttttttttttttggggtaaaaactgagttacgaaaatgtcatgtcaaaacagttaatatatgtaaattattttattgtttggactgaaaaagaagaagtagggaatagggttgaagtgacctatgattgagtagtagtagaataacgtattgggattagag

SEQ ID NO: 186071 - DNA, 1789 bp, Cannabis indica
aaaaaaaaaaatattatattctattcatttcaaatttaattttattcattttcattcatataaatgtagagtatgaataatgtattttaaagaaacttaaaaatgaaggaaagtaatttgcggcataaatacgtaagtttaacttctagttgtaaataaatacctaagtttaatttttggcagttataatacctaaattataattctggaacctttgtaggtaccgttaagtgttaagatatgatgaagcaatcgagagccaaggactgaacagtgggaatgggataccattcaagttctccactgtgaccggagaagagagatggcatcctctgggttgatgacccaagtaaccacagttgtaacagaaaatgccgagctttttgaacttgaactggagccattttttccacctgagagtaagtcgaagtaacatcctgagaacagaggtttggtgatgtcaatctctacccaaatcttaagaaaattgctccaagagactggtttatcttccttatgtctaccttcagcactttaccagccaatcctcccaaaaaattaccgttagccgtggagtagtattcatgggggaggttgtgtatttgtacccaagttttcaaactagcaaagtgaagcttcctattctccctcgaggaccaagcttggagaatcagagaataccctcttatgcaccaagggtcgttatccaaagcccaatttctatcctcaacaagttcaaaaccaaactcaaaatagttagagttaatgccctcctcataaatagcagcaacaaccactgctttatgccaagatttactcacaaagtcaatgactgtggcttcatcaacaaacattggggccaccactttaccataaaaacaaaaggtagataaagccttgagagaagaggcacaaggagtaagagtgacagatgcctcattgcaagaaaaacatttacccatatttttggtcagatatctattatatctatatttttttcagcttccatccacatcaatatattttgtctttagtcttaaaaattgaagtttagttaggtccgaaaccaatccatggggagagcattcgaagttcacttattcataaataaacattgtcagttccttctaccaaccactttccccattctatttgtaatttacatactagggttcatttagagtaaatactattttgaattttgtgttttgtaaaagttataattggaccatccgttttgtttaataacaaaatagaccttgtaatttctaatatgatacaaataggaccatgaattaattttttgtcaaaatcaaacttaataataattcgatctaaaggtgttatgaccaaactaattttttgcatctgttcgtgttaagaattattttaaagttgattatattaaaaaaaatagtcaaaaattgagctcaagatcatatttgtaccatttaaaaaaaaaacacagggtctattttatcatttaacaaaataaagagtcaaatctataactttatcctattaatatttatcctattaaatataaatattaactaacattatatttagacagaacattatattgtattaattagaatttaccactataaaatttaatacaatgtgaatcgtattatttaatacataataaatactaaatatagtattattttaaatagggatatgagcggcaaaaccacatatacttattgtttaacaattaaccacttaaattaatttttggtggcgaaaatacccaaacctcttttctgttagttatttacccttt

SEQ ID NO: 186072 - DNA, 2754 bp, Cannabis indica
ctaaaacgatatgatctgaaccgtccaaacggtgttgtcgtcatcttcctcatcatcaaaacctccaatcatattttcagcaaacgaagtcatcatataattaatttctctctctttctctttctttcgctttctctctctagaattagtacacaagaattattcgagagaataatatggtgcggaagtgtagcagaggaattgcagagattacgattatggaggttgctcatcaagtcggtgtacggactagagctcgagctttggctatggcggccgccagctcaggttcgcctaagaaaagaaaggtcaatactactacgggaaaattaatgaagctatcaacgacgtcgtttgtgatcacatcgacgacggagaatttagttgttccggctaaggcagcggagagtaatattggaagagcaactactgcgaagacgggaaaggtggaggaggatgatgatggagtggtggagttgtggtattcaaattcaagtccgagttctgatggctttcatgatgatgataatcaggttcaagcctcttgttgttcgagtaacggctctagtgagctaggtgataataatgatcaggacagaaccaaattcatagatctggaggcggtaataaaattaaattcagcaataaattcctttgaatttgtggagctttaattgctttgtgtcgccgttcaattccgttcagtattatgtttcattaattattgaatttaatttcacagaatgatgaatgtgccgaagctgaaacatcgacgtactactcttgcagagaaaggtttttcaaccaaacactactccaactagtactatatatatatatacatacactcaactttttaaattcctcaaaattcaaatttcaaaattagagctcaaattttcagtttctcttacacacacacacaattacatatatgtgtaaatatacattttaaatatctatatatacacgcagtcaatttcagttttcatttatttgctcaggagagagatgactccatccagtaataagtttcaagaagaattatctgacgacgtagattcaacgatgaaaccaacgtctgttgtggattctagccgtaaatcactggtgggagatcagaaaatgccgacggagttagagctcgaagaattctttacagtcgccgagaaaaacatccaaaaacgatttcaagacaagtaagttcatataagttatatgtataattttatatacatgatataattcttgaaaagcgttgggaacacgaaacgacgatcgatggatgattttttttttcttttcatttggttgtactttcaattcagctattttgtttgtttcctgagaaaacaacagtactaatactgaaacaactttctttttctgcattaatttcgcaaacatctatatgaatcataagataagaaatccctgaatttcttgcaggtataattacgatgttgttaaggactctccgttggaaggacgttacgagtgggttagattaaatccatgaatttaaaagaaaaaagaatagagtaattaagcaaacagtaagaagaaaaaaccagtagtggtactagctagtactggttgatgatgatcagtgaccatgttctgatattcttattatagtaaatttagatatagtactaattttaagcttaattaattaagctattttctcattaggccacatttttcttctcttttatatgtatagcttttctctttttccttttttccctttcttcctcactagtaatagctagtttttctctttaagaaaaaaaacagtagtatcgtagtaagtatgtatgtagaatgagctaagtttgttctctctgtacggattgtacggggaaacctctaattttattttgcaagtaaaattaatctattcggtgaagaaaaatatcgattcaaattgaattattccattctgttcttcacttttgctgtttcgtgtgtctttgtgtggggaaagcctttctttattccccactatcatcatcatcagcagcctggtacgaacatgatatgatcgttttcttattatatatatatgtgtgttaatatctatcatgggtttatttttgttgttgatatattagtaaaatgtcttgtaattgtatatttttcaatataaattaatatcacggccaaaacagggaataagagagtcgaaattgaagggagtggggtgaagcaataacactaacatgccgtttaagttacggacacgtgttgagaatccgagacatataaaaaaaaaaaaaaaccttatctcaatcccatgtgctatagtacaacccaattttttttaaaaaaaaaaaaaactaagtgaaggtaattgctatatatttagtttaatgttgtgtgtacatatatataggtagatatagctcaaaagagctaagagagcaacaaagataggaatatgaaagtgatagtggtaaaaagcaaggtatcccttttctcatcagaattttcagaatatatgtatttataggactatatatatatctacatatctgaatatgagtggctctgggctggaacggaatgaaatgaagatggaggcaagactttgtatagccagatatatgcatatatatcatatatatgctgtagagcagcatatatgtagtgtcgctttctgtgttaatatatattatatataaaaataaaaataatgatcctctggagaattttgcttgacaatactgttgcctagcctttgtactgtga

SEQ ID NO: 186073 - DNA, 2175 bp, Cannabis indica
gaataaacggtaatgttatcgtttgtggaggagttggatcgagggagtaaaaagtgaatcattgactgatcgcgtttaaccacttctgatcacgtgttaaaattaattattaaataaataaataataaatatctttatttaattaaataatttttctttacaaaaaattaagtgacacctaacccgccaacccggaccggctcggtcggacggcgacacgtgtggtggtttgtgtgagtcttcacccatgcgcacaaaactggatacccctggggcccaaacccatatctcaaacttacactagttatacaattcaaataaaatgtttctatcccatgtgggactcctactcagacactttacttttctaaagtgggctttataaacatttttaacattactttgtatattagaaattattttgaatttttaaaaattttgtaacatgtcttaaataactacaacgtacataattataaaaacagattaaattttttttttctggatgtcaaaatagtacgagttgcatcatagagtccaaaaatattagtattattgtaattaattttataattttgttaggtgtaaaattgacatagtcaatgtaatactttataaaaaaattaaaattataaaaaaaatacaaaaaaaaaaaatagaaaattcatataaatttgtcattttgatatatttaggaaataatccaaaatattatttactatacaaatcataggaaaacgacaacaaaaagaaggaaaacgacaacgacgagacttgagagacatatatggtgtacggcgtgatacccaaatgtcaaacagaagaagaaatagagagagagctatggggcagtgcgtgtcttgcttggacgaagagaagaagcaacaaaggaaagaagaggaaaggttagccgccgctgaagtacgtgccagagctgccgaagctgctgaaaaacggtctctttctctctctctataattgtattattcctatttcattcaattctttattcatcaatcaaatttgttcgactatgtcaatgatctttttctgtaaaccataaaattcgaaatctatatatgcagtctcgccgtagatgctaagctcgatgatattgcccaatttagggatttttaatatttacaaatgctgatacatgagtaattgatcatttatagtcgattatttcgttaatggattcttcgcaacattttagtatataaaactgtttactgtaatcccatttatcattctgtacggtcaattgtgatagtaactatttcaaaacactagcaatggatcattgtttggcttatcgaatttggtgtagacccttttagcaaaccttcccaaaacaatttatgttcatatctttatcttatgcattttggaattttgatacatcatttaagtacagtttaaaatgcttttgcctcaattcaagtattctgcctacttaatttcaagactgcactgttcctttttgctactcttttttggagtagcctactagccttaaagaaataactacaacatataagtgctgattcttacatggaaagtacattagttttctattaggaaaaaaatgatctttctgtgatcatgtggttgtgactggactttgctatgttagtctaagcttcttcttctttttttaattgtgaaaaatggtggagtggatgtaaatgtaattgtttgtatatataatgaattttgtacttttctgtttttttatcataatttcaggcaagagcagtttgagaaatctgcagcaggaagggctgcacgtgcacagcaacagggtcttgcaaagcaagcatcaaacactaacaaaggggaaccagtattaaaggtttttacttcttgcacttgcaccaatatttctaatgttatcttgtttttcatctcagaaggttttagtagttgcaaactctgtactcttgccttgccttgatacaattaaccaattatgcttatgatctcttaactaagatcttgccattgatatagaacaacaaagctatgatgctctcagttataactattttattttgttgtgaaatgcagtggcagatgggtgggtcttaagtattgtttctgtacattccaacaactgcttattgtaagtttgtgaatattttccatcttattgaatctaattactctgtcatt

SEQ ID NO: 186074 - DNA, 6873 bp, Cannabis indica
actgattccaatcaacctgttgctaaagcaacaatatctgctcccaaatcaactaaatctggcagaaaaatcaacacccctgcccatcttaaagactttaactgtcatcatattggcagcacccaatatcctctctccaattatctttcttatcataaactctcccctaaattcagggctgctgttctagccacttaccatttgcttgaacccacatcctacactcaagcatgcaaagaaaaagtatggaacgatgccatggacacagaaattgatgctcttgaagcaaacgacacttggattgttgtcccattacctccaggacaacacacaatcagcaacaaatgggtttacaggataaaatataatcctgatggctcggttgaaagatgtaaagctagactagtagcaaaaggctacactcaacaacaaggaattgactatttcgaaacttatgcccctgtcgctaagtttaacaccctcaaacttctaattgctctagctgccataaaccaatggcaccttcaccatatggacaacaatgccttcctccatggtgacctcaatgaggacatatacatgaaattccctcaaggatacaaaccaaaaggaaacttacctcctaatgcagtttgcaaattgaaaaagagtctatatggtctaaaacaatcatcccggcaatggtacgctaaactaagtaccacattgctacaacaaaattttatacaatccaagaacgatcattcactttttataagaaacaccaacaatgttttcttagcaattttaatatatgttgatgatataatcgttgcaactaacaacaccacagctctaaatcaattcatcagcaaccttgattccaaattcaagctcaaaaatctcggaccacttcactttttcttaggccttgaaatagctcgaaacaaccatggcatctctgttactcaacgtccattcactatacaattactcaaagaaacaggaactcttggcactaaaccggtttcaacaccaatggaacccaacatcaaaattgacaatgaaacaggacctctccttgccaatccaactcaataccgaagcctaataggaaagctcctctacctcaccatcactcgcccggacatatcatttgctgtaaccaaattaagtcagtacctacaggccccccgtgcaccacacctcacagcagccaatcgcatcattcaataccttaaaggcacacctggacaaggcttattcttctacaaagatgctcctactcctctccaacttcgagcctttacagacgcagattgggcatcatgcttggacacacggcggtccatctcaggttactgcattttcctaggaaaatctctaatctcctggaaatcaaagaaacagcaaaccgtctctcgctcctctgcagaagcagaatatcgagcaatggcaaacacatcctgcgagttaacttggcttcattcaatcattgccgatttcaacatcaccatccaaagaccatccattcttttctgcgacaacaatgcagccatccacattgcagagaacccggtctaccacgaaagaactaaacatgttgaaatcgattgtcatctcataagggagaagatcaccaacggcactatcaaaacaaaccatgttcctactaagtccaacttagctgatattttcactaaacctttgttccccactcaatttcatcacattgtatccaagatgagtgtccaaaatttatacactccatcttgaagggggctattagaattattggttaagtcggttaattagtggttaagttggttaattactttattactgtgcctgtatatatatgtctcatttcttctcccaattgtaataaagtattcatttttcatcaatagaaacaattttctctgtttccactaatattaattttgaagttttttttatttgttagtttgtagggtcaacctaagttgcaagttcatatatgatgaggtttcgtagaaagttcacatgctttcgaaactaaataaaataaaacacaggttttaagaacatttattaatattggccttatatcaaacaaatattttattattattttttgtgggcatgagcaactctatattaatgctcacaaaacgtagataaaatctaaattagttgaaagaagtcctcatggagaaatcaagttttgccattactgttctccttatattttattgtatattcagtctagttattccagcaaaatgttaccgtcactatccccacccatcaaaatatgaaactcccaacagcttgtttatctttggagattcattatttgatgctggaaataataactatatcaacactttaagtcaggccaattactatccatacggtggaaccttctttaaattcccatctggtagattttgtgatggccgaactatccctgattttattggtaagacaaatttatggtttatttaagttaattgacattaatttctatttatacctaactaaataattgttaaaatatgtttattttgttacagctgagtatgctaaacttccactaattcccccttatttgttccctggaaatcataacttcaaatatggagtgaattttgcatcatcaggatctggtgctctgactgaaactagaaaaggaactgtatgtatatataggaaacatgatcagtttagagataagagctaagacatatgcactcttgttactttttgtgtcttaaattaattttattaattattagcagcacattattgtacatagtaataattggtgtcatggtattctgatgtttgtttcaggtgattgatctcaaaacccaacttagttatttcaagaacgttagtattcaactgaagcagcaaatggggtatgctgatgccaagactctgctttcaagagcagtttttctcttcagtgttgggagcaacgattactcattcccttttgagactaactccacagtccttatttcccacactaccgaagagtttgtaggaatggtcattggcaatataactgaagttattgaggtactttcatacataatacatacaacatctttgaaaacattctttttttttaacccattcgcataatattggaaattatgtgagtaaatcaggaaatttacaaatttggaggaaggaaatttgggtttctaagcttgggaaaattagggtgttcaccatccggtagagtacttgaaaggggaaacaatggagcctgttttgaaggattcacaccgtttgtaaaatcacacaacactcaactctccatgcgactaaagaagttagagacaaagcgcaaaggattcaagtactcgctagttgacttttattcattagcagaagaaaggataaataaacccttaaaatatggtatgtatgtatgtatgtatgcattgagttattttttcttcttgattagctaatttcttaattttatggctttattatatataactatgttgtttgtgttgtgctatactaaaatataaaggctttaaagaagcgaaggtggcatgttgtgggagtggtccgtacagaggacatccgagctgtggaggtaggagaggagagaaagagtatgaactgtgtgaaaatgtgacagactatatcttctttgactttactcatcccacagaaaaggtcaaccagcaatttgctaaagaagcatggagtggaaagcctggtttctcagggacttacaatctcaaagcattatttgaatccatgtaaaatgtgtgtgtagactggagatgatcaccttcaattactttttcattgttggtcttttaatccttttatttcctgtttttttttacgtgttcgagtgaaagaccttgaaatattactctttaatcatcttattatttttcgttttaagttttgttgacgtgaaaattaatattccggtacgtggagtcaatcgccacccatttctatatatttcacgccatgaataaaagtaaagggtatttgcgtatttttttgttttgttttgacaaattatcatgtataaatttgagtttcagtttaatacaattggctttgatgtaggaaattcttttatttttataaatttttgttttgcttttctcattaagttattttatttgctacagtataacaataaaagtaaaacttagtagggtggtaaaacggattttgacacggcacataaatatacaaattttatggcttaagatcgcaaaaattagacgcggatcgaaaatatgtcaacgcgacttgatacgaaataaagtaagttacaacacgatctgcttaacaaaaatttgacacgtcatgatgaatttgacacatttttttaaataaaataataataatataattgtgtaaaaatatatatttaatgatttatcaatttgacatgtcatgatgtaggaaattttttatttttatatagttacttttcaaatgcattctaagtgatataaagtaatataagagagagaaagtagtgagattaatatttaaatgtctagcaactcatattgtaaataattcacaacaattaattaagtacataaggaaaataagtaaaaaaaatttaaaaagaaacttgtcaaaaaaaatattgataaaaatctttaatgccgcttctcgcttctaattttcgttattccaaagttgcctactcaaaagtactgttaaaaatgatcctttatatagcttaaaaaaagataaccctaatttttgaaatttcaaataagtaggccgtgatatgttcattgagtgtcgcggtcggtgttttcaaacacattttcttcttcaggtttttatatagtgggtcgcgtcattacaagggaatgtcgcggcgcttgaagcccaatttcgaacaacgatgaattaacatttccatgcttcaacattaaatcccaatgtttgaggctcgcctagaaacttgttagacacgaattctaacgttgaggcgctactccacactttttaattttttaacattaatctccaatcgcactgaatcttttggatttctttcttgtattgttttcatagtgctctagcaacacaactttatttaattaatccttcttgcacattttttttcttgaatttgctctattcttcttcactgtcaaacttggaaacattatcaaccaaaagcgcgtaaaactgcacaaaacacaactaaaaactaattaaaaatacctcaaaaacctacttaaaaatagactaacaaagtcttaacaaactccccaaacttgacatttactcgctgctaaacttaaactaaactaaactaaagacaaacaaccactagtaagccttacttcatttcacaccacactacaccaccgctactcgcaatatttgaaaagaaaattttatatattgatagggttttatacaatttttattatttaattaagaaataataaaataataataatattataaaattaaaaattaaatttttttaataaaaggaggcaaaattttattttggttaatattcagggtgaatgctaactgtaaaagaaacagaatctaacagaaaagacataataatataattattatattttaaagagaatttttaacaagttttatattttaaaaggcataatcaggtagtttcaaaaatttaaagagcaaaaaatactaattatgatctaaataatatagatatgtatataccattacaaagaaatatgcatttggctgagtgtagtatgcttttgtacatattcttttaaatattttttcatcaactaaacaattacttaccttgcaaaaaaaaaacctacacaattaagtagaaaaagtctctcccaaagaagaattaaataaaaattatttattagtgattttttttaatagaaaattccttactagtgatcattaggaaggtagaagaaaaaaaaaagtaagaaaaacaaaataaaacatattaatattaaggtaaaaaaaaaaaaaacttgatttaaattgaataaacaatggagggtgttaacgttggtgggttagtagctgttaaaagagttaactgatggttttaattcattaaatgatgtaatagtttagttttattggatagactgaacagaaaaaataaacagagacgatctaaggtttgagagaagcgaataggtggcatgttaagtgatccttaatcgagctgtggaggtaggagaggagaggagagaaagagtatgaactgtatatgtgacaatgtcaatgactacgtcttctttgacagtgatcatgcaacagaaaaagtcaacgaccaattagccatagaacactacaatctcaactctcaaggcattaattatttgatcaatccaattaagtaaaattcaaggagacgtattcttctatatatgtattatttgtttttaattacgtattctattctattgtattatcttcttcttaattttttttgtaactttactttttatttatacataataatatgtttttctttttagtttacgttatacgttatgttgacttgaaaaggtcaaaatatattccagtggaatcgatttcttttttaactgatggattctcatgttaattaaaatgtatatttgaattggatttggtcaaatcaatcatgtcaaacgaactaaggttgtattttttaaccaaaaaaaaaaatgaaaaaagaattgctaaatatatgtaaaccaccaaatgttaggataaaaagggaaatgtaaataaatgtacatatatgatgagagatgggtttgaatgtttttttcaacaataaacaaaacgatttattgaaaaattaaaagagaatagtatattatgaaagaagatggagagtacatttaaactagttcactatgtacatacacg

SEQ ID NO: 186075 - DNA, 626 bp, Cannabis indica
ttttttttttttcaaaataacttttagctaaatgttgtaaataaaatttacagggaggtccaattatcatagcccagatcgaaaatgagtacggaaacgtaatggagccatacggagaagcaggagagtcatacctaaattggtgcgctgaaatggctgtggctcaaaacgtcggcgttccatggataatgtgtcaacagcccaatgcgcctaagcccatgattaacacttgcaatggttactactgcgaatcgttcgaaccaaacagtcccaacagtcccaaaatgttcacagagaactgggtcgggtggttcaagaaatggggcgagagggacccacataggaccgctgaggacgtggcgttttcggtggctcgttttttccaacgtggcggagcctttaacaattattatatgtatcacggtgggaccaactttggtaggtcggctggtgggccctacattgcgaccacgtacgactacgatgcgccgcttgatgagtatgggaatttgaaccagcctaagtggggccaccttaaacaacttcatcaatctctcaagatcggtcaggacgttattaccgccggaaactggactggttagttaaatttattattattattataa

SEQ ID NO: 186076 - DNA, 1777 bp, Cannabis indica
tataagaattctatataaaatttcataaaaataacaaaaaaaaaatatattttaaaatgtaaaaaataaaaaagccctaaacttaaatcttacacagaaatggtaacgatattaacacaagaaaaaaagaattattgatttgttcaggtcttaaacgcgttcatgaaatagtccacttttgaaatcagttaagatattttaaccaatgtcccaagattgcttgttcaagtttaaacacacaaaatgagataacatagaaatgtaaagaaattagaatcacttcaccccttttgttttgaccaataacaaaacaaggaaaagaatcttattattagttataattagttttatttagaaaaagaaagaatctttcattagtggaaatctccattttaacccaatcttcccaatttgtttaatcaaatcaaatttaatttcttccaatgccagagaacaggcacattacatgttacagataattgagaataattgaaaagggaatatactcgagtgggtaaaggggtcccaaataagaggtataaataaaccattaacaaggcaaggagtttggagaattatgaatataaaattgaggtgaagacttgactacttttttcatgaaatgaagaagaattttggctttgggaaagaggttgtggtgtccctttccatgcgttttaaataatggtttttattttttttttattttattttaattttttttgtaaacctccaaattcaccaaccccacccacctcatcccactatcaagctttggtaggtggaaatgttgagatattagaatagtagtgacccagctcagctcagaaaagaacagaaatatgaccaaagaaacgttttctaaagctttctgttcctctttttaccttttcctctttatataataatcaccactcattttgttttaacacaactagatgatggggattttacatatctatactctgtttagaataaaaatgtcaatttaacttacaagataggttatctgcttctaatggaaatgaggcaagggaacatgggacatgacaccatcacttcaaacttgttaagttttctttaaagtaaatatgtaacttttattttattaatttgttaaattcctaaaataataagactacttcaataagaatatgacccatgttgaagacttctggaaaagaacaatatgctctaaccaaccatgtaattttacatttacatggtaattttaatttatttatattcttaatataaaattatctatataataatttatttctaatgatttagtttttattttgagaaattttcaaaaatactattttttatcttttatttacaatgattattgctttcaaactggttgtttttccattaattgttacttcatcaattttactgattagtgtacccgttgtatttgattctcctgatagttggtcgggtaataaaaatgttgcatttttcggtacatcattatggaatggattagcctttctggtaggtatccttaattttcttatctcttgaacccggtcgttctaggtccaaaaacaacccctccccgaattcttacggcctaaatttgtatttataaaaatacgattgtaaaattttaaatttacaaaaaatacactttactcaacaaaaagtaagaaaataccaaaaaaatgagaaatcaacctcaccacgactatatatcaactataaataaattataaaacaattaaaagtaactagagaaacaaccacacgacaactataaataaactat

SEQ ID NO: 186077 - DNA, 3237 bp, Cannabis indica
aaaaataaaaaacgagagttatattaataaaaggattttcaataacactgccaatcacttatttttcttctatacgagttatagtacagtacttttgtttccgtaaatcttgcatgaaaaataaaataaaacaaatcactgtattattattgaggtagtaactcctgtcatatccaaaaatcaccataagtgaataagtaaactcactgtgttattattccactcgtaactcgtaaggatatataactatatatacttacaactacagctgtctctgcaatgcaaaataaatgaccctaacctaacaatacagtgtatggagattattatttattcatttttaaaatattgaaaatgtttatcaatgtcatagtaataaccaatttttgattggacaacaagtccctaccgacaaaacaacaataaattaattaattcttgtttaattctattttataaattttgtatgtacagtatcggagctgggtccggaagattcgggtcggaatatagtagagataatattcaaatcgagctggctgaagaaagacaacccaatttttcagatcgaacggatcttaaaggtccacaacacgcagagaacgatccaacggttcgaggactgccgtgacgcggtcaagacacgtgcgctgaacagcacacgaaagaacccgaggtgtgcggccgatgggaatgagcttctgcgattccactgcactacgctcacgtgctcattgggggcacgtggagcttccaacctttgcgggccagtgcctggttgcggcgtgtgcaccatcatccggcacgggttccagggcaataagtccggtggtagtaatcataataataataataataacagcacaactacaactactcagactcagtgcagcgagtcgagcaaaggagtgttgaccacagcaagcagtggtagggcccacgattcattgaggtgtacggatgggcgtagagcaatgcttgtgtgccgtgtgattgcgggaagggtgaaacgctatgcggacgatgcgccgacagaggaggatagcgtgtctctcggctcctcttacgattccgttgccggttacgctggtgtgtactcaaatctcgaggagttgattgtttttaatccaagggctatccttccttgtttcgtagtcatctacaaagctctcgattccccgtaaaacgtcgtcgtcctcgtttatttattaattatataaataaatttttagttctcttttttttctttatttatttaattcgaatagtagcttcgcgacccgtacctcctcccactgtacataaatctgcttccattccatggatgtggtgttcactctctctctatataaaatgctgtgacgtgacgactgcgttttttgaccgttggatgatggaggccttaattgtaatcaacggtcaaggaactgcagtcgtgacaatataattagcaatattgtctgtcgtctctatctatctatatatatatattgatattaattaataagagtagtttattaattgcagaagttagcatatctttgttgtatgatattgtttattaatgaatttcagctcaactgcttttgcaattggatgcgagttactttactgcttacttttatttaaagaatattcattagttgaagatattgatagggtagctaattcgattacagagacattaaaaaaaaaattgagatgtatagaggattgctataagacactagtctctagtacgtactaactaatgatcttgtataaaagtttgtacattaaattaaatgaaatttaatacctaatcgtactaataagtaataactatattagagggtagaagctggtaggcagcacctatactcatttattaattttagttgaaggtccaaaaatagttactgattgggttaaacaggtaagtattttttatttaaggcgttgttaattggccagttggtacgggcttggctttaaatcacgcccgagattggtcagaaccaggcatgtacgggaggccacatgacatgagccacacctactactatcaagactattcaatattgaccagctacctcaatttatatgttaattttcataagtattttttaggattattcttttcttttcttttatataaagttggggtttagtttacaacaccaaactactctaaaatggggtgacagacatcacaataagattaagtagagtttttaaatgcactcaagaacttaagctaaaattatgagggtccacgtgagataatctttgaaaccacatggatataaggaagaagggaaagaaaacaaaaaaacaaaggcgtggtatggagtgaccaaaacttaaagaaaaaactcatacaaaaccaaaaacaaatgaagtctacctaagaatatgaataatatagttagttggagaaataattaataaattataattggctacacatgcgtaagcggatgcgcactcatggaggattctcatcgtttctagagtttttttacagttgatatattcatgtaatacaatgtacagtatatataaataaaattcaaaccatatatatgatctgatgagagagaagtggttgtcgtcccaaaatcatataatatataattaactagtgggattggaatctactgttgagattactgaaaatcttacacgcaaaactatatatagtaataaatacggtacggggggtccatactatatatgtatttatatatatactatataattagttctatatattactagcatttcctaattagttactttcattcataattaagtttatgtttggaagctggatgggaatgaaaaaatgagaaaaatcatattgcaacaagtaataggagtcagtgcagaccattttggtggctgatttataaatcacattaaatatatctataattaaatgtgcaacattattaattagcaacttaacatattttcttcataaaaattgttttttctttgaaaaaaaaattacataatacactaaaaattttaaaaaataatttcaaaaatatatcacacagaaatttttttatttttactctatgaatatttttatttataaaaatacctattcagtgaaaataatgaactattttttagttgttttatagtttatttatagttgtattatagttgtcatgaattttttttttgtttcttttatagttgattaatagttatcgtggggttcattttacgttattttttagtttt

SEQ ID NO: 186078 - DNA, 3646 bp, Cannabis indica
ttttgaggctagtagctcaattcctaattgacttgtcccaatggatattttgtcatttgactcagatgattgggttgaggatcacttcatgatctaccatagattaagggaggctctgataactcacttagagttattatgtgagcaaaaggaactacttgagagaactcgagctaacatagtctccattgaattgggtggtcatcttatatttattgataccttaatgcacttagaccaactatgatattcatatttggtccttaaggtgagagtggagaccttggagaagtttatgccccatgttcccatcaccagtccagcgtaactgccttctcacaaaagctcacctgggaggggccatcctagcttcgagattggttttccttcattcttctacccttcggtgagggtcttttgagggatcctttaagggcctatttcaacccccaggcaaaccttctaaaaatattggtcttgtgattctcaattcatctcacaagactactgcacataggatgaaaaacttgaaatgttgtgcggacacgtcctttaggaaaaacatgaggcatgctgcactccccgcgatgcatcttaacaccaattttttgtaggacaatgttcttagtgagttgtcccctaagcgaatcaagaaactcaaaagcatctactacaattgagtgcatgtagtgattatgcctacaaagcctatttggtgggcttctcttccccttgagggaacattcacctttaacaatgatgtcttgaaggcagggattaacctacctctccataggttctttacgaacatgatcaactagatttgtattgcttctcttcaactccacctaaatagttggtcagcatctacttgcctttacttggcgtacaagggtatacctaatcgtgagcctatgccaaaagaggtccactatgtgtatcccctttccattaacaaaggttaatgaggtactttctttcttcaaaaggattctccaaaaatgcccacagttattaggtgtgtatctaacacaaggcattgggggacatacttcttctttattgatggtgtgcctaagtggagcaggagcttttcatgatcgcgagtaagtttttttcattgatcttcattttctatattatactttgctcttgacatgattgtttgaaagtttcctttaagaggttagagacatatcaaagttgtcaacaaaattcttcgcaaaggggccacagaagctctttggcgtgcctctagaggaccagatgtgtgccaaccttttgacaccctccaatttgaagaagtatggcctcactgattgaaagagcaagatcactttgaaaaacatacacaaaactctactatccaaagaggcaggagaagatccttctctcgttgactattacgacgatggttctaataacactgacgttgaggtcgtgatcccaactgcctctttcaaagaagtgaatagtcaaagagcagctcacgagactaaggcagatgttgcctctttatcaaaaacttgttctactaaggatgaggtttgatctcctcgtcattcaactttgaaagagttgtaaccaaggcatctaatttgttgaagaaatccctccccccatgcctcagctgacaaagggggagtcgttaggtgcttcttctagtactctgatgatggcttctcccttgaggttttggataatgtttagtgaagatcctcaagttctgcttttcatgtcatgccctggccactttctgagtttttgggtgatgatattttgtgggctcaaaatgtggaagtaatttctccttaacactttaggtctctacaatatcaaggtcactagagctctaacatgtacaatagtcctcctaaggagatcagtctggagcccccagatctgatagtgattaatgatcctcaagatttttttcaagtgtcggtagcaacctatgcttcccttccttcgagatactcttcaagatctactccatatcttgcccaaggggaaccttcctttgcgcatactctatttcctcaatcctcccaagacattagtaacactatgtccgactatgaaaaagataattggaaatggctccaaggttgtactgatgtggatgtatgtacttcattagtccaaatagtcagttgggatagaattttttttatggcatgctatcaacctttttcttcttcgtagagtttcttatgtttgttctttatatttttatacaaaactgattctatcttttgctatattatttgcaagcctcaatcatggctcataccaccttaagggtctccaagccaactcttcatatcctccactagggtcccaatatccttagaatgacaagactgatacgagggaaaaaaggacatggttttggaataggctttcttgagtgtacaatgccattcttcttgtgttgaaaagctttcgaccaagtttcttattgttgagtaaaagaaggaggtagtagaaaagaaggtgacctttttgtgtgaagtcaagaattggtctgaaagtgcacttgccgaggccttaaaggttgctgagtcagctatccgagagagaaacgacaccctccatcctctcaaaatagtgtaaagatctaaaaagatgcttgagaaggaagtagagcatttagattacttggtttatgacttagatgaatactttcatggtcaagaggagagcgctcgcacttaggaggctttgaccttcgacaaaaccttataaaatatttgaaagtgctaccccaacctatccttttgctgttgaaagggtgtctaatagatgatccacttgtggccctccatccccttgtgaagttgttcgtgttgttttccatgaggtcgttgggcttgagctatcttttattattctcattgggtgactaaagtatttatttttttagagaaaaagactcctttctttacacgttgtcatcctttggggctatctatattttttcttccttgttggccacttgtgctccgaggctgtttgtgtcaactctaaaattgttgtactggactttgctatgtttcttttttttttatgactcttttcctttacgagggtcatcaatcttgtgcaactctttcgatgatcgagtatgggctcttttggccagatctctctctttgggtttgtcattttttgtaatgaggactatgggctttctagttcttgtgtctctcttgttgcttgtttaattatggagtgttagttccatgaatctatctcaacctcttatgtttattgatagttttgtgcctgcttttaagaatttttcgagaagtgtcctcattttatggtactatttttcttgagcgtctttcaaggccctcatatttttaggcgcctcaggcctagttttttatctgtattgggggtaaggaatttcttaaagcatcttttatacttttcgtgactaagggtagctagtccttgcgtgtacaagattttttttttattcttacctcctctttctcccaaatgtgtagcgctatttattatgatggacacttaagacattcttcaatactatgacaattaagacattcttcaatactaatgactactgatttcgtttgaaaaatagaaatgtgaggatgatagtaaagtaggagat

SEQ ID NO: 186079 - DNA, 2380 bp, Cannabis indica
aaaacaatttttaaacttaaaactcacaatctttttaaaattagttttcaaaaagtaccaacaaatcaaaaagtttttccatttcctaggttatgtggaaatatagcaaactttataagttgcgcttcttgttccctgagccattctaatgtaaacagagcccaaaaggtgaaacatggtaataaatatatactaatccattagtacatcccctttaacggatacattatagtttttttatatgtatattaataaacaaaaccctatcaaaaatatataaatggagtgtatttgtgcattttttttttttggtgcgccatagaaggcgaagccctctataatatataatatatttttatataaatttatatataatagtaaaatgattatataaatatgatgtttaatatagtgaagataaaggaggcttatataataaaaagaattattttgggtgtgtgttaatttttgttcttaaatttttgaaataaagtaaaattgaattttaatttttctaagaaataagaatatattcggtaataataatagctatagagcttggtctataagatgatatatattgattttaattgggtgtactatcgcagtgttttcaacaacactacagtgattttaagtccttttctgttggcgaagtggcacactacaaactttggtttttaaagcctattcttcttaattttaataaaagtttgctttaataaaaataaattaataagtcctgcgttgttgcggaccggaccacatatactccattgtttgggttggacatttgatggacgtgaaccaaacgcctaaggaaaattaattttttgtgaagacttgtatttattatttgaaatgtcttttgaacaagaagaatgaataatggtttttttttttttttgaaagcgcagtctgttgatatacttagtaattttcgtgtttatttctctttaataaaacccttctcaaagatcgtagaagcatatacttaggaaatgatatcaatatttttttccactagtttgttcaatcttcatggtagttgctcaacaagccacagcggagaactactactgtattgacaaaggtaactacacccttaacagtacctaccacgacaatctcaatcacctcctctccacccttcccaactcccaaaacaacaatggctacggcttttataatctctcttacggaaacgccgacgaccaagtttttgcaatggcgctatgcgacggggacgccatgcccgactcctgccaaagatgtcttaacgagtctacacatcttgtccaacagctctgcccataccagaaggaggtagtcctatggcacaataattgtatgttgcgctactctaaccgctccttgtttgggttcatggaaagttttccaagagttatattatataacactcagaacgcgtcatccgaccccgataccgtagaggcgtatttcaaagatcttagaagcttattagataatctgaaaagtcgagctatggctggtggctctcttaaaaaatttgctttagacagtataaaatctgcagggtttaaaaccatatatgggcttgtgcaatgctcacctgacttgtccaagatcgactgcaataattgtttggatgattcatttgggaatttgccggggtgttgtaacttgaaaaaagggggagtagtactcggcactagttgtagacatagatatgaagattacctcttctatgatatttctaatgtcactcaagctccgccaccatccccaatgccacaaccactacctcctccgccattaactgtaccaggtaaacaagatcagaacataatcaatcttactttctttttataattattattctttatcatatatattgttgtatcatcaattactcgattattgcaggaaggaagaaggaatcatcagcaacggtaatcgtcgttattgtttttgcgtctactgttgcgttggggataatcatgtccatttttgtgtgtttaagaaagaggaacgcaaaaacattaatggctcagagtaagtattttgatcatgagaaatacatacacatatatttatgtatattatatttatcttccttcagtctttttcattttacaaaaagcctagttttcaaaatttatctagtaactaaatacttaattcttagttaactagatgcttttagtagaaaataaaaattaagcattgaaaactaaagatccagtggtggaggtgtatatgcactactttcgaacatatatataattatatattctatggaaaaatagtgatcacgtaataaaacttcaggcaattcagatgcactgatcataagtcagtcgataaattaaactattcatggctgtaggctgtatga

SEQ ID NO: 186080 - DNA, 2698 bp, Cannabis indica
ttgaagtctgaattaatcagtttctatggtacgtgttggggcattgaaaaagccaagcaagtgtttggtgaaatgtctgatagagaaggaatcttatggaatgagatgatcttgttgaatttgaagaacgagagatggttaaaggctttagaactatttaagggtatgcaattttcatttgtaaaaactaacataagtacaattttgaaagtattacgtgcttgtggaaagattggagctcttgatgaaggaaagcagattcatggttacgttttaaggcgagcattggaatccaatttatcaatatgtgattcgcttattaccatgtactccagaaataacagaattaaacaagcgagaaatgtctttgattcgatgaaagattatagtttatcttcatggaacgcaatcatctcctcatacgctttatttggctactttagtgatgcttggaatcttttaaacgaaatgaaaaggtacaatttgaagccagacattgtgacttggaattgtcttttgtcgggtcactctcgccatggctcatacgaaatggttctcaccatcttgcggagaatgcagagtgtgggcttcaagccaaattcaagctccataactagtgtccttcaatcggttattgaattggattctttggaatttgggaaagaaatccatggatttgtgatcagaaatggacttgacaatgatgtatatgtaggaacttctttgttggacatgtatattaaaagtgattgcttaagtcatgctcaagctgtttttaatgctatgaagaaaagaaatatattctcttggaatgcattgatatcaggatattcttacaagggtctttttgaagatgctgaaaaactattgaatttcatggttgaggaaggaatcaaacccgacctggtaacatggaatggtctttgttcaggatattcattatggggcctcaacaaggaagctagagctgtaatagaccggatcaagagttcaggattaacaccaaatgtggtttcatggactgctctgatatcaggctgttcacaaaatgggaaccatacggatgctctaaaatattttattgaaatgcaagcagaaggcataaatcctaattcagctaccatatccatcttacttcgagtttccgcaggcctgtctttattacataagggtgaagagatacactgtctcagcatacgaattggtcttatagaagatgtttttgtagccacagctcttatagacatgtactctaaggcaggtaaattgggtagtgcccttcgggttttcaggaaaattcaaaagaagacattagcctcctggaattgcatgatcatgggtttttccatccacggttttggaaaagaggccatttttctctttgatgaaatgtgtaatgcgggtgtccagcctgatgctataacatttacagctctcctttctggctgcaagaattctggtttagttaaagaaggatggaagctttttgatagtatgagccaagattataacattgacccaacaattgagcattgttgttgcctggtagatcttcttgggagagtcggctatcttgatgaagcttggaattttatcgaaacaatgccattaacaccggatgcttccatgtggggcgctcttcttgcatcatgccgaacccatagaaacttagagtttgctgagattgcagccaaaaatcttttcaagttagagccctacaactctgccaattatgtcttgatgatgaacttgtatgcaatgtcaaaaagatgggaagatgtggagcgtgttaaaagcttgatgagtaaaagaggagtgaaaatcagccaggtctggagctggatacaaattgatcagaccattcacatgttctctgcagaaggaaaaccccacccagacaccgggaaagtatacttcgagctatatcagttggtttcagaaatgaagaaattgggttatgtccctgatatgaactgcatacatcagaatctagataaggaaaaaaaagagaatatgcttctgagtcacacagagaagttggccataacttatggactgatgaacacaaaagatggagtacctataagagttattaagaatactcgagtttgtagtgattgtcatgaagcagcaaaatacatgtctttgataagaaaccgtgagatttttcttagagatggccttcgcttccaccatataaaggaaggaaagtgtacctgcaatgactgctggtagaagtgttctgctatgctaatgaccatcttccaaagactacattatgatgaactaaattgttggctcaaaacacgttcacctgatcgaacacactaataagtttaagctagcaggtattagtatgctaacgacagagatgtctatacaaattggaggagcatctggtccagtgaacgaatattacatttcttcgtttgacttgtcatgtggagaaaggaaatgaaaatatgcatctagtggaggatatagctagaacaaattagagccactaacattcgaggacaaattgcatactcaatttcttgagatggaaaagagggaaggggatgcatacctccaatactccattattggagccatttaactagttttggacctacatcaagtgtgtacctgttgtttcattttcatcttatccttttgaatgcatttaatgtaaaactgttctttcccattgtataaa

SEQ ID NO: 186081 - DNA, 2674 bp, Cannabis indica
caacaaacaaacaaataaacaatttattaggcagtacctgcttaaactttctaatatagcactttctgcttcagctacagagtcactgccttcagaaagaacccctgatattaattacattacactggttaggttaatatcatttatgtcaacatatcataaggatatgtcagtattagctccatagttgtagttcatcgaatgacaatgctaaaaaagatatgcaaaactgtagaagattattgctgagtggctatctacatgttcattgttatatccaccaattatctacttgactatctataacatgtagataactaatagttagtccctttatgcaccataaaagttcagtagttctacagccagacttggtcacttagcttcatacctgttattgaactgatttcaattgaggtgaaaaggccataatcgatgatcaattgtgggaagagaatatgtactcacatgaatcaatagtttgcttggaaaaattttccaacagctccttcgtactaaatggtgtatacctgaaaaccaattcaatcttcaacaaaggtaattaaagtgtgaaaatacctaggcttaacttgtagcgggtgtacttgctaagtactgggttttaacagtaaaagggcacttactgatgatacaatactacaataaatgcatgttggacacttgagtttttctttttttcaaccaaatacagatactgaaggcacgacgacttacttctctcataagaagtagttattaataaataataatgacttgactaattaatttgaatgctcgtgaaggattacagacaaccaacaatggactggtaatgaggaacatagataattaaatggaacattatactgcacatagtaggataattacaacttactagcatcctcgtttttccaattaacgcaaaaggtgtagatatcatatatcaaaaagggagaagttacccaatacccactgcaagttccttagccacttgctggttgatatttgttgactccccaacaatgtagattgaagctcctttcaaaagttgtgaagatcccactgtcaaggattcccaggactccataatgtcaggccattttaaatctggatcctgcttcttcaagattacaaccagctgatcatcatctatcaacctgttgaaaaaaaagtcaataatactaattatcatcctaaacatgaggagttctataaaacttacacaattcatgaacttaggttttcaactttctacaaaccagattgtttctgcaggctttactctgtcaaacagacgattagtttcaattagtgtggtaggagacccagaattcagtgctctgattgttaaagaggtttcatttgcatccacaaaaacatctttggaacttcgaacattttggtcctttaaatgtaccctcagttccacctcagaagaattatcaaagaactgcatatgtttttacaagaaaatagtattgtaaattaaatgaaaccaaaataatcaactacaaaggggacataacttaatcccaaacgtaactgttccacagtctagctatgatttgagtgatcttacagcagagttgaaaaccataggttaattaaggagtcggacactcctcgtcatttctcagattgatacacatgaagtgttaaaatagaaaaaccacttacagacatttgaacatataagccaattgttgaaatataagaactagacagggaaagttacatcttaattctgttattacgaatcaaacatataaggtttcataagaaattcatacatgtacaagcaaaatatagatttctgacaacaacaacaagaaacatgatcattaaaatatgttctctatgttaagatgagataaagttggcatattggaaacatgagcaaaaagcatggacaaatcctaaaaacatttccatactcttgtcacccaagcaataaagttcatacattcttttagtaaacaaagcgatccattataggaaatgagtcataaaatgtcaattggaaacatctgtagaaagtaacgagaagtttcagcaattcattctcctcaataaacattgccttacaagcaaagaaaaaactaaaactacaaaatttctgggcaaccaaatagaggggagggatgattacctcgtaatggttggtggaaagagggagtgaggagagaccgtgggagcgggagaagcgagggtgggaattgtcgaaagaggcattgccattgtcattggtggtaaaaaagcgagggagataaggatttgtgggtctaaaagaaaaataatgattgggttggagaaaggaaagagtgtttgtagtggtagtagtagtagtagtgtttgggttctgggaaaatttcaataagctcacagaaaatgatgtagccatttgaaacgttgataggataggccgagtcctgattgtttggatatatttatttttatgaagtgaatagtggtcgcaaaaacaaattataatataaaaaaataaatggaataataataaaataaaataatgtcgcagaagggtttaaagtgagaacagaggttttagcttagctcataaaaagagaggtggttatggcgaaacaaggtgatttgtgggatgattctgctctcatcagtgcctttaacaacgccgtctccaaatacaaggtcttct

SEQ ID NO: 186082 - DNA, 2483 bp, Cannabis indica
gataatgactgtccaattcaaaatcaacggtcctgattctcctatcatcaaataactcagctgcatgtcttccctacacgtgtcactcatccatggccttctacgcttttaaacaaactcttacactcttgtgtttaactggtacggcttgcatggaattaatccccccttctttcttacacacattattcaaatatttctcttttaatgaaaaaataaaacatttatgttttataatatatagacatatccacatggaactcagcacttaaaatgccgttgaagtaatatatatttataatattaaacctgaaatcatgatctatatacagagaaccttccattatatgatttgaaatcactttgtttatatttttaatattgcattatttttgtctgaatagggtatacattgtttctttgtctcatgtaacaaaaggattcatttttttctactacatggtaagaattattattagtagtagtattttccttttctgaaaataatgcgaacacataacttttggacatgcaccgtttcacgtgtcccatttcctttttttagtgcataagaaaaggtcgacattttattactctcacacgtgtgtagcactatcacaaataattaaataaataaaataataaaattaaaacagatcgaagaacaaagccattattttcagggatgatcgcagcataataaagtaaaataagccatgattaaatttcagctaattggtatatatatttcaataataatattacaaaatactttaaaaagaaaaaaacatataataatatatttatctaagatgaaataatatcatcatcatcttctacattcttttcctcctcgatttctaacaaggaagccaaacaaggagcactttcaatctctaattcccctacttctattgaagatacacaaggagtactactactacttaaagaagatgaacaagaagaagaagagttagaagtactagaagaagaagtactagaagtgttacaaaatgataaaggagaataaggagagtcacaactattagaacaattacaatttgaagaactataactagaagaagaagaagaagacttattattatgactaataatatcaatattattattattattactactattactattaaaagcaatacctaccaataaatcaacaaaagcaccaacaataaacccatgattgtcttttccattcatcttcaaataccaactcaaaagctcttcaaggctttcccaaccctttagaccatgtgcctcaaccatttcctccatagattgtttgaaatccaaataagggtttctagactccattgataaagcaacactttccttgtaaggaatcactttctctaatctcttaatattattattattatcaacactactaatactttcttcaagtatagaagcagtactattagcctccccaggctcgaagaacaaccggctctcatccgttgaccttagtccttcaatcactgcctcaactgggtctccgccggctccggcgccggaagatagaggtgggtcgtcggcggaatttgtggagaagcttgctgctgagtcagaagacgatggtgatgagtaatagtcattaggtagaagagaaggaggtgtagtagttgatgagtctatgaaagctgaattgattgttttgaataaaacgttgtcgttttgaggagtagttctgaaagagagggttcttgtttgagcacacgaaggccatggccatgttgtagatttaggctctgttgtttggttagccagaaaagggagcttcattttctttcccatatgattttttcttttcggttttgggcgagggaaaaaggcttctttcttggcttaagaaatagtttctcttgtggtgggttcaaatgaatttatttgtgtttttttttttaatttttttaaaaaaataaataaaatatataattattgaatctgattttataatttagaaatggagagctgtaaaatatgtttgagttatttatgtggcattaatggtttagtcagaatggaggttgtggggaatggttttgaaagtaatgagacaagtgggagaggctgtcttgtgaagagataaaataaataaattaataaatacaatttattttttttcttataaacaaatattgcttaaataacaaaaaatcaaaagtggtgaagttataaaaaaaattgaatttcgaatataaatgtattggttgtttttttgtgtaaaaaaataaaatgcattttttatttaaaattttttgaaagtataaaatgatgtgttatatgtggggtctgtaattcttaatgtgcatttaagtgctgagaaaaaaaaaaagctcagaacttcataatgaaatgttattcaggtgagcattgaatattagtactagataaatgaaatgaaatgaaataaaataaaataaaataaacaagtgtagaaaagaagaaaaaaaaatccc

SEQ ID NO: 186083 - DNA, 5140 bp, Cannabis indica
gggcaaactattcggtttaggcggtttacaattttttttttacagccctacttggtagccatcaacagatgcaactccagtaggtacgtactcttgtggagcttatttcattccattaatatagccatctaatctatggcctctgataatgggtgtgaccattattttctagagtgtataattattgcgatcaagtttgaacgtaaaaggttgtgatagagtattaccaaagggagtatgagtaatacttacttatccagattgaaagccaaactgtgaacttccattttgaccaaaaagggagctagtttgatcagggttttgtaccctttgagtttgttgctgctgagcatcaattttaggttgctgaccaataacaacatcgttctgagtgccttgtcctatttagctagcactagacaatattgaagtgtgagcaggatgctctgataccaaaatgagaattttcaaaaaaaaaaaaattgtgaaaactcaacttaagaaaagtgaagaagaattccatttagtgggacatgaccttatacacacacactcttttacacaaaccaataaagtaataaagtagtaatagaatggacaagaacatactttaggcatagttatataataacagaaatattagagagctaagtgatgattaaggaactaaaaaatggattattcacaatgagattatagttatttttaacataactctatatatattttactagtactatatgatttttcccatgcctttgtgtaacatacagctttctcaatatattttttagtaattaattttttaattacctaatattaattaataatctacatacgcttttggtaattaattttgtctcaggacagaaatcaccaaatggagagtattaaactttcttcaaatacacttcgacgaggagtttgatgaatatcatatataagggctagctgcatttagaagagaaggtggaattaataacatgcacatgatgacatagatacattaattaagataagtatattttattcacaaataattactttataggttttttttttcatatagtttatctttcaaaataaaagagattcctcttttataagactaataatatcagagtaaataattttaacctgcacatattttttatatgtagtattttttatgattaataatttacaagttacaaataattatatattttttgtgattaaatttatgaaaatatatttatcttcttattgaaaatttctttgtgaaattattttatatataatattatttctgagatttattagttaagctttagttctttcttttttggaaatctattcagctctactttaactactcttgatatatacaacagccatatatatgttgtcactttaatttgacccaagagtaatccaaaggaccaatagctcgccaaagcagattatttgacacgaaattagcgtacgtgttcgatgaaatgccacgtggttttccaaggtggcgtcccatgtggcagaagccaccaatttcggtaatttaaccaaataaattgtttcaattaaagggaatactagattatattcgaatgctttctatatggtaataagctataaaacttgattagcggaaatgaaatatatatgcatattgaaagtagaagattcgaggcgtgttgtatagaaattaaaataaaactaattagtgtttatttctttcatcttaaaaataatatttttggtttttttacaatttcgagtggggtctcatgtgtaaattcgtccatgttggcaggaccccataagaccctccatctctcggcgtcgggccgaagcaaatttcccatgcatgtattcacactcaacacgtggttgacacccacctcagcactcaatacttattttcttcctctatataaagccagtaactctacttctcactcaatatctcaactgattaccaacaaattacaacaacaccaattatataattatctcttccttctcttaaattagcttttggatccaaagaaatcaaccctttttcttctctcagccaagaaaatgtctcccgtttcccagaaagatgttgggacgttagtttggtgcaagaagcagtttcttgcaggaggagagtccactggtgattttattcatgacccagttacacatgttattatggaaggagatggagatgatgatgatgatgatgatgggggttatgattatgccccagctgcatgaactcatttatacatagatattgtatgactaattatatagctagttaactgtactttgtctctttttttttccttcactctaaagtttgtagtgtagtatgtagtgtttgtctttcctatgctaccaataaaatgatatacaatatatatatacatcattaaaatatggttctgttttctttccttattatatataattaacacatagatactgtgtccacacttaaaagtagggccttacaaattggattagaaatattgtattaaaattattaacgcacagatagctctggatatgggtgtcaagtgtcaacaacataaatccatgatcatcacttcatcttaatcttacttttatgcacccaatatttaatagttattatagttttaaacgaatatatagatagatatatatataattataaatatcaatataaactagattctatatttccgagtggctaaagtagtttgaaagaataattcattatgtcatcattgtttggtcattataatctcactcaaaccaataaagtgacgtaacaatgtttatgacttcccacgtaattaattaataaccccacatatgtattattaatcttaatttctggaattagtagcaggggaactactttattattgtactcacttttttgcttcttctattttatatcaacctgcactgcttatattatataccaaaaaaacgttatttaatcttccactttttcacaaggagtactacttaatactttttcattattgttgaagacattttctttgcattattttaattaattaaagaatgaatagttagtcataagctcataatgaactttcataacctgcagggttttgttaaaaaacattattatatatactgatcagcggcacctgttaaatctcttagaaaatattgaaagagaggaagaaagagaatcttattactcagtgtgaattaaacgttaattcgaacagggtatttctacaagctactaatcaattaatgaggtaatataacaaactcaagctcgtttcataagcaacgcctaactgatttaactgactttgaccgtctcttaacacacactaacaaatttgttaattaatttatgttgttgaatattattatagagttgcatcttaatattcttatttatatatatatatattaccatttattctatgtgagaatagacttttttttggaagagctactcatggagtgatgaaaatttatgtgtctttactaatttagtagagaaattttaaacataataattatagatatatgatacgatgaagagttgtgatttttcgtgtagcttgttcatcaatcatgttaaagtggctgggaatcacccttatggaaatttattgaagaagaaaacgacaaaaatgtgcaagaaattacaagttggacaaagcaaccaatctataaaccaaagaataaaggtattttaatttgtccaacaaaacacaactttatagttattcataaaatttaatataatatcccgtacatacaaattaatttattagagtgttcatcgccaaatgatgcggttttgatattatttattaaattaaaattggtgagacttatataaatttataccaataatagtatgttcttgtggtggttgacacataaggtgcttctcagcatttttctataaaatttgtcaactattaaaaatatgctcaagaataaattgtgaccgtaaatctgcagattcctgccttcagtttttagttacctattaatagcatgttttaatttcattttgagagatatgcaacatgaatgttctcatctatctcagacactcatacacgacatcttagaataattggattctaattttttaactataattgagctcacgaacagaatctatcagaaacagagaaagtagtagcaaaaaggaatcctttatacatttgtaaagattaattatttattctgatcagttaggaaaaggtggatcgaattgtactcaaccttatctaaacttcattgttagaatttgtaagtgtatgatcaagaaaatgagtgtatgataaggtgcatatggttttatcttaaaattacttggtattggtaatatataaaagaatagtacatgcatcatgtgtttctgtacacattagatagtgtgagactctcctctaacatcccctcaatatgtggttattttttgctcaccaatcacgaacaactcgattacaagcatgacgttttgctcaccgaatcagaagcaattttattagctcatctttttagactagttattgaatttgaatcagatactcgataaacattactacaaaaagctctactcccgtcggtccttaaattgttttttttttctaaggaccgtaactaacaaaagtaaataaatgtttaaaaccgacgtctatagtcgaaaatacttgtcggttttgaagagtcgtcaagtatcactacaataaatttaacttttaggggcgatcaaattagaggcgatttaatgttgcctcgtattgtcgcccctaaatgaatatacttttctttttcttaaattcgtgtaaagttaggggcgaaaaaaatcgtccctaaaagtgttaggagcgactttttagttaatagaggcaacattatctcccctaatagacctatcacgtgatctaacacactttaatttttataacctttaaaaggttttttctataataaaaccctatacaatcccctcaggttcttctcttcattttgtttccttcaacgtcggtttcagggctttcagaaaaaaaaaagtttgagaagctccaaccgatcattcgccattcccatcagccacccgacccccatcccccaaaacccgaacccgtccccctagtccgaccctcacttgatg

SEQ ID NO: 186084 - DNA, 2446 bp, Cannabis indica
ggtaattcatattatataacacaagtacaattatctatgagattttgctcaaaagtatgtatagttttatatagtttaaccttcttgatataagggtaactttttaaatatttctcccccattattttttctttcttttattccattaaatttaattttgtggtgtgggtgttgtaaatatatggtgaagaaaaggaatagaattttcctagaagaaaggagagaaagaagaattttgttgaaaacttagacataaagctaaaagataattataggttgagagcaaaagtctagcaaagctagtgtaataataataataatgcacctgtgttttgtacttggtatcttcatgatgtacaattatgtgtccagaaaaaacctcaacccttcttcaaggaatatatataaattttcatattgattccaaaatgtaataatgcatgtctagtatcttgatataacatagaagacactcacatagtaactttagtaaatcaatcatttttaagaaaataatcctactaattttattctttaagcttaattggtcaacccattcattaaggttcaaaaccattcattaagtttaattgtaatttttcttgtattaccagtacctgtaattttgttgcccataatataattaagtaagttttcattcacaaccggtttaattgcttacctatttcttacttaccgaaaaacttattctgtaatgaagataaggtccaattttttcaattaatagacgattttttcaaaaaaaaaattaaaaaccattatatgattttataatttaaacaaagcagctttagaaaaaccaagccaaattattcaaagatggccctgaagattaattattacccattacaatggctcaaaatgcttaacaattacagttgcctcttaatattgcatttggctctacaatttcactaattttttttcaatattattagtgtaaatggtcagaatgcttgttgcttttttcaaaattaaaccaaaataaaaataattaaattaatatggcaacagagagaaataacaaaatagtaaagtataacaaagaagaaaatcttcaattaataaagtatttattatttattatatgatacagagaagcaaatatgaaaagaaactaagttatgaacacattacaatagagaaggattaattggaatactcttctagctaattaataatataatggattttgaacccattaagcagattaatgcatttttctcaacaatgaacaatcaattaacagtagtagttgtagtactagaaatggtgtatgtcttgggctcaaaatctgttgcaatgtttctatgaattttggcaataaaatcttctgcttttctgtttatagcaggatcagccacccacctacctctgtcctcatcactaggccaaactcttgaccttgcactagccacttcctcttgatgatgatgataataatcatctgatgatgatgatgatgatcttcttctcttagatttgaacatgttaaaaattgagaaagaagaggtagaattacttttcctctgtctgctgttgcctcccattttcactatatgcaaaattaagccttgggatttagttttgagtaatgtggtgagtggagagtttatgtattgattaattactagctctctgttatagctaaagaaagctctgtgtgagtatttatagacaaagggtatcattgtgttggaatgatccaagggttgagattctttgaagattatgtaaggtggagatggatttgttggaaaaacattattgggtctctcttcattttttattccttttagtaatttcaaggcaaagagcttcaatatgtgtaggtagccaatacttctttctatacctttttttggtatttgattcttcttaacaaattttccaatacttttccttattattatagtgtgaatgaaagaaaatcaccatttagagcttttttttaagctataagtttggttgggaattgagatattttagtgcaatgcttatgattattggttaaaaacaaactaaaaaaatagtatttttaattgagctaagaggcatatatgggatggtagagcattatagattactaaattataggttaggagaggagtttctagcgtgggttttacggtatatttttcaatttaattaacaagtgattaattagaacactagaaacatgttttcattgatgattcttgcctagtaataaaaaaaacaagtatatatattattaattgatattcaaagctaattccttttgttttttcaccacaattaaaaattggacaacatacatatatatatatattctccatgtatacataattttatatatacgtaattaaaaaaaaaagtgggatagtctaagaagcaaagatggtagctatagtcaaaagtgaatgtactatatatatatatatgt

SEQ ID NO: 186085 - DNA, 2520 bp, Cannabis indica
tttacatttccctttcaggatttggattttctgataagcctcaacgtggatatggatttgactacactcttgatggtaatattttttactggtcttgattttcttttcatttagtattgcttaatacaaatttctgttgaaacttgtaatgtattgcagaatatgtatcatccttggaatcttttatcaatgaagttgcagagaataaagtgtccatagttgttcaggtatatgcctttttatctttatttatttttccattttgcttatcatatttaaccatattgttctttgtgtgcttcacagggatactttgcaccagtagttgttaagtatgctagaaatcatcaagaaaaaatcaatgacataatacttctcaatccgccggtatgatttctctgagaatattttgtttattagtcacttataaatatcattatggacccgtgttttgtaaaagttaccgattaagctcaaggatattttattagaatgataagttatatgttttttgttctgttttatgtagctaacagaaaagcattccaatcttccatcaacattgtccatattcagcaattttttattaggagaaatattttctcaggtatgtttgtctaaatttttattatgtagttattcactttctgcctgattattcaatcatttcatagacatgataatttgttgttactaggatcctttacgggctagtgacaaagccttgaaaagcagtggtccatacaaaattaaagaagatgatcttatggtttatagaggaccttacctcacatctggttcctcaggctttgcattaaatgcaattagcaggaccatgaagaaagaactgaaggtaaataaatatggctgttaatcttaattagaactgtgaaagaattcctaatcttatatagctttatactttgcagaaaaatgttgaagaaatgaggaaaatactacttgacaagagttggaaagttcaaacaactgtatgctggggagaaagagatcgttggttaaacttcgatggagttgaagatttctgcaaagagtcacaacagaagctcatccagattccaaatgtgacaactctatcatctcatagacaaaatggattgatttgttttgttcttcattgtaattcagtgtatacattttcgggttttgcaggcaggacaccatgtacaggaagattgtggtgaagaactcgggaaaatcatttctgggattattcggaaaaagagctcaatcttataatttttcatgtaatgataaactcatcagctataaattattattgcattgccagaaagaatgtatcaaagaattacaagtttgtatgtgtgtatctgcagtttttgcttgtcattttcatttcaatgtttttctaaaaagtactcttaaaagttttctactttctatgtgatgttctgtggtggatcctgatgtgctctattccaagcctcatcctcagcaactgcctttctccatctgtttttgaatatatccaattcagcaaatgagagctttctcacctgtccaacaatgaatttgttactatggttgctaccccaaattcgaaaaacaggtaattactttcattggcagaataacttcataaaggcttacctcatatcgaatatcatgctgttctggagatggtgcttttgtttttgcttccacctgaaaactcgaagaatttacgagctcagcttgtagacagaacaaggatttgataaagctaatgtttcggttttcttaaagactttaactaaccttgtgtggtgctgctgcgtcccctagtgtagggagaccataatgaatcaagtactcagaatctataactcctacctttttggttcgatcaccctgtcaaaaaacgtgcgttttggttggaggaaatgaaataaaatgaaacgaaaaaagaatcaaatttcgctagaatagctatattcaatacaagctgttaaattttattcatattctcattcttattcatatatttttattatcgactagagagtgatagaccgagaaaaagtaatgaatgaaattcttgcctgtgcgcagttaccaagctcaaagtccattccccatccataaatcaagtcattctttcaaatcataacaagtaaaattaaaaattagtaactaaactcattcaaaacttaagaacattttaacagtttaaacatacctgaattaaatgccaaacacaacgccaagaggcaattgtgaagacaggagccatcatctctacccacctatcataaaatcatatattttaattaaactattgtaattaaaattcagaaaaagaaaaaaaaaaaaattcataattttgtatttaaaaaaattaccctgtacatggaggctttgtactattttcgtcacacttccattgtccaattgtttatacacttttctgtaaaaacataatatcaaaaatacataatttactatttaatctgacacacattttttttttttttgttcttttttttttataaaaatttaact

SEQ ID NO: 186086 - DNA, 3011 bp, Cannabis indica
ttttcattttttgtttcttgttgtgtttgtttcttcagatacctccttatttggatggggacttggggttgggataatgtacatgatgtcagctggcaaaggcgagttcagtaaactaaatacagcaatgagtgagacggcaaaggttgtcgaagagttaaaaacagagatttataaaaggaaagtttctccaattcttgatgttacatgtaatgcatgtgaggtcatttcaaaccacaatgattttcacgcagaccttaacaagtcaaggagaaatgaacaacttggttctagtaacatcaacaacttcagtcctgtgataattgatggtgaatgtggaagtagtgctcttagagaagagcctgggcaagaggtgcaggaaatggatcaactggaaaaggagcttgaatctgaactacaaaaactgccatggtgcactatagaagcttctgacatagagtgttcagtagatttggtcaaggtgagcttttgggtacccttctatgctcaatttcttttaccttcattgattacataatacattttaaagctttttcttcaacattactagtgcaatgctgtcatcttcaccaacaatttaaactagccatgtaacttaaatgagctattaatgttgtgtgcttctatgtggattcttgacacgtggatttttttaattttatttttcttgttgtgatctgatagaaactacagttttcagaatgaagcctttatctttcacaacataaataaataatgataaataaaataacccctttagtttttaggaaaatgtgaatgtggtgaacagagcaggagtagcattaatagcttaccaatgaaatgaaaagaaatggcttatgcttttgttaattcatgtctttcagacatttgtgtttccaacttagaacatcatgtcattttgatgttagaaattttgtacagaccgaagtttcagctcaacggttccctgctgaacaagagagacaagattatggaattctgccagtagagcttgatcaaaaactttgtcatttgctcattgaacgacaggaaaaccaaatagaggagctggaatctgaattgcatgtggcccaaagcaaacttcatgagaaagaggctgagctccaaacactgaaggactgtgttaagcgccttacacagttctctatttcatctttctcaggcaggacttttctcagtcattaaaaggctctgttgtgttttttatttttgggtgctataaatattatatatatatatatatatattaattgctgctgctatggaacttaatctgacataaagacttctttattaccttttttttttctcttcttcccagatgatgaaaccgaggtagaagttgaacaagagcaggcccttgattggaattacaagaaggttggatctgagttaaaagaacctggagttagaatgaaaagacctcttgattcaaatatcatgaaatatgacgttatttcataagtgggcacaaaggtaatcacaaattctattctattgagaaataatagattccaggcatattctattgtctggtgtgggtccatttagagtttcaagtctgtgcagcaatgttaggccaacaacaaaaaaaaaatgaaaaagaaagggtcttgaagtctcatatttcttcttgcattctgcaccagcaatattatattacagtttacggattactttatttaatggcctagtgtctagagctaaaaccctgttaacaaagtgatcctaaattgacttggcaatgtggcccttgcccggatcttggtttaatataattatgccagaaaggcagaaaggaaggctgaaatctaagttgacttttttgtttccttgttgggtcatagaatacagctcagtagcctagcccacttaaacactatcaaataactaaatattattactcagaaactatctatctgtttggatttgaattttagcagggtaagtgttcagtaataaattcatatagtgctctggtggttgaatgtgcccttggagttgggacagatgagacttgagagggaaaggtggtgcctaccaagtgggtcaggggttttctttctttcccaaatctataaaaatggtggggatgatgaccccactgacccagataaatgatcttttgctggaaattataaacctgtaattgttctttttttgttgtattatattgatagaagaagcacaaaaactctttttggaatagtgcagtatcgccataatctgatatgataaagatggcacatacatatgtaatgtttttggcaaaccccaatcatcaatgtaaattatggagctatatttgttggggaaattccgcaaaggatttggtttgaattttcgtaatatcttatataggtttaggttctatatacataaagttatttagagacaaaataaaaaatgtagatgaagatgatgaggctgacgaagtagtccaaatgtataggaaaaactactgtaaagtaaggtctaggaagttagtacctagtagtgatttgactagtgtgacccttcaattatgaggtcggcaatccaccaaagtaccaagtttttatttatggaattgatacattaaaacctccaaatttctctattttatattatagaataataatggtggttttaggcagaagctcttttaaaaatttgttggcatcaaatttaatgacagttaaccatagtcactttttttttgctcgatttataactgcacacttaaattaccaaatttatactcttttactattattattaatttaatgatatttataagtacacctgcaaacagttgcaacaaactaccattcaaacataaaagcacactagttttttttttttttttattttttccttaagtaaaattaatgtttgaaatgagttcaggcgtcgttggtaagcttctattttacttataattaaagtatgagctaaatacaagttttgtactaatttttgtatttaggataagtattatatataag

SEQ ID NO: 186087 - DNA, 5480 bp, Cannabis indica
tttgtcacctagtttcatccaataagttttagcacgtgatgctcaatacttcttatctttatacataagcacatgaagctctttctctttttattgataaagaggccaagagacattatcaaaatcagtatctaaacacgccaattcatctttctttttcatttttatagcaccacactttcgcttatacacatccctattctaacacttaagagcagaaatgacctggcaaatattgtcttgaacaccaaccaatatgtgaccactaccagagtttcaagtaccacccactagttcccgacaatccaactcatccacccatgccatttcaaaatgaaaacgtgacttagccttaagtaatcaacgaccctcattagcttgcaaaatacaagttaataaaggacaatgatagaaccccaaagattcaagtgagtaataaaagattttgaaaacatactttgccaattcgaattacacaccatgcggtccagacgctcttgtagcaaagagccatacgaatgcttattacaccatgtaaagcgggcaccctcaaatcccaagtcaacaagaccagttttagaaagagctcgccgaaaattgtcaatacacctttgagctcgagtcggcccaccactcttctcatattaatgaagaatttcattcaagctcccacccccaaccaaggtcccgagaacccatctacaagccgctccatcaaagaccaaaattgaggacgtagactcacatccgactgcccatagaacttcgtaaatccccaccacaatacattatgagatcgcaccaacacatcaatatggctacaagagtagcctttttaaataacctccacactattagcccaaaataaacatagaccaccactaccactaatcttctcaataaccaatttgccaacaaaacccaactaaacacgcatgagttctacaaccgaatgagaaaccaagatttctgacagaaatacgagagcaggagagtgttccttgataagggaatttaaaacttagaacatccggtcattccccaaaccttgaacgttccacgccagacaattcataatgcttagtgtccttgaagatcaaggtccaccgtactagaaccacccatgtccactttcccaacccatcaagtaaatgaagagaagatgcctcaccaatttgcacttcatggcctagcttcgaagctagatccgtcgataagattgaaagagaagcttcatcgccaaccgaaatcggtaaaaactccgaaacataaacaaaactggaactcacctctaaaacattgggaaccactagtagagaaatcgagtgatccttagtcttacgcttcactatacgaatattatgttgcacaacaagagcaccatccttacaacctgacaaagaccatttaggacgtccccgtcatcctttagaagaagagcctaataacatatcacctgagaaagaaacaggcaagaatcgttgtttgatactagagatatgcgagtccgtcataaaagcctgaatatgagtgccaaaaatcaaacctagttgcgacaatgaagaaaaacaccttcaatcacgtgatcgagattctcatgctagaaaaatctattttgattttgatttaaacattttctcttaccttttttcctttttttgttcttaatatctcttaccttttattttcactctaccaaacatttccatttggtttggtggtcctctatataatatctcttaccttttactattttcactctaccaaacatttctatatagtttggtggtcctctatataatagacctattaattagcaaaataaagaatacaaaaaaaaccgctgttattttttcatccttaaaattcgttaatattacaactaaactagattaagtaaatccggcccggtggcagaaaaatatagtataataataataaataataacattattattatcattagaccttagaataaatacattattattagaattgcatttaacaaaattaccattattggacattgttacacgccataccataaatgcctttttattctggatagcttacaataccaaaatagataaagaacaaaaacaaaaagaaggaagaaatacattgtagagctaagttattaccacactctacaatgttggaggaatccatatatagccgtgggtttgtacataacccactttcgcctgcagctcatctgctgcctcggggcctcgacttcccggtttgtatgggagcggcttgagcttaccgtcatcgattttatgcagaagaggagtgaagatcttccatgcagcctgatcatgtcaaaaccatgaaaacagttataaactaagaaactgacaatggcttttcacaatacaattcaactgaaaaataatgttgtggatggtgattaccttcaactcgtctctgcgaacgaaatgctgctgatcgcctcttattctgttgaaagaaaatcagtgttgtcaattagttaagagtcgagtattaagactagttcatgaaatttgcctaaggcaagagtagcttaggccaataacatacgtgtcgagtataagacgttcatatgcttctgggattttcgtatcttgataacgttgcccatacgataagtcaagttcactttgaactgttcgcatctccagtccaggctgcttaacctgcataagagatcaagaagattagaggacatgaaatgaataacactgttagacaaacaatgaaccaataacaactattactatttaatcattatttttactcttcaactaaaaaaactaaactagaataacaaacaaagaagcagggtatctcaaattttatatttttttaatcgaagaacatagcaaaagagaagaaattggtcataaacatttaaaatattctggacttgtgtttaaagaacaaaacacagagcaagcatttgaattgtagttctaaaaatttgatactaatagaatatgcttaccgtaagcttcatgtacatggcttctgaaggttgaaggcgtataacaaactcatttctcccttgctttttacctaaacagtgagaaatgattcaattaacaaggttgataaatgttttagatagctaaggagatataaggacctgaagagccaagaagcaataaaagattaaggaaattctttgatttgatgtcttatttaagagttcactgatttctgtgactaaaacaaacaaagcctcaaacataaaaactagtgagaattttttcacaagtatcttgccatacatttgaatatatcaccagggacatccttgaactgaactcgaatttctgcttttcttgaatttaatgctttccctgcctttactataaatgggacacctgtgggaggaaaaaaaaaacgaggccatcgatagacaagttaataaaagcttggaagtaagatggcgccactgtggcattgttgcaattaaaaaaaacaaaacaccaccgcatagcccatcaaaatttattctcagcatatgaaagttaaatctatccaaatgagaggtcctagattagttacgttcaagtgattgaaaagttggcataataccttcccatctttcattatgaatgcgcagaaccacagtcgcaaaagttggagtatttgagtcatcgggaactgttggatcatctttgtacccatcgtattgtccaagaacgacttcctcatccttaattggatcgattgattgaagaacctgagtttgttccacattaattagcaagtctaataagatgaaatctactgaatgcagagcaaatagagctggatgaacttgtatatatttccaataacagcactgcttttgttgcttccaactcattttttaattttactttattaatagttgttctttcattctcattcaaaaagtttatgatatcacaaatttaaagaagaaaagaaaatgatttgtaattgtaactttgtaaacattttataggtagaataaatatgtcagcaacaagtttattactacatagtgaaagatagatacaaaccttcactttctcatctcgaatgttctcaggattgagagaaatgggcttctccatggcaaccagacagagaacctacaagtattgaggggagaaagaaagaggacaaaatcatggtcataaatcataaaaatgattggataaaatgaatgatgtacagtatagatggtatattagaataagccttagcttaaaataaacatatacctgcaacaggtgattttgaataatatcgcggataattctgccacagatataagttattagttgatataagtaagcctcttgctcaaatttcattgcagatacaaaacaaggtaagctaacaaaattgaatagcagaacctaaagtacatataatagacatggttgatcaccatcatctagtaatattcatacccgtattgatcaaaataaccaccacgaccatcagttccgaaatcctccctgaacacgatctgaaaaaaaatttaaaaaaattcattaattttcaatggctgaaatttccatatgtacattagctaaccacagagagcacataaatgatttgaaatgcactaaagggagttttgaccccagaatcaacagacaacaatgaggcacttttgcatttgcaaccaacacaaatatacgattcaaacatgataaaacaaaagtgagacacacctgtacgttgtcaatgttatcacggttccaaaggggcaaaaagaaacggtttgcaaaacgaaggaccaactgcataacaacataagaaaagaaaatgagcagaattcaaagtgaaaaacagctaacatgagcatgaaatgattgtgaagatgtattaccaaattttgcactaactcctttcccaaataatgatcaatacgatacaattgagattcctcaaacaactctccaatttgagaactgagttcctcggcagatgccaaatccctgccaaatggcttctcaacaacaactcgtgtccatccaccaagatcagctgtaaaaggactacattaagcaccttgtgaaggttgatattggttttggattgcctaaatctacaaatctatgattggcctaagcgcctatattttatttatatcattaattcagtagtgaacagaaatagttcacattcatatccatatgtaacctatggataataagttatgaagcattaactactatttagcatttcatgaatgctgcaacatataagatctcccagccaggacatccagataataaacttttttgcttaactaacactacacaaacatatgacgtatcatttgtcaggctgcaacattcagaatttgtttaatattattcatcttatacttctctactagaaacaattttatgcagcatacagcataaataaaatgtactcttgctactgggcataaacatcattaatatatccatttgttatctgcagcattaagcaaaaaaaaaaaa

SEQ ID NO: 186088 - DNA, 910 bp, Cannabis indica
aaatataaatattttacaaaaagtgatgtcttatgttcctttaaaaaaattactacgtgcgctatgttattatagttttctttttcttaaggggatatgctattctacttgaattgaaatagtactaattaataatattgtaaatttattacatgtgtataagtaaatgtatgtgtgatttttccttcataaaaaggccaattaattttaacatgtcattggcaaattaaaatattagcattaatacataggatacttaattttgtgaaaaattgtttttttttttctttttttgacaagtgaatataaatacagtatttatacaagttttgatagtgagatggaatttgtttaaattagttagtgtggttaggtaaagtattaggtcatcgttttccttttaacctacaccaataatcttacaattatacataatatatatctttattacatgaaaagctgaccacgtcgtaggctgatgatctcaaactgtacttaatttcaacctcactataacggagttatttggaatgaaatcaatgagaatttattagatttgtcttgttatgaaaaaaatggcattaaatatctttccagtcatgattttataatccaaactggtggtgtacactgcacataacactactggtctataattggattctaaaataaacatattttatattacaatcccaagccaaaatgagccaccagaaccagatggtggaaattaagtcaatattttgagaatggcttttttggtgctatgctatctatttaatatttaccaattcataaatgaatatgaatttgaacttaaccatgataattatttatgaaagagaaaaaataaaaagaaatgctgagaaataaaggtttcatttaattataaagttaaaaaaaaaaaaaa

SEQ ID NO: 186089 - DNA, 7366 bp, Cannabis indica
tgtatgctatgcatttcattttttggaaaaacatcttaagtagactgtgattatgatttccaacagtttttgagcttttgtagaggctttgtgatatttcctaatatacattttatattgcttttgttccactaaatttttgtagttaatttctgtttttggttaaaaaaaatgcagattcatggaagagaatggccatgcctccagcaatagtcgtgcttctcataacattggacgactgggaactgtaattcgggtagcttttctagcttgtgttaatcccttcctatcatttgggatggaattcagtgaggatatgtgaatttgagtggatagttaatggtatggaatttggtttactgaagtgttatttttttgggggtttgtttttctccaggagaatgatgatttttttgaattgatatcttcaacatatttatccgaatcacgttatgctccctctgtccaggcagcctctgcaaggcttcttctcagctgttcagtgacatggattgtaagagttttcccctccttaattaaatttcattgggtcattattatttgaaagccttactcatgtaatgtggcacagcatcctcacgtgtttgaagacgctgtaatggactccattaaagatagagtgatggatgacgctgtcaacttcttgggggaagatcacagttcaaagcatgatcttgtgagaaaggcctcagattttgaaatgtcgaagacctattctacaggactccttgcttattttctatcagtgtaagaataataggctaatgatattttgttttcagctctcatcagttttttttatagttttgtagttcatatatatgatgttcaatttaatttcagcggtggcccaattgtggaagatgttttgacatctaaactatctgccaagcttatgcgttaccttcgggttcgagtccttggggagataagtattagtcagaaagattctggtcacttaactgaaagtaagaatgggtcttgtgctatctgcacaagaggaagagatgaaactcggagtaaggctaggcaggtttcagaaactactcatcttgacgattcaaggattattgatgacaagtctttagatgaccaaagtggagagagggatcaggaaagaagcatatgtggtcaagaacctggagaagctgatggaagagaactaatgaatgatggtgatgacagatggcatactcatgatgtgcgtgatgtgaagaccaagtttgttgattttgatgaaaatgcgaaagatgattcctctaggcgtaaagttagtcgtggatcagtaaaatctagagggaagggaagatctacagagggctctgttgacaatgaacaggtagtgacctcaccaggatcaggtagccgagtgggactaggacgaagtacaagagaaaagagttcatcaaaaacttcagatgttaaaaaagtgtcagatgctaagaagtttctgggaaaaaatacttgtgatattttactgttggaaagaggagataatgatgagtgcttccaaggatgcagagttggagctacagacttttctgatttggtgagaaaagctgttagatctgctgaagctgaagctagagcagccaatgcacctgaagaagctgttagagcagctggggatgctgctgctgaagttgtcaaaagtgcagctttagaggtattgcagagtctatcttacttctctttgacttaaacttgcgtggttctttacttgctgtttgctactttttatatgcaggaattcaaaataacaaataatgaagaagctgcagttttggctgcctccaaggcagcatccactgtcattgatgctgccaatgtaactgaagttaggtaggtgactttgtttttgtctttattgtaaatgcagttgagttaccatttcttaacatcccattggctggtggcaggagctccagaagtacggaggcagattcaatgaactcaaatgtcacagaaccagaaacgaatgtggaggttgaagaatattttatcccagatgttgaatcccttgctaagttaagagaaaaatactgcattcagtgccttgaaagtcttggggaatatgttgaagttcttgggcctgtactacacgaaaaaggggtagatgtttgtctagcattattacaaaggaatttgaaacatacaaagccattggaggttgcaatgcttttgcctgacataatgaagctcatatgtgccttggctgctcatcgaaaatttgcagcactatttgtggatcgcggtggtatgcagaaactacttgctgtccccagagttgctcaaaccttctttggtctttcctcttgcctgttcactattggttcactccaggtaatggaacttagtgaatagtttttacaggtgtacacatatatttccattgcttagctcatcttgctgctgctgcaattgattcctttctatgcaggggattatggaacgtgtctgtgctcttccttcagatgttgtgcaccagttggttgagttagctcttcagcttcttgagtgtccgcaggatcaagcgaggaagaatgcagctgtattcttttctgctgcatttgttttcagagctgttcttgatgcttttgattctcaggatggcttacagagattactctctcttttaaatgatgccgcatctgtaaggtcaggagtaaattctagtgcaggatcactccgtgatcggtcacctgcagaagttctgacatcatcagagaagcaaatagcttatcatacctgtgtagctctgcggcaatattttagggctcatcttcttttacttgtggattccattcgtccaaataaaagcacccgaagtgcagctaggagtattcctagtgtcagggcagcctacaagccacttgacatcagtaatgaggctatggatgctgtatttgtgcagcttcagaaggaccgtaagttgggtcctgcatttgttagaactcgatggccttcagttgagaagtttttagcattgaatggtcatattactatgctggaattatgtcaggtataattcttaggttccacttttgctgccttttaaagtggcagacctgtcttttgatttttctgccttatctagtcattcatattgagtttttcttctgcaggctccacctgttgagcgttacctgcatgatttacttcaatacgcattgggtgtacttcatattgttacactggtacctagcagccgcaagatgattgtaaatgccactttgagcaacaatcgtgtggcggtagcagtaatcttggatgcagctagtgttgccagcagctatgtagtcccagaggtaaggatgttttctgcatcatttttcactgatgtttggtccaacttgagcgttttcagttattctaatattttatttgcaactttgcagatcattcagcctgcactaaatgtgttggttaatcttgtttgccctcctccttcactcagcaataaacctcctttacctgctcatggccaacagtctgttgctgcacaaataaatggccctggtgtggagaatagagatagaaacatagagcgaagtgtctcagatcgagctatgaatgtgtccagccataatgatcgtggtggagaatccactagtatcgatcgaggcagtgcagcagcactcagtacacaatccaacagtagcaatgcacaggctccaccctccacaccaacttcagggttggttggagatcgtagaatatctttaggtgttggagctggttgtgctggtcttgctgcacaattagaacagggatatcgtcaggcgcgagaggctgttcgtgccaataatggtataaaagttctgctgcatcttcttcaaccgcgtgtttattcacctcctgctgctcttgattgtctccgtgcacttgcttgccgagttctacttggtttagcaagagatgatgctattgcacacatattgacaaagcttcaggtttgataaaattttaatttatatattggtgaactggacgttgaagattcatagctaggaaaaatatgtagcttaaagatcaaaaaaaatctgttagttcgtttacttcaatactggtgcagagtcttacatcaatcccaccctatgcaaacacaccttctagagggattaatttgcttctggttaagcactctataggctcataaataacaaggtctgaagagaatattaataagctgcgactgcgagttgtactttagtggaagatacttgcagtatcaatacaagtttatactgaattggggagaaaattaatgattttgattttggttttgatgaaactttgaaagtagaattttcatgataactatggattttgatgataggctttattgctaactaggtttgttagaacttagatgtaagaaattactttaatctgtttgctaatattgatacatcacttttatcacgttcagagctttttgtttttttagtgatatattatgttgtcaaatattacctcttttttttttccttcgtaaaagaaaaactaggttatttgtgtaactgatcaagggtgttatcaaacataatggtgtttgtaggttgggaaaaagctttcggagcttattcgagattcaagcactcaaacacttggaactgatcaagggaggtggcaaggtgaactttctcaggcagcaattgagttaatcggggtaggcagatgttttctttaattatttgaggttgcttatggatattcttattttgttgacttttgtccttctctaatgttaagtcattttattgatggttaacttcataatgtggcatctatttgtagattgtaacaaactcagggcgtgctagtacgttggctgctactgatgctgcaacccctacgctgaggcgcatagaaagagcagctatagccgctgccaccccaataacatatcattcaaggtgcttagttttcactgtagtttcaaagtagtaaattatctaactgatttttcttacgttggagtttccctttctgatgctgacttggcttttctgtgctcttcttaatttcagggaacttttactcctaattcacgaacatttacaggcatctggtctgggttcaactgcttcaacactgcttaaagaggcccagttgacacctttgccatctttggctgctccttcctctctagcacaccaggcttcctcacaagagggctcctctatacaatttcagtggccctctggtcgtacgccttgtggatttctcaccaacaaatcaaagcttattgcgttggatgaggatgcaagtttaaagtgtagccccagcttcaattttccgaagaagaaacaattacttttctcaccaagtttaggctcacagactagaagtgatttgtacgcagcatcagttaggaagatgcttagtgcttcgaaacagtatactggtgtatcagaaactccatcagagtccttgttaaaatctaatatggatgcagaatctcaatgtaaaactccaatcctgttgccagcaaagcgtaaattatctgatttaaaggattctgggttcatgtcttctcttggaaaacgtctccacactagtgagcaaggctttaaatcacctacttatccaacaccaaatactggacgtaaaattggtttatcatttgattccatgggtttcctctcacctagttctagcttgagagatcatggacgtccagtagcaagtggatctacatcagaattcgtggatgatactcaattttgcaatacctacatgggtatggtgacaccatcctcccaaattgggcttcacggtgaaattcagaacagtaacacagagcggttgactctagactccctcgttatacagtatttaaagcaccaacatcgtcagtgccctgctcctataacaacactcccaccactctctctcttaaacacccatgtttgtcctgaaccaagacgcagcctggaagctccttctaatgtaacggctcgtcttggtacacgagagtttaaaagtatgtatggtggggttcatgggaatcgcagagatcgtcaatttgtgtacagcagattccggccatggcgaacttgtcgggatgaaactagtgcccctttgacgtgcattacatttctcagtgactcatctcatattgcggtaggaacccattctggagagctcaaaatttttgacacaaatagcagcagcgtattggagagctgcgcaagccaccagtttcctttgactactgtacagtcctatctatcaggggagacccaactggtcctttcttctagttctcaggaggtgaggttgtgggatgcatctgctattggtggagggcccacaaattcatttgaagggtgcaaggctgcaagatttagcaactctgtagacatttttgcagctttgccagcagagccaggtcgaagagacattctcctatatgatatccagacttgccagttggtactgaaactgtcggacacattagccaattcactgggtcggtctcatttctattcaaatgtacacttcaatcccactgacactatgttgttatggaatggagtactgtgggacaggcggataaccaatcctgttcatcactttgatcagtttacggattatggtgggggcggctttcatcctgctgggaatgaggtatgggaataatgcaatactacctgtactaaattttggaagcccatataaaaaaaataaattaatgtgacctatagcagagggataatggtttacatcctagtttattatgttgttttgggtgtccggcttgacaatttcacttgtttcaaaatatgtttcttatttgtaagatgagtttaatctttgtcttgcaagtgctttgtctgttgatacttgatactaagactgacattcatctttttctattttctgaataggtcattatcaactctgaggtttgggatcttagaaagtatagactcctccgtagtgttccttcactcgaccaaacatcaattacgtttaacgcacgtggtgatgtaatctatgcaattctgaggagaaatcttgaggatgtaatgtcatcgttcaacacacgtcggatgaagcatcctctgttttgtgctttcaggacagtggacgcagttaactactctgagattgctacaatccctgtggatcgttgtgtcctcgactttgctgcggagcctactgattcttttcgtgggttgattacaatggatgatcaggatgagatgttggctgcagccagggtgtatgaggtcggtcgtcgaagccaactgatgatgattctgatccggatgatgctgagagtgaagaggaagcgaatgacgacgatgaagatgatgatggtgacattgatccc

SEQ ID NO: 186090 - DNA, 2706 bp, Cannabis indica
tctctctctctctcttttaatgtttatgctggttagtttttgcatttccttttttgataacgtatatggataacctgttaacgtctttgcataaatatcttattttgcagatttaaatggaattcttttttttacgaaattctgtgtgctaaaaacttttgaattttcatcataatgtctcttgtttcctgattcaaaaaatgggcgatacaatttaattttgcactttagtgatgtacattgatattcaagatggatgtacaacatttgttctgtttgttgtttttaagagtttatgatgtaggatggcgcaagcctaggttagatcagcattcataactgtagctgacgttttttcattacccgtttgcctacattcattggttgcctaatgcctagaattaatttacaattcttttatttatctattttaatttcggcaactattataagtatctcattttagaattatagatagacatttttttttccgaaacaggtaataagctgattatttttctactgttaaagaggctttcccctgaaccagttgaatttctatttttgttatcttttaaatactgtattttacttttgcttcattcctctaataggaacaacttgatggggctggcattgaactaccaagcatttttaagtggattgaaagtcaggctcctaataattgcagcactgaggcttggagaagacgaatacattggacaggatctcaggcgactggtgatttcaccgagtcaaaagctcacgctgaggagttcttgcaaacccacagacctgtaagaaggtatctttctatccttcaggattgtggatcaacaaggtaccaaattgattaacataaacgtaatttctatgctggttcagacgacatggtaaactattggaggagggtgctagtggatttttgcaaaagaaactagctgcagatggaaataaggaaactgtaacagaaaattcagaagtcgattggtgttctgtgaacaaattattttcagatggggtctcagaagattgtggttcatttggcagtaagcattgggcttctgtttacttggccagtacgccgcagcaggctgcagaaatgggtctcaaatttcctggggtcgacgaggttacatatttatttttatatttattcttgctgaggctatttataagctggctactaatctaatagaaagaaagttctaactttatggtgtgtatctgcatattgaaattctgattaaaaattatacatacagtttttttgcttttatttttctttcaagtttgttctcgcctatctctttttctgttgttaacttgactggtatatgtttatgctaacttagtttttctttttctttttaatgtgttttctaggtggaggaaattgatgacattgatggcaattcaactgatccatttgttgctgctgctgttgcaaatgaaaaagatcttgctctttctgaagaacaaaagaaaaattttaggaaggtatgcccttgtatttttttccccctagttggaattttcgatgtttcgacagagtttaggttggatagaaggaacctccctacattttggtgtattttgagtgatctagtttattgttgatgttttttgaggggattgattagaaaagtggtgtttatatttcatgttttaactttttgtcatgctatatggtgagaatttattgagagctcgtttggtacgccgtattgtattgtattatattgtgttgtatagtattatgttggattgtattgtattgcattaatattatttaatacatactatgtttggtattgacttgtattcatagcttgtatagaactatattatctttaccataaactcgacctcaactccgacccccatctggggtttaggtttgcatctgtgtccagggttgggactgggtccggcgttcccaaccctggactctttgtaaatattataatacaacctaatatggatcatttgttatatattaaataattcaattcatattatatttaagtttatggtcgtaataattaatacaatacaatgttttattcaaatgtagttacttgttatttaatacaatatgacctttatacggcctactaaacgagccctgagtgtgttttttaatgtaagtttttgttcttgttatttgtaagtctatctactgtataacaagttagtaaacgtattttcttttcttccaagattcaattgcttgtgtttcttttcacattgttgttagtagaatctggtaaaatcctgctgtggaacctatattttataataaagcaaaacaatatcaatcaccattcactttaaatgtaggaatgagctatatatttaagttgttaaaactattttaaatgtttggggacaggttaaagaagaagatgatgcagatattgatcggaagcttcaaaatcatttgaaacggaggagatatcaaaagagatctaaacaggtttttccttcaatttcttatttgaaaacatctgggaattgtggccataagttaaagtgtagagtgctcttccaattcctttcatcatttactgttgtatctctttttttcttggaaagagtcatctactgcagtatcaaagagcaagcaggtttcatggtgctgcacttactactgatgaagcaggggacattttatttttatcttcttgggattagtgatccaat

SEQ ID NO: 186091 - DNA, 1053 bp, Cannabis indica
atgacttattaaatttcagggtcagtcgtcaattataaaaaatagatgacactttaaatttgttaataatttaatagtttagaaagtcttatcactaaaaatttaacttagaggattaattacaaacaaagtaataattgaagtagtttagcagaaaaaaaaactttctctaaacatattttaattctttcaaaatactaaaaaaaagtatttataatagtctttttataatatagattctccaaataagaaaataaaaaaaagggaaaaatgagaagggtatttatgtcatttcatttcatacataggtcctttctttgtttctcctcttggatttgctatctctgatttctgaacacaaagctcacttccaaacatcattaacctaaaaacagcaactttgcaggtttcacttaaatcaaaatctaaatggtcaaacctcaaaatctcaaggtcagttgcttctcttaacaacccttgattttttccctcttttttttttaatgggatattacccaaatgaatgaatctaaatcagtgattttgtttgttgttgtgataattagattgttcatatgtgttgtttattcatttttagtattctgttctttgttaattactattcacaatcaagatttttgtataccctttttataagttggtgattggattgctcattctgaatgttttgttatgaaggtgagtttgaatgatcatgatttatagatacccttttgaaagttagttaattgttctgagatttagatttgttcatatatattcccattatgaatggtttgtgatgaacttggcttgtttaattgtttaaattattgttgggtttgtatgaataaaaacaattttatcatttctaaattcccttttcaaagttggtaattgttctgagatttagattgttcatattgtgtttgtataaatgcttagttgaagttggagttgatagatggtgttattgaatcaatccataaacatttttatgaacttttgtttgatttgttttcgatttttcgtctttgtgtaacagtttttcgg

SEQ ID NO: 186092 - DNA, 4120 bp, Cannabis indica
tccccgtctaaacggggaacgggacggagacggggatcaaattttatccccgaatgttaaacgggacagggacggggatgacactccccgccccgacggggacccgtttaatttattaattatttttgttttaatattttatattttataaatgcgtttgtattttttttagtatattaatattatttttacaatttttgaagttgtacttttgtataataattactatattgaatagtaaataatatgtactattttatcttttatgtaatttaataattttatacatttaattttttaaaataaattttatttttacaataggagatttcccgccccatccccgaaggagagtaagcaggatgggaacagggagagcactccccgctaatttcccgccccttgtgcatccctacaaatgacccattaaaagttagaatcatcagttaccaaattctatttacccacactaaattccataaacaatcaaaaaaaaataaacaacttgaaaccctcaaaccctcattaattttgtcaagaaaagttcacctcacgattcaacatggttgattatgactcgcaaagaaacaactcgaatttgtaagagcggagaggcaaagttaatgaaaaaaaaaaaaatgatacctaataatactttagaaaagttgaaggagcattcggtgatggtgaattggtaatgagaacacttggtggaagtgtacagagaaatgagaatgacggtgagagaagatattgacattcaattgtgagaggcaggtgaagtagaagagtttggattgtatgtgtgggaatttgtagagaataaaaataaatagatgaatgaaaatgaatttaatggagtaatgaaaaatataataaaaacccttacatgtaagataagatataaaattattaacactaaaatctaattcttatctcaactaataagcttaatgaatatgaattacatttagttaatgaccttttctttttaaattttaagttacaattagtgctgacataaatatattttagcttcaaaaacagagaaaatgcatccacttgcggcatattattgcgtttttgaattcattatatgaaacgtacactaccaaaacaacctcaacacaagaaaagttcagacatcgtttgattggtaaaggcataataaaacgccccccaataacccaaagaaaaaagctattataaaccagaagacgatgatggccaataaattggtaaaagttacaaagggttcgtttgatcagatgcgatgtgagagctgacatatcaaatttctatctcgaaaggccgacatttacagcttttgcttcaacaacaattacctgtcctaaagtaaatttttgcattcttttctctacttgggtgctccagcagcaccaccaccaaatttgctcatcatcttggagataatgggtgccaccttgggattagattgatgctttgcaagattagcagggttcttcatcactgccaattaccagtgagattcaatcagtcacaatgaaaatttctgaagactcacaaatacacacaaaattgaataagagagtgtaccgtcttgaagagcagccatgacttctgggtcgctaaaggccgccatcagttccggatcctatccaagttttgacaacaaaaacaaatcaaacaataatgaaaaacaatcatgaaatgtatatttaaaagacgagaacacagcaatggcagatgcttgactttagcaaaaagaaaaataataataataacagctttactaatactcacattcaaaattttgctgaagtcaacatttccaggcacccctccagctccgggcatacctccagctccgggcatacctccggctccgggcactcctccggctccgggcatgcctccggctccgggcatgcctccggctccgggcattcctccggctccaggcatacctccagcctcaggcatgcctccagctccaggcatgcctccagctccaggcattcctccgaatccgggcatgcctccaaacccaggcatgcctccgaatccgggcataccaccaaatccgggcatacctccagggaatccaggcataccacctggaaaaccaccaggcatgccaccaggtcttctactagaagatgattcttcttgcttcttggccttctcatatgcagccttcagtatgtacacaaaaatttcagacacataattaccagatagaataaaaacttgtttttaattaaaaaagtacataactacttacctgagcttcagcacggcgacgtcgcctctcacgttcaattttttttctcttccctctctttgtgcagcctttcatatttacggcggtgctcctcaatcttgtgaacatttggctcaacctgtgcaagttccaagaattacaagaaagatgcagagtaaattaaacaaaacacaaaaggcaaagacacaaactaagacttgcagtaaggtaaccacttatgttatcatagtcccacacacccaaaattaattgtcatagtgctacctgttacacctcaactagcaaccagcacgcaacaaacactagctcaacactaagatatattatatattgaaactgaaacataattcattaaacttgagcaccaccggcaagtagatcgagattcataccacattaaacataattcattaaactaagtgtcacaattttttttttcaggctaggctccctgcatatccctacaatatttggggaccaaaaactatagcagtaatttctatgtaggttcccaaagggactcaaaccttaagtaccccacatatgcctgaaatttgaactattactcttgagtatccgtatcacaaaccagtttctcaatgattaaataaaatgccacagcagtagatttggattaataccagactgagggacatgtaaggtagagactggagaatacagcatttagtaagcaaacagtacggttaacctcgatagtaattggtatcaaatttcttttccagaagcttagctttcaaagaaaatacaaattaaagaaaagagactgaaggagttttctttttaaaaaaatgaaattgtgttcacaaatatgaaaaggaaaatcgagtaattctcataaatgggaaaagaaaagtatagttgacataaatatgaaaatgccctgtcatgtgaatgaaatagcaccctacttccagtgacaaagctatgatttatataatatagaaacttgtactatctaggtgggctttagctatataaataacaaaaataagaacactttgaaccagaaccaaactctgaaactgttaaaatgcagagcaagaagggaaccttcttaagaacatcctttatttcttcatcataatctagctttgatgccaaatggagatcctttgctgcctcctcccactgaccaagcattgatcgtgctatgccacgagacttgtagcctttggcggagtcaggattaatctgagaaacataagacaagtttaatgagattttgaataataaaataaattcacatcattttaatcatcagacactggtcaagacccgacagaaataacacccacaccactcacaatgataaaatttccatatgaagatattatactccaaaaagatgataaacagtaagaacatgcttacctccagagcagcactggcatcacgaatagcagcattaggtttcttcatcttgatgtaaacactagctatcaaagtcgcccaacaaatataaaacaacttagcaactagaagaccgaaaccaagatgatcgttacacaaataattcttaatcaacaatatacctctcgttccatacataattgcagataatggattgagcgaaatggcttcagtaagatgctctattgcttcctccaatttccctacatcaaacaacaaaaacaatcaaattccacaatctacacttacactgtaagaatatatttcatcaagtacattattacattcacaatcattagcatagtaaagctaccttcggaaatggcttccattgctttcgccttctccaactgagaggcatcgcgatcttcatcggagacctcaactgactgatttcccatcttaaaaatgcaaaaaaaaaaa

SEQ ID NO: 186093 - DNA, 1900 bp, Cannabis indica
tttttttattgttgattgtaattgattcgaaagtatgacaattctcttggcctcatattgtttcaatagtattcttgtaatcacttgataatgtttgagttttagggattacttggaccaaaggggttgatgagtgccaatccacttgcacaacaagcagcaattttctcgctatcgactttgatgtctatatctcctggagaaacatacatagagtttgaaaaggttaacgcccataattgattacttacccaatattttgatgtttttggtttagtaggcccatgttattatctttaattgtctctgattggaatcttgtgactattccagcacttgaaaagtcttccagacagacagtcacatgatcttctttctgaagatgacgttcgggtaatttttgttttatctctatataatttaaggcaaagaattcatccatcctttttctttttccttgctggtggcaacctcaagtttaattagaatatttttagtgccgagggtggggacaaatattcaacaatattcttatatcagtttactaataattgtgaatttgtgattagtttttttaatcattactaaatgattagtgaaaattgtagattaacgacatgatcttggtttgatgctttctttgagggagcctctttggcattctactttttttttttttttctaaagtaatactagggaaaccaacttttatatgtctatcgtaaggatatcatcctataatattggttcgtttcggcatgagcctaggcatgggctgtctgggtcaaggtttcatggctgttggctccttattaataggcagcttttgcatgttgaatatacataaatttacacagtttaacactttttgatttaaatctaaagaatgaaattaaaacactttgaacattgaaaaaaatattctgatgtatatgacgtatatagcttgttttaatttgtcattagatcaacttgtgtgatattatgtgaaaatgtgtccatttaacctatccttcatgctattaaattctcttattgtctgtgtataaagatgttcatacattactgtgtgggtttctcctcattttccttttgtaccattatatgcatattgcctttttatttttctaaaccatctgttcaccttgtttcagatttttcacactcctgaagggatgctttccaatgaacaaggtgtttatgttgccgaatctgttgctactaagaacatgaagcaagctaagggccgttttcggatgtatgaagatgaagatgatgcagtaatttcttggcccttatattttttcttcattgttttcacaaatacacccccttttttgtgttgcttctcttatttttatcttcttgtaattatctgtcacatttgtatcgattttcatcttaggggaatggtatttccaatcattctgtgaaaagagagcaagctgctgggaagagggagcctgtaaagtcaacaaagaaagctggcatgtatctttacatttttctatcttttaaggaatttgttgttctgaatgccatttatctaacatgtatttatttgttattcttagacaaaggcaagactgcaaaagaggaggcacgtgagttactacttagggaggaagcatcagtacgtgagagtgtgcgaaaaattcaaaaaaaatctctctctgattcttagggctcttggtgaggtggcccttgcgaatccgatattcgcacatagtgaactagcttctctggtttgtttcatgctacatttttcaatcaagttatattggtatctttaacttgtctgaaacttatttgttcttcatgcatcttccatcagttcaagtttgtcaatccattgctaaggtcacctatagtaggtgatgttgcctatgaaacaatgatc

SEQ ID NO: 186094 - DNA, 4253 bp, Cannabis indica
gcttaatttctatatgcatgtaaaaataaattttgagttttatttttgacacgataatctgttattaaaattgggaatttgtaagaattacctatactacaataaaaattattattgaaaggagaaaaaaaaagttaacgaccccacataaggatgtattacagaactcataataataatgctttttaaaaattgttaattattagtttttctgattagtcatatacttaccaatccctaacggccaaaaaagttcaggggacataatttgttacatgtcaaagttcggaaggaaaaattactaattagccttttatcaataattgaatattaccataccaaaaaatgattatcgagtcatataaaaagtgttaaaaatgagaagctgaaagaagaatttgaggtagagtaattgaaaagttggtacgaaaaatcattaaataaaatcagtgtctttggtatcaaaagcaagcaaaacaagctctaaaaccattacttattaggcaaaatatgcccacttgcagattgtagccacagttttaaacagggggtaaagaaagttgtatctcaaatgtatctttttatttttagagcaaaaacgtagtctgagcagatgttgtacacaaaaccaaaatcccaaatctactacaagaacaagccacaaaagaatagtctcttttttgtaattgaaaaaaacattgctcaccttccatttttccccatttgttcaactttcctcgagcttttcagaaactccaagaatttgatcgcttgataagaggcttcatctgcttgtcctcttctaaggagatcatccccaagtgagaaggatcctctaacatcatctttgccaccaaatatccagcaattgaccatgtttggtgtttcctcgcttgtttaccaacatatctaccaagcttcccgtcataatattctggccagccatcctttagtaagcggctctcagcaagctcaatagctctccttgcaatctgtggacgcccggttttgatgcaagcagccgtcagaagccacagcagaactgcactcaaaatgaaaaacagaagatattgcaaaaacgtttttacgagtacaaacatatatgaagctcaactttgaatcatgtttaaaatagagtatacacagttaaagcataagacaaaggggttgcaattaatagagtatacaaagaatattatgaagtaaaaaccttgacttacagtttaaaaatacaaaacaaaacaataacttagaattattctcttaaatgaatggtatagggtatttctgtttgcataattgcttgcagtacagtacgtgtattgtggacattatcccacatggaataaaatagtagagaatttagccatatataagaacatgggctactccactcattgccaattggttttgagatggactcccatgattctcaatatgatatcagagccatatcccttgcgggcaagtgatcctatccgagccattatcgtgagggaaatattgtgtacatcataattcacaattactatcaagataactgaacctaaaatgtatctctcactataaacaggaacggactaatcttcaaaccctctaagagcagtaggatggaataggaattggactttgtgaccagattacgctgccctcaccggttatagagggcactagttggactattacttttcaacacaaagttcgtaacctttttcgtccaaacattaacaaattacgcagctttcagctaaaaatgtaatgagttttgtcttttcatagggtatgcacagttctgatttctacactactaaagaaaagaaaaagctaaagccaacttatgatctatctagggatccacaatattgagataaaatgacatgtcttcacagtgacaactacaagctttatcttataaaattgtaattagaagaaatggaaaattgtagaaagtaaaaagtaaaacctggccaggatccaccattgtggtagctccatctggtattctttggatcacaaccggttacaattcgccactcgtgactttcaattgcaggataagctattttcaaaggcatttcaccaaccaactcttcccagcgagcttcaataagatccatgatagccatggattgctctggagtagcaagagaagatagaatggcaacacagttacctaaacagaaccaacgaaaatccatccttgctggactgacattaccaatgaagtagcctccacgagtcggcataaagtcaaacacccattctgggattgagtcagggatcacattaaacttatttactgctgtgtgtgagtactcctctgtcttgtaacgatatatgtcatttagttgttgaaaatcaagccagaagtaacttctcatgtgatagctaagagcatgcaaacgtttaacaattcgctctatacattcttttccttctgcgtcatgtttaagcaattgcaaagcacatctcaatgccataaagaagagagcttgaatttcaataggataaccataaatgccctgatacaaaagaaaacaactcatttatcacaagtttgaataagatgtgtttcttcatacaacttaaaagataaggatctcaataataaataaaggtgtttccttgaccagagagataaagactacccattacaaagaactttagcccttgtgcgtttggatttaagacaatatgaaaaatgcaaactaaaatggagttattgccgaaaaggaaagactagtgtttggaaaagcaaatgttactttacaatcccacatcatcaaaataaacactcttaaaatacatcagaattgaaaattagaatgagaaactcttaagttaatcaatcaggttaaattcttttgcttaacttcaatcagtttaagttgaaagaacctttccatttcattcattatatacaagatctgtaaaatcatttaccgtaaatttgtccttgcgttaaataaatttaacggaaaatatatattaaaaaaaaagaattagataaaggagacctgcactccattaaaaggcttctaaaaatttcacgaaaaaaacatcacctgcttttctagaaatctcatttataaataaccaagaatgcaagggattacggaacaaagaaatactattggtgatacatccaaaaaaaatatagttatagcctaaaattgtagaaaaacaaaagtgaatagagaagctaataggaaatttcttaattaaagttattaattgatctccttcaaagacaggcttaatgcttaatgcttaatccaaatataagtgtacaaaatggaaacttctgtactcaaatttcattcagctaaatctatgcaaataaactccaacttaaatacattattataactgcgaaatcatcataccaacattttaaataaaaacaatccctccaaagacgatgggtaaaaatggcattccattatgaattcaaataaatgtcattccatagtcggcactgaacaaaataaaaaaggtaaagtttggagctactcaagctactttaagctccatttcgaaaataagaaaaaaaaaatgctactttaagctacataatataaattaagtagctgctaaaatatcatttatgccctgaactcaaataccataacaagtatgattcagatttattgaaaagcaggtgaacaaggaaaagcaagagaagtcttaccattcttctatcaatcatagagcacccatcagcacagagcaaagttgggaaagtatcaaaaccctctgacagacaaagggttaatataagcttcattcccttctgacactcaggtgtttccgccagagtcaaatcccctgttgacttcgtatacgcacgaagcagaataatccaccagaaaccagagtcaacaggagcaactctaccaattgcgctctcaccaaaatctgcaacaatggtatctgttttccggacaggatcgtgaagaactttaaagctagcaggcatagctcctttcccaagcttgaacctgtcaattcttttctcccacccttgaagctgcagcgtcttcaaaagaaagttcttcactatttctggttcaccattcattagaaaagccagagcacttggtacaaaatcacgtacgaaaacctgataataaccaacaaaacttgtaaggacggaggcttttgctaacttcctttttcattatattgtagatgtaaatatcataatgtatgaccatgttactatccttaattgactgtaaaaggaatagcaa

SEQ ID NO: 186095 - DNA, 2736 bp, Cannabis indica
atcataaataagtggtggtctagtaatagattgtagctacaaagtcaaagccaatgagtatggtggataagaaaacaattctaaaatggcaattaataatagctaaatgacttataatacaatatagcaaccactaggcaatcaacaccaagtaacatacatgggtaccactaagacactagtctagtcaattcctaaccggtcaatgagtgatcttactcattcagtagatgcacaaattaccttgggctgagagaacgctaatctcttaatttttgtgaaatgctttgatgaacctccttcaactacgtatgatgccaaggtgaaaggagctccaacaaaccaagcactgcagcctcattatctacctggaaaagtaaggatataatgtgagtatgccaaatgatgtaaagatacatataccataagaagtaacactaaatcttcttactgtctatactgatactattacatattataaaggttctaaagcaagttttccaaaaacagtgctattaaagcagcagccatttatatcacacataaactacttagttttttccatatttacagccttattcacatccataaaactaaaaataataatagaaaaaagaacccaacaagcacaaatcctctcaaacttgcttactaattttcctctctaattcatacatggtacacgaagcaatagataataactgactccttcgatttaggaataattgactctgtgaatatagttaaactaataaacttttctaccgatgaagcaatcaatgaaaattacaagagtcaaacaaactgagccaaacctctttccgcaaaattgttagtgcttctccaacatatggaactgaatcttctggaacgaactctcttacttgatcaacatcctcagctgtgcgtagtggatcgaatatgataggacccttacccttcacaatgtcaaatggtatgttcatcccagaaagaggggttaaaatgtctgagaacaaaataacctgtgacaatatgatagacaatgtcagaactagaagataaccaattagctaaatttaatttgctaatcatagaattgtaacaagatggatgccagaaagacaacttaccccatcaggtttgaaaaccttccaaggctgtaatgaaatttccaccacaagatcaacattctctgatctttcccgaaatgaaggatgcttctcgcagagagtttgataactctgttcaaatatcaaatatccaaaataggttagacgaatgattaaaactcattattggaatcaatgaaacattgcctgctcattctttttaaagacagtataaggacacacactaagttaagagaaccaactaaccacaatgtgtattagtcttatcagcgggtttcttttacacagtaaatggaaaatctttaactagattggtttttagctcaggtgctttcattacttgtacaataatttcttcaaaacaaggttcataagcaaaaaaagaactgagggaagtgaataaagttaataaagacctgccttcatgtacctccctgcttgcctcattagccaaactgggggcctttcaacatcttccccacgaacagcgttaagcaatagtggctctgccacagatgtaactttgggttctgctacagtccctgaatggaggggttagcatgtattagaactctcaaattaataacttcaacagtagttaattacatgcacattacttcatatgaaaaagaccgttgacctctaccttaacaaacgtaacaaaaaacacccagaatagatattgtggctcttgaaatgggaaactaaacaacatgatagtctgagtgagatgaccaccagagaagaatttcaagacgaaaacagaaaaacattatcaattaacttcaaaattgtcaaatgcagctaaccaaaccaatataatagcaattttaaaactcggaatattcattatcaccataaattcccgctgtttgttaccaaatgaatcccaaattataagcaaacaatatttataacaaagacacaattttttaagtaagaaaagaaacactccaatcttcaacatgcaaacttaatcgttggaaccaaataattcgacaaactgaaaaaaacaagggaaatggaaagaagagaaaattacctccgagggtacagttgattcggggcttggaagtgaatctggatcttgtacaggaaggcgaagagagaacagagaaagtgggtatggagttataactgtacaaacaggacatgttggacggagaattgggaatttgaagctttaacatctctcagtcctagtctgagagattttcaaaaagtgaagaggttgaagtagaagaaagagtcgaagaaagaaattatctatggaagaacagaaaacaaaacaaaacaaaacaaaaaaacgatgataataaaaaagataagaaaaatgaatgcaaatctcgtttctggatttcaccaaacccactgattttcgccacctcagcacaatgtatgccacactaggcccactttttgtacaattaaaaataatattttgttttcattccattagattgacttgaccatatcacaacgagaacggttaccgtgaattttctgttacattttttagttaatttttatgttcaaaaacacatattggaatatctttttttcaatttttttttttctacaaaagtgttcgttttgtcttactaacatcatccctcgtaaatat

SEQ ID NO: 186096 - DNA, 2004 bp, Cannabis indica
tttttttcccatattgtccctgtctctctttcttttccctttctattcagaaattttctaggaaaatcaaaatactccgagaaaaataacctcatgagggctcccaagagaccgatccacgcagtttccacatgggtgaggcggcagccccccaaagtgaaggcctttttggctgtgatttcgggtatgactgctctggttttgctccgatttatcgttcacgatcacgataacctctttgttgctgcggaggctgtgcactccattgggatttctgtgcttatctataagcttatgaaggagaagacttgtgctggtataacttttttgaccattcttttgcatgcttttgtttactcgaataggtttccgcttggtgaaaatcgttcgtcaggatttaggggaagtaaacttttggtctttaacgattatgattttaattcggtgactatccctaaaaaaatctttttttttcttgggtgaattgggattcattcgattatatcgagatgaaattttagatttctttctttatcagtaatttattttcactatttttatcaataatttaaaattttaatttttcttatttcagaaatcattagaacaaagaacccttttcttgttagattttttaggtacttttgttttctctgtcctctctatactatttgatttggatattgttaataaaaggcactcctaactttgataattaggatgatatgtatcacacacatcatagtattatttgctgtactgcatttgatgaaagtattcaacttaaattcactaagtatcagaggtgttagagtctcgctgtgtggtgttataggactttgccccatattatatttactaccaagaaagcgagagagagtgagtattcttcaagtgaattcccactctttgttcgttaagttctaaaacttttatcttgttacatggatgtttgtagctatctggtattaataccttcttttccgtatacttctcttggatacttgaatttcagagttcaaggagtattgtgcttaataaataatgatgctaagaaaagtgaccccattgtaacttttgaattgaagatttattgtctgagtttggtaataatttggctttcagcataatagagcttaatgaaataactttacgttagatatctgtttcctatttgtttttatcattgtattgggccatgagattctttttcttgtcttgttttgtggattgcacatatttgatcatttggattggttgtgtatgatatttatcatcaagttcaattttggttttatacctctttatataagtaatggctttagatctcttatttgaaactgcaaaatgacacgtctatcagtaattgactttgtaagagttatatgttgctgcaaatatttgtttcctacaccttacatagtgcacagttgaaagatcttctttgaatcatgtgcagggctatcattgaagtcccaagaactaacagcaatctttttagctgttagattgtactgtagttttgtgatggaatatgatatacacacactacttgatctagcaaccctgggaacgaccctgtgggttattttcatgatccgttttaaattgaaatctagttacatggaggataaagacaactttgcaatttattatgtggtgagtattttcatctcttgtttaaaagatccaccttggttactgcagcactgggatttcgcttagtcttttggaacaacgtgaggttgtttgatgttatatgcttatttgctgtttggatgcaggtggtgccctgtgctgtattagctttgctcattcacccatcaacctctcatcatttgttgaacaggattttctgggctttctgtgtgtatcttgaagctgtttcagtgttgccacagttgcgggtcatgcagaacacaaaggcatgattttactgaaagaaaaagaaaatgtttgatctgaattgtcaaatggaaagaaataattttatattcttttttt

SEQ ID NO: 186097 - DNA, 1238 bp, Cannabis indica
atttcttccatgcaggtagtgcctggtgttgaatcggtgaggtaagagttgtgtaggtcttctattcacctcgtacttagggcatggacgaaatagactttgcgtaaggtaccctcgtatgatgcatgtggccatggtggcaacaagggtcaaattagagtggaggaagagaccgtccaacttcctattgaggctaagccagaggtggactcaaagactaggagatccgatgcaaaatctgagttggagaggtcgctccagtgaggaggaggaggtgtaggacatgttctacctcccctgattgttctttgggccataatgacgcccaggccaatcaactgaatgggcttggtgcgctttcagtactaggactaggttatgtcctagaacatccctcgagttagagatattggatgcgaaaccaactaagacaacgtgggtttcacctgcttctgctctctctctgatgaggccttcggtaagatctttactaatggctttataggggtgttcgttgtgagaatcctcacaagaactatagggcacacaggctgccttcgggcttgttggcatggttggggcaccgcattgatcatggggtagtgttgttgctccatcaatactttctggacatcacagcttactttggatgtgcccaatacagctcatgccaaagagtattaagtatctattggtgatgtttgtcttgtacaaggagctaggttgtctccgcttaacctttacgatattgggtacagttttgagttgaagtctgggtcgaagcagagcagaacccactatttttattttagccagcttggtcaccaatggctaggcaacaccaagggcgaaatcatgtcaaaggttgacaggtacgccaaaaaatactttattgcatatggtcttcgcgaattgtacaccacaaattttagtttgtgctactcttgagatgttccctcccttacagaatcacatcctttctttgtcagctgaacagagaaaccttattcggttggccagtgtggaaaacttcacggtgtatggcttgtaccccctactcttggggttgcaagagtgctagctgcttgtggcctaccctagagatgggcaaggcccaaacttgcatgatgaagaagtacctttgtcccgtcttgtacaaaatctagagaggacagagagagggagagctctccgtaggcaccttgcacatggggctccagtaggtgatgcctcccttc

SEQ ID NO: 186098 - DNA, 2606 bp, Cannabis indica
agagagacattctcaagggaatatgttgtttggtgccaaagtttctcctcccaaacacagtttcatcctttggcgggcaattcattctcatcttcggtttcgtaatcgctctatctctaccggcggtctagcccgcgaaagccactcatttttcgtgttgcaaaaatgttcaaggctagcttaataactgagttgttctatgtagtattggctagtgtggtctatagaaacctttgtacttttgagttgaagacaagactgattaaaaaagcatcaaagctagagtttgtcatgtgaggaaatggaggatttctaatagggatcttataaggcccttgaatttataaagaataggtaataatagggcaagacttgtgagactttgggcttggttttgacaattcattaaacacattttgataacaaaatccacacacatttttgcaactaatcattattattttcactcttcaactttaaaaatatttcatcattcaatttgaagggaattgagcccatacaattcatgaaacattgcacatgcacacaccaccatcgaattccaccatcaaattgggatttcaaatagagaaaagtatagagagaccgatatgattatctaatgaaatatataaaagaaaacaaaaaccaaaaaacaaatggggcctcaaagccacaagtcatcaacttaagagaattccaaaaattcaacatctccaacaaaaacctaaataccttttttccgaaaacactagaatttaagaagatagtaaatacggttttttgttctcaaaaactaagaaaacagtagaagaagtgcattagggagaataatattactgatagaagctttttccttctaataacgaccaattccccaaactctaattactccatcggtgtatccactaaacaaagtgcttccatcagcactccagctcaagcttgtgcagtatataacctgtaattcattcaagatcaaccatataagaaaccccaataaacaaacataacaagaatccaatccgattcgattcaatgacaaagataatccattttcagttcaccaaacatatacacatgacttaatctccttaacaagcaaatgcaccaaatatataaagttaacggcaaaatctttggtggaataaagaaaaccaccattaatgtatgtagcattagtcacaataaacaacaggaaaaaatgcgaacttttcggtacaagactatatctcataaatatgttcataaacctgaaaagtcgtctaaagagttaactctgagattaaaccttaaacaaaataatgtccttaaaaccccaatacaaaagttatgttcttaagcctgaaacatcatctaaagagttagcattacctttatctttatacacaaatgaatcataaaaccattttcatctaacaatcaatgttcaaactcaaataaccaatatatatacacacaatccagataactcaaaaccaacaaaattaagcaaaatcaaaacaaaaatgacattagaattataccttcttcttgttggcagttgcaacatgggtatcatcagtcttttcagcctcagccttaagatcaaccttcaaatcctcaacaatactcttactctccaaatcccagatcttaatactgttctcagtagcagcacaaagccagtacctgttagggctaaagcaaagagcatgaataatagaaccagcatcaagagaatacaatctctttccctcagccaaatcccaaagcaagataacaccatctttaccaccactggcacagagtgaaccatcaggtgaaacagcaacagtgttaacatacccaccatgtccagcaagagtacacctcagtttacagttggaaagattccaaaccttaacagtacgatcccatgaagcagaaacaatagttggctgaagattattagggctaaacctaacacaactaacccaatcattatgagcttcaccatcagtaatagtatacttacactcaccgagtgtgttccaaagcttgatcgtacggtcacgagaagcagaaacgatctgacgattgtcaatcgagaaagccacagaaagaacatcttttgtgtgaccaacgaatctccttgccgagactccggcggctagatcccacaaacgaagctcaccatcccaagatccagaaagagcgaattgaccgtctgatgagagaacgacgtcttggacgaagtgagagtggccggttagcctgcggtggggaacaccgtaggtcttgtcgtccttggtgagtttccataggattagggatttgtcacgggaagcagtgacgatgatgtccgagttgtcaattgggcaagctatggctgttaccatgtcggtgtgagacctcatgatgccacggagaactagtccttcagctgccatggttggattgagaagaagggtctagggtttcggctgctgaagctctctctctctctgtgtttctagggtttgtgggaaagaaaagagtgttaaaaatgggatttttatatgtggggatttgaagagagaaaatcgttttgattagggtttttttttggggatatctgaatgaacgaaccctaaggtggttgtttg

SEQ ID NO: 186099 - DNA, 13095 bp, Cannabis indica
aaaaaaaaaaaaaaacttagcacaactcatatgtgaatgaaagctttcttttttcttaggtaaaccagatcaattatataatgcacaaataaaccaattaaatttacaaataaaaaattcattacaataataggttttctctatttaccttcttagcacttaaagaactagcctattactggtatctttcttaactttttgtaacctctatttttccaaatggtatcatccctattattgtaatatgtataatagggatgataccatttggaaaaatagattgtattgtattgatctaactcatgataccaacttaatcaaatttattggatcaataacctatttactaacaaggaaagccctcattttcaaaaaaaaaaagtattattttctaccttacttcaagtttctatccaatgcaattgttattgttatgctagtgtgaatttcaccactaagaacaaaatattaaatgtctacgtattggcgctagtaaggtgggagtagttgtcaacgtcgtcaataataaaaaaaaatatcacagaagtttccatagtttcaacgtaaattttttttaaatgattgggtgatcaataataaccttgaagtaactagaaaccatactactagagaaataattctaagtttcgaagaagactttttaaagaattattgattggtcttaaaaaaccagataaacaaatttaaataaaaagtaaaaaaaaataaaaaacttgtgaagggatattttaataaaatataaaaacttgtacagaaaagtttagaaaaattaaaaaataaacttacaaaatttaataaataattaaatatatataggatttttttttaaggtggggaatttactttagttctcaccttaaaaaataaaaaataatctaataggttcagtaatatgaaattgttctacatttatcaaattcgtgaatcttaacatttcacattcaatctttaaacacaaaactcaagcattccaatctaaaaaatccgacccactagaggaattattaagaaaaaaatgaaatgggaaaacttcaaatcggaagaagaaaaatacccagatgccagaaaaccatgcaaagcaaagagatggatagagatgaaaatctaccatttctttttacaaatcttttgagatgattccaaaatgggttagctggtaaaaatagttggctttgagttgggtttgaaatggacatcggaggtggttgaaagcaaagccaaagtaatatatatatcaaaagaagaaaagctaggagtggccttcgtttggattgtcggtggcctgagaaaactctgggctagttagaagttgggcgagagggaagtcgagaaggagaaaattgaagagacagagaagagagagaagaaagaaagaaaaaaatattttattttatttatttttcattttaaattattttaataatttttaataataatataccaattgaaaatcgacacgtggcattctcgaaggacttaacagaactgttaaaataggtactattagaaatagtagaaattgagtatttgagtacttttgctgccatttttaaattttgggtatttaatagcaacaaattgaacaaaatagatatttatgacgtgaatttcccaagataaaatatcaaaaataacaactactatatcctccaattaatatgcaatctcaattagtgtgctaaaattgtaccaaaataaaatactagaagataaagatatcagtggtatttagtacaatctaaatatataattaattatcagatcttatataatttaatttattaattattatacaatatacaatttaaaaatacactaagtaccaatgtaccactagtaacaaataacaatgctcaatactatacatgtctttttgagaattgctaaaagtcatctattccatgcaattttcattaaaaaaaaaatcatattttactttaataaatattattaaaacttttataaaaatgttaagcaccttaatacccaatagcaatgctctatccttctacctacttaacacctataattttacttcatttacttgattaaagtataataaaactttgtactacaaatgacacactgactagagttcatttgtaacacaaaaaccacataaagaataagaaagttgtaggaggcttttcatgaatttaaccttaattttgtttaaatattatacataatttctttttacttgtttttcatggttttggatattcctcttcttaaaatgactctaccagaaagcataaacgacgaccaaaataatgtaaaattacaactctaatcaagacaggcattaggaagggtggtaagaataatttcttttgatatttacataataaagacatcattttttaatgtaaagctgcaaaggccttagaacaaaaatgagctactatttcttttttttcctgtctacctcggtcagtcggtcatgtcaaaaaatactcccagggtcagagaacccggcgaccatgttaggtttgtatatctgctgtaattggttagtcgtcgtctgacaaacaaactacgtcggttggtctacctgtgccggttgagttaaactgctgagtgttttgcctaacttcaggcaaactaactggtactgtaggcaaactaactggttgacttgaagcagctcgaacagactgattcacagatgatggcatctgtggttgtaaattgggaactgtgtttaatgctgatgcagggatatttgttggccgttgtattccccggggatgagatgtaagactgggtccagatggtcggaggagatgtggtggggtagatcgaatctgaggactgccttgaagatttggagctggataggagacggaattgatttggggaggtcttgctggcgcagttggcacggttggtacgggtgtagataagggtactgaagctcgcactgttgtagtaccagaaggctccgaaactggaaccacagtagctggagaggctgatctttgtgcatttggcactgtggtagcaggagaagctggtctttgtgcattttgccctgcggtagctggagaggctagtctcagtgcattttgccctgcggtagctggagaggctagtctttgtgaattttgcattgtagtagctggagaggctggcctttgagcattttgctgtgtgaaagctggagaggctggcctttgagcattttgcggagcgaaagctggagaggctggcctttgagcattttgcagtatgaaagctggagaggctggtctttgtacgttttgcaccatggtagcatatggtgcggttgaagatgtagcaacaaaaggaggcctttgtacgatttgtgcagtagcaattggagcgcctgaacatataggaacaaaaggaggcctttgtaagttttgttgcataggaaaagagttttgtagctgaaccagatgctgcataacagcagcattcacatctgcccaccaatataagttagtaacaaaatagccatacaaatcaaacgcaaaatgacagtggcacacataaaaaagtaggtttaaatgcatggtcacagtaaagatggacaacggattgaaatattcaagactgcagtttcatattaagatcaactcttcgctgtaatgttaagaagtgtcatattagaatatgctaaaaattgatacaaaaacgaatttggcacagcaatgaatgctattcaaaatttacttttataattgttttattgtgcatgtattgacaatattatatggtagttgtgctttatatgattcaacgtatttagttattttcgtttcaaatttagcattggcacactttcataagagatgatgcaacagcacacaattcctaactaaagaccagagcgaagcacaaaaaacaatttaaaggttgtcgccagaaagaaacacaccttgatgaggtccaccagacctatctattgacctatattcacactttgacctgaatgcctctgccaagattttattcaaccataatttgttgcgaagatcatcgaaattcttattttttacaaaaaactcggtatcgacctccctgttcatcgtctcatacttcttattaatttcagcaatctccttctcataatcaccttttagatgctgcttctgctcaagaaaaaggtaaagtcagctgaagccatcatctagaaatgttatgtttacttactacagaaacgcatttagtaatttgaaaccgaccttatcatcataggtcttacgagtttgatcgaattcttgacataatcgctccagttccacctgaagtggatcagggttcaagggcggacccccccacgacatcattggaagcggcatgggtggtgcaagatgattataagattcagaaacagacatgttcctaaggtcaggaacatgcattcctgaattcctaacgggtgtatttgatgaactcgtcataggatatgaaacagcttgatttgaaaactgagggttctcaacaggttgcactggagcctgggaaacctgtatagagttcaaaccctcatcaccaggccgacgttcattttcctcaaccaattgtgctacgggctgcaatgcgggaacagactgagtggatgataatggtggaattggttctgatcccgactgtacaacttcgtctaatgtattctgcttatcagctctttgggcatctacaagctgtgttccacaagatattggtggcaaatcacattcacctaggggcacctgaaaatacaaagggtcaaaaaccaacaacaaaaattttcatccctttcaacaattttcagtttatttcattcccacattacaaatgatttccagactcaagagagagagctaacactatcacatatgtatttgcacccacaaggtgtgggtgtcgtgcccctcctggattacctatattgcaattgctatagtttccaatccctcaaatattgtagggttaaatgagaagcccagtttcagaaaaaaaaaataggtaaccacacaaaccatcttgtaaaacacattacattcaataatatcctagcagatacgacgaaagtagtgcataaatatctttggagaacaatgtaatatttacttatacaagaggaatggcatattataaatgaaacatactccatataaatcaacagcgtattaagaaaagaatcaaacctcattaggtgacgcagctataccatcagccaaagtaacagcaggctgcgcacatgaattttccggtgacggctcctgggaaagagaattctgattgcaagcattatcaactctatcttcctggttgatgacagcaaccccatttgatgtgacattgcagagttcagtacctttttctgcactatgatcaacatctaatgttactccctgtgcaatttgttctttagtagaaatttgaacttcagtgtcgacaatcttatcaccatgaatggaacttgcagtctcaggtacgattggggtagattcattggcaatatgtgcttcacgtgaagagctctcggtagaaacaaaattttgcatattggcagatggatcagccgagacaattacttgagcatcacttacaggtccagtagtattctgctcaagagatcccgaacctggtaaactatcagaagcagccagtgaatctatatgaatacacgtcacctcatcagtagcagcagtttcatgcagtagattttcctgactacgattatttaaaagattagccaaaagagggagattatcaggattatctccaactctaacttgatcactcagagagcatttagacccagttacagctttttttataggtggtttgttcaacaattcatcagaagcccaggattccaagtccttcacccaacaagactccgcctcttgcaaccttatcttgttaaaaagatatttcgtctcaagatttttaaggcacaaatccctcttgctcctgagttcttccaattctttagcaagagaattatccaccgacttaagttgttcttctctcattgacgtattatgctcaaaacatgtaagagcagcagctcttttgagtttatgatttttctgtattctagtctttccttcttcaaaattctgctctgtttcatttttttctatctcgagcttttgaatgagtttctccagattcttctgaaacatgttcttgacattcttaatactcttgttaatatctttttctgccagttcatacagaagtttgtcaaaattttccatattccctgtacagtcttgaacccctactttaaccctatctacgttagagggcacagacagttgaccattcacttttgagtggtccaaggtatcagtagtagtcaacattggagcttttggtgaatccgcaatcttgagtttcccaatctgatatgcaaatatgttttttaggcacctcagcattgaatacagacattctgcctcgtctttcttacattcgaagttgagatgttgtcttgccagttcaagtgattctttgtggtcaattttctgcttcagcaaagaggttacagtccaacactgcagaacaaacaaagacattgtcactcgagaaacttctggacatcattatgtgaaaatacacactaaatatttgattactggtaccaaatcaaagtttcgtattagacaatttataccataccaaatgatgtcttttattagacaatttccattaaagatatttttaagaaagaatcatccagaaagaaatatttagaccatattctaccaatcagacagagtgaaaataaaataagaaatcaagaaatgcacattacacgaaaagccatcatctggaacttaacatcgaatacaaggccatttctttccaaccgagggatccagaaactaccaaaacctagcactgccacaaaaccatgtctaagctggtcccaccgaaaaggaagaactcatatacaagtgaagtatgtgggaaattgtagcaaaggattgtgggtaagataaaaatagagaagtacaaattggagaataaaaagcagaaggtgtggtatcataagaattatatagtgattgagctattgctcttggaagagaactggtcttttgaataacccaaatgtgcaagatcaagtcaacccatcaagtgtctacatcttaactaagagcattagaaaggaagtgcatcatgatttatgtaagcatcggaatgtaatcaacatcgaccttagcttgatcaaagttgcaaacaaattcatgcattttgactaaagcttttttaatacaacaatggctattgtcaagaaggcaacattacaacttgcaagttaagaagaattaatcacatttttttttaagaagaattaatcacattaaaacatgcattaccaaatttctagggaaaacaaatggaacacaacaaattcataagaaaagaactatttccacataattatatattaataaattaagtagcagccatagcaataaacatcattcgggttttaaatagaatgcagcatctttaaaagttccaattgcaaacatattaagaatataaattaggcattagatcaaaatgataaaaagatagattaaaaccggaaactaaaacagcaccgcatactagaggaaaagattctgaccagagatatctgaaaagcctgcaatattgtgtttgattctctgttgacacaatggtatttcataacgtactcaagaaactcttcggccacacccagagcttgatcctgcattacggtgaagtaaactatcaagatattgctaacacagagttgtacaaatgtcacaactgtggattataatgttgcaaaaggcttatttggacaaaaggaagttttttgcgtaagacgaggggtaacaattgaggcacgttgaggcttcccaattctttttatattatttatttttcaagcaaaaggaaatgtgctcataaacaattaaaacaacctactttttaaaagacagaataaacgcgtattttaaagatcagaagacgaataacatgatatgtagaggcatcctacatatatcgctatatatgtatcatttctaagattcaatagttaacataactcatgtaacacttttagacataacataactcaaaccaaagattaaataaacccaaccaaacctgataatataaagggagtagccaacttatacaacttaaacatacaagttcactcttggtcaagatgagaaggctgactcttgagtaaatgttctttattagttcattgttaataaagaaacaaaatattataaattgataaattttaactgtgtcactccaccccaaataaaagatgaaccatctttaatagatattctcatttctttctaatcacaaggcccaaagaaaggactgagctgtagtattccataaactttcccaacttgtcttgaaaaaccccccaaatctgcctagaccctcttgtgtaggagatttatacaaaattcatatttaaatgcatgttattgttttattcacctaacgtaaatgaaacaccaagtaagataactcataaaatcttgcatatcaattttcttttccacaataactatcacaaatctttccataaactttcccaacttttcttgaaaaacccccaaaccttcctagaccctcttgtgtaagagatctatacaaaattcatatttaaatgcatgttattgttctattcacctaacgtaaatgaaacaccaagtaagataactcacaaaatcttgcacatcaattttcttatccacaataactatgacactttttatgtgaacattttttaaccagtatcatgtaaagaagagaagcagtacataattagaagaaaaactgtacaggttaaaagaaaatcataccgagagttttagaagcttgcaaagttttaaaatctcaggcttcaaagaacgatggagactcttttgtgcatcaagcgttttctttcgttgctgcaaaagaaatatataaggctaaggtacttctaagaaatataatttatgaaacagagagaatgaagtacaattttcaaagaaaaaaaatgtttcatttatgcaagcacttgacctgggaaacaaactaacctggttatctgtggttgttccaaatgctcctacaaaatcagacactttcagaccattaaaaataagaagtcagctaaacaatattttatgctagctctagactttgtccagataatataccaataattaacaaagtcaggattttaccttctttacagctagagattgattttccatctgatccaagttctatagatggtggatctactgtactatttgaaagtttcttgcgcttcttacaaatttcctcactctcatttcctgtgttgtttgatgtctcgtcagaataatgtaccttctttcgagttctctgcgataaatcataggatataaacttccactgaggatgttttccttccaacactcctgtccaaaatagatgaggttgaaccttgtccataacttcactttgtagctcaccatataacgaagactctgtgcagtaaattcctccaacttgttgaacatttatgattattgactcattgtctgttctatctgaagaaataatctgcgagaaattcttcataacatcttccagtgagggttccttaactaagctttctgtggaggaggttgttacaccttcaccatggaacttatccaaagtattgaattgatgagccgccccccacattagtaacatgtgactcatactcaagtttatgtttggtgacttaccatctaaaggcttcccttcctttgaaagatgtaaaaccttttcttccactgtatatggtgtatacaaacgaaatgttgttacttgctccctttttaaatcaagagttatcttttgcagggctctcacatcattcaccgggttcaaatcactactgaatatgatgacaatatcaacagagcacaacttaatgctgctgttacaagcacggttttctagtaagaaaacaaatctttcacagtccttgttgaaattattcatagcagaaatcttctgagaaggttttaaatcgctatcaacacgctcatagaaagcttttccaaatgtatgtattaaaaagtcctccaaaatgtgtcccagagaagccgttcctaaatcctgatagatttcaattatagaagagatcattaaagtaactaatcaacaattaaaaaccgataaaaatcctcccttgtaaccaagccacaacagtagacaaaagaaatagctttactaataattaatatattatgaatgaaaagttattaagaatcattaagcctttaagatagcagaaattgtatttatggatgctagccatagccaatataagaagaagaaacttttaaaaatggagaaagacaatacacatcaacgatgctatacaaaatataatagttgtatactatcttaaaacagtctggtttaactttttgtacagttttgtaggtttgcttcaattctatttgaggatacttaatcatcctctcgtaatttttatttttggccatcaataatagttttgtttcttttagtatatacgtgtgtgtgtgtcggtggggggagtcacataccgcgccagggaagaggataagaactcttaaaccccgcttttgtacttccaaaagcatcatatgaagaagttgaagcttgccacatgcttttactccagcacgataataaggaggtgtatctttcttgaagcctttcgtaaccacctctacgactcttctatctcctaagtaagggtgattaaaacactgcaaattataacaatcaaggaaatatgaggaatcaggcatttgaaagttcatacacaaaaatgctaaagcagtagcagaattttttttaaaaaaaatacagtagcagacattttaatatacatttgaaagaaaaaaaagtgtacataactgtagatctcatgtactttcaatgtcatttcaaaatcataagaaaatagatttggtactactctaaaaaatcaaatgcaaattcaaatgcgcacacacagtgaattatttgatatgattaatgtttagaaaatcattttatctatttttcaagttgttcttgctaaaaattagtttcatcatcagttgaatttgttgctaaagtatcacattggagaaaccttgtccgaccttagtttggacacagttcacgcttgatctacatttgagcaaccttaaaacacatggtccaaataccatcatgaaccctatcgaaccttgtttgaattgggtttgtacctaaaaactgtagtgacaatgtcatatgagaattttcaatgaaaattcttcagcaatgccactcttttcttttcttttctttgacagaactcgaaaagtggattagacctacctcaatacatatagcctagagtggtggaaaaagaaagacaggagaaaataggaagacaatagaaaaatttcttaactaatatgcctctcaataatagggggtattttggtttaacatcattttttaagaaataacaagcattgaaattaccatatatggggataaaatctctagcttccctaggtataagatctgatccataaagttgtaagttgtgaaagagaaatgtataagatctcatgttattattcaactaataaagaagtcaacaaacccaacctttcgacaagacatcagaatatcatggactgagtcaacaataaaattcttcggagatgaacaaagtatggtagagtttgaaatcaaagtgttgcagtacacttcaagctgcacatttgtaatcggggcaggaacccagtactcattgaatcttgacgatcccaacttgctttgataaacaacatattttgaaaacttttccttcagtttaccaagattatcactgggactgattagcaaggactctttgctttgtgaatcagaaggagactctataaaagataacaagttacggtattcagcgatggtctcctgccatagccagtaccagtagtaacgctcatgtcagccacttgaaaataaccaaaaaaaaagtaaagtaaaaggtacaagaaaacagaaacctttagttgaccactaacaagaagaagccttcttcccgtatctaattgtttaatttcaacaaaatgtgaagagattgtagggcattggcattcatcaattataattaattcccattctatacttctaaacacatccaactcctgcaaagttgagagagaaaaaaatataacttatatagtacaatatgcaaaccttgaagcatgttatgagctgaactattagctttaaacacgctatcagagttttttcgaagtacctccagaacaatgtccattgttgttataagtacttgaaacatcagggaacctccctcaccaaactccagttttctaatacttcttcttaaatctttgtccccactgtaaactacagcattgacaaaccaaaggactccatcatcccacaaatgaagggctgccaaagtcgatataataagaaaaggccgactaggtttagggcgaaatgattgaaccagcgaagccactttcaagattctctcctgaaaattcgatatccattagttattattctttcataatgatgtgaagtaaatacaagtatgtctgagaattacaggctacaacaagggttcactacaaaaaaactcttttacaatagcaataaagagtttaccacaaaatgttaaaatcatcaaacaataagccctcaaaacccttttatattcaatatccaaatacctaccagtagctaactttatccaacaaaagcgcacaaaattaacagacaatcaccaaatcattgctaagtgaaaacaaatgcctcaagacatggataactaatttttcaaaatgactacaattcaatatgtcaatataactgattaacccttacctgttcatcaatgacaacagcattctggcccttgagccaaaactcatgtagcttgttatagtaatcctgacaactactacgaaattgcgttgatcttccagcgagcagttccaataacttttcactctcaagtatctacagaaacaaaaaacaatcatgctagttcaatag

SEQ ID NO: 186100 - DNA, 5330 bp, Cannabis indica
aaataaatacacacaacataaaattatttctacaccatgagaaacatcttagattaaagataatattaaaacacattcaaaatcaaaagtaatatacagatgcatgggaaggtaacattttttttaatatatgttttattagatacacttgatctaatggtatttttgtaaaaagtttatggaaaaatatgagtccattgaatctgtatataaagatatatacgtgtacactgagtaggcaggcatacaacgttggttggcatggttagttgtcttgtaattcctctcacagagaaagaatgcacattgcattgttgtgtgtctgaagacgccctacgaattctcagttgtgatgcccaatttctcaacttcatctctttcatcaacaaaggcatctgctgatcaagatatgtgataaagaaaatactcttggaacattcttccttgcagacaagtatcatagctaagtcgatctgatcattgactcgttattcacaaaaaggcatctgctgttgtgagtgtctagaagattccaagatcaaaacttggacattcattcacatcccatgcacaagtaaaattatccaccgaacaattcttttctgcatcaataggaccacaagaagtagtagaggaacatggcatatcagaacataatgcttcatcacactgtttagaattgatgtccatcttgtctgtcttaagctgctggagtaataagcgagcatgtaatgttacaattttttcttggctggctaagtgacactttatattttactcaaaagccaaagacacatagtactttcaaattagagtatatcttgtgaatgagggtgttgagaaaatgcagcattagactattttccacagcagttttttcttaatttagttcaagaatgagcatatttttttagccatgtatcatttgcgtttttcttttctgttatataagtattatgtcatcttagaggattataaagcaggacaagaaaatatcaacggttttagctttataaagataaaacattaacttctcaaatccctcacaacatgtaagttattaattgctaatccaacatgtattcaagcaattggtgcaaaggaaaccgtagcagataagataattaagatccataccaggtgggaagttccattatcgttgttatcattcaataactgactgtcatcaccactggatattgctgcaaagtctgacaatagttgatttgttgttagatgctgaaaatatgtaaagaaaaagagatgtcgtggtatgtaatgttttaaatttgaaaattgaaagttttagaaaactagccttcggaagacatatgaaatggtttcttaaggtccatatgttcttttgattccatagcatcaacactttcacttgattgatcatgaagaactgataattctggtgttttattatgttcagggaaatccatatctgcagcgtttgcaagtagtggctcctttgtaggggtcgtgtttttattgtctactggaacattattttgaattctgggtttttggagaaaagacaaaatttgacgggctgcagaaatagatgaagtaaactgtaaggttcagataagtacggtataaaacattctcattaaccaatataggcaattctcaaaagtgcatttgcacttaatctcaatcttcttttattgctaggtataatcaaatagttataaccaagatatgtctaaacaaatgctgaaacttcctggtgaaaaacaaaatatgacacctgcagaagcaaacatttcacaagaaaatccaatatatttaccaaagaaaaacaaaaaacaaaaaattgcctaattttaatatcgttgtgtaattttaagacagtcgtagacataccattccgcagagggtttgtagtagctgtactgccagattcctttgagtctattttggctgagaagctaatatctgattctgtagctttcctcaaacaaggattaccagaaggtttgtctgttatgcataccaaaacatcaaaaggaagattaaggtctatagctctatgcaataatgactctaagatgataacacttgatctgttctagtaaaatgaaaagaacacagtttcccttgataaccatggctacattgtcaaaagcataaatctgatctgctggcctacgtgcataattctaactaactaacgccattataactcttttagatattatggaccaacagcaaagggacacaatgtaaaaggaaaggtgtgataattacgattgtgcataagaaacaaagaaaaatgaaggattcattaaataaccaccagaaagggaaattatttaaatggatatcacacaaaccttttaaagcggatttattaaatgcaagagaactttgctgtctgtgcattttttcaatatccttaacaatctcacaacagttttcctgagcactggaagcagctataggttcattgttttcatcaggctgtccaatttcaaccaaataagcatcaaatacaaacgacacgccagttcttacaacttcatctcttttcaagaatccactattcaagagatttctcgtttcatcatacagcattccctaaccaaaatattggtgtgttaggatcaaactaaacacaacaagaacacacaaatagcaagaaagtcaaacgtctatgatggtaaattacataagttactcagcatagaatgggtggacatatttgtgggaaatgaccaacatttaagacagtgatcaaagaaagttcttaaagaaatctagaacagaacaaatacccgcttcctacaggagccactatttgcaagcctcaagaaaccatcgtgaaacttcttggacttttgagttaactgtgatgtgtacatgacctgccactctgcatgaaaacatatttaattagaaagaagattaatgattaggaaaaccaaaaagagttgaaaatgctaacctgttgaactagattgggttgtatcttgactgttatgagatgccccagatttaaattcactcttgacaaactctggaatgaagtaaaatattattttcagtatgatacattatttcagctgttctggagcaatgaatacaaaaatacagaaagacaggaaacactataagatcccacaaaaactatacatttacaaatatttccagaaaaaaacaaaaacaccaagcaaaaatgtattgaacaataaatttcataaaattcataatttgaaaagtaaatgtcatttgctaaccttctttagcagttttaaagcctccgtgaccatagtttcgctgtccattcatgattcctgtttctctctcaacattagaattacttcctccaaaactcttgtgatctccttgaggttctccaattcgaactaaatgagcatcaaaagaaattgttgctccagattctatcttctcatccttttttaagaacttactatctagtgtacttttactttcatccaacagcataagctgaacagagccaaaatgggggcagcatgagaaatcattcagtcattgaacacttaaatgtaatggaagtgggcaaacacaagaaaaccaaatagaccaaagaaagaaacacatattttgtgggggtttaaccactttatcaagatacaatatttacaagttagttatgacagttagttttcaactgttatgggcgttatgtttgttaagtagttagaggttactgtagctcttgatcacagctactcaaagcctacaaaagggagtctcattcacttatgtcatcggatgaaattgaagagaagacaacctaaaataaagagagtttagaagacgaggagctggttttgctcgagtgtgttgatctctttgtaatagatgaaggttgtaatcggagttagtctccataagatacttgtaccaaagtcatcaataaagtgctcagcctataaggctattcttctcctgctgattagatccaagtctcatagacttgtgattgaaccacttgagttctctttgtccattttataatttatgttcttagcattcttgtgatctttttataattctttgttattgtttctgtttcttgattggtgttggagacaccacatatattgatctatcatttcttcaaattataccaaaaaaaaaattagtatgagaaccaaacctgcctccccatggatccccgaacctcgagctgcacaaaaccatcatgaaacttcttagacttttgagtaagctgtgttgtgtacatggcctcccattctacattatcgagtaactgaattagacgaaaactaccatttaaaactacatcaaacaggacaaagagcacccaaagaacttggtaaaactcataaaattgaaaagaaacagcagaaaatgacaaaactacagttacaaatcttaattttcaagcaacaaaaccaaacaagcccttaaactcctacaaatctcaatttagacaatccattttgtcgttttcctttcacttgaattctcctttcatcataaattagaagatttttgagttaataaaatgctacctgtaatgctagactttgttatatccggagttctttggctctgtatagctacatacttgcgcacttctctcttcttaaaatctgagaaaaagtttcaccattacataaatattcataaactcaattagtatctttcattacactaacctcttataatcttctgcgacggactcaaactcaaactctgtcgctgctgcgatttgcttttctcatctctccgactatttctcccaatcgaattcaaatcagatctaacttcgtgatctccctcagcatcattaacgtcgataagaaaagaattgaatgtgagactttcgccgcagctaacaacctcatcattcttcaaaaccttacattccaagagcttctcgcactcgtcgtacagtgaaagctgcatcaaagaaaaaacaacaaaaatttattcaaagttaccaaaaaaaaaaaaaatacctccatagatgttacagtagttggagttggagaccttattggttgaggtatgttgtactagaaaaccgtcttgataaaccttgcgcttctgcttcatatgccttgtgtaggtgacgctccatctcttcttatcctccattgatgcgaaattgagctgaggaatatggaaaacctaatgaaatgggtttttgaatgaggaagatttctggagaagaaagatgaaggtttttgcttctttttgttttatataaatggcgggaacctctaatttatttgtggtaaatgtgatatgacgaaattacccatctaatttttttttcctaaatctaaatttaataaaattag

SEQ ID NO: 186101 - DNA, 5981 bp, Cannabis indica
ttttttttttttttgacatgattggtgagcaccaggatcaagaggcaaactggtccccatactgacatttgggtcctgttcacatctttacattgttcccatgttttcctctaggaaaagtgtactgataagaaagatgaacaagaatggttagggaagtcaaattttgtagaggtgcgatcattttggcagatctttaggagtttcgatagaatgtggagctttttccttctatccttccaggtgcaccaattacctaacattacagaataaatcattcttgtactgttttcctggtgtgcttatatttacatttactttacaggcgatgattattatggcgtgctatgaattggaatctccacttcaattgtttgattcaggaatatttgaggacattttgagcattttcattacatcttcaattctcaagctcatacaaggtatggtgtttataattttaatatgctttgttacttgtattaacttagtgaagaagattattcatctttgtcttctactgaaagtaaactttagctggtgttaactgttacttttacagtgaacttgtaactcttgaatggcagagaatcttattacttgtgttctttcccattttatttttgagggattttggcatgaattgtgaaagtcacaaggacccttattactggcattatcatttagctttcatccatattttgcagcaatattggacataagttttacatggaaagcaaggcaaatgatggtataccgtgaaaagataagactaaaggtgaagctggttgttgccgtgatatggacaattgttcttcctacatgctatgcttattccagaagaaaatacacttgtttctcctcacaatatggaagctggctagaagaatggtgtctctcttcctatttggttgcagttggaatttatatgatacctaatgcaattgagatggtgttattttttgttcctgctgttagaaagtacattgaggtatcaaattggagaatattcactctacttgcttggacacaagtaagttcaccataaagccactttttcttctttcagaattcttggagaatatttactttctttgtctgatgaattctggttttaagctttgtgtatattctctaatttcttttttattattttttttttatcacatagcctagattatatgtgggacgtgggatgcaagaaagccaggtctcagtgttgaagtaatttctccctactaaattagctgttgatttgcctctactcttatcattttcccctaatgtgttataatttttgtatgttgtaggtacacattgttctggatactagtactatcgagcaaattttctttcagttactggtttgaggtaacaaatttttgtttgttttcagaattgaactacgtttatggaaagttataaatgcactgttattctatgactcttgaactatcttattctcaactttggacataaatcagcgttaattaagtcttagtattcatgtttattgtaatctttgtgactcttatgctgattaaatataaacatgaaagtatatgtgtacttacttttaactgcgacgcccaatggaataatgcagataaagcctctcataggaccaacaaagcaaatcatgaaaattggtgtgaaaaattatgactggcatgagcttttcccaaaaggttttctctgttcctttgtatttagtttgtccaaaaactttaatcagagtcctaactcccaaaaacacttcttctcttgcagtacagaataatgctggtgcaatcgttgcagtatgggctcctatagtagttgtgagtgttgtttgtttcacctactctttaatttattaatgaacagaagcaaggataatgaattagaagcttagtttatagatcaaaatggttcagcacaaattcttgatacattattttgttctacactataggtatatttcatggacacacagatatggtattctgttttctgtacaatattcggtggactttatggtattctgcatcaccttggtgaggtaagccatttcttctatctctctctctctctctctcattttttagagtacattggcagtgctcttactcgggtttgctacagattcggacgttaggaatgttgagaagtagatttcacaccttgccatcagcatttgatgcctgtctaattccaccttcatcaaagaatgagaaaaagggacgaaaaggtttctttcaaaacagatttcataaggtatgtgcagtttttgtatgtttcttttaatcaatattttaacaacaatctcacacatgctaagtattcattaactttctcaggagtcaggagttggaaaggatggtgttgccaagttcgtacttgtgtggaaccaagttataaacagtattagatcggaggacttaattagcaataggtgagttattctcttactgatgtctgcatggaaagcatggcatggaagtcttggaaagatttttatggaaaaattaatgtgtaccttttatgaatagggaggtggatttgatgacaatacctatgtcatcagaattattttctggtgttgtccgctggccggtttttcttatagctaataaggtcagtaaaagaagtggcattactttatcaagatggttctttttctttactcaagtttcctactcaaacaagtcttgttgttcacatactagttttctacggcactaagcattgcaagggattttgtggggaaggatgaaattcttgtcagaaagattagaagggacaaatgcatgtattatgctgtaacggagtgctatgaaacactgaagaacatccttaagtttctcattgtcagagatttggaaaagaggtagacaaaaatccttgcaaaactcgagttgtttcgtatgcacactatttcctgtgtttcttttcctgatagaacattcaatgtttatatgatgaaccttgtgttgttactttctagggtcatatctgaaataataagtgatgttgaagaaagccttaaaagatcaactcttcttgaggactttaaaatgactgagcttccaaatttacgagataaatttgttgagttgcttgaacttctggtaagcattcatatttctggcttatccttcattgtttagattaaggagtccaaacctactaacttagtattaaaatgtttcaaggttgaaggaaatgaagatcatgctggtaaagtagttaaagttctacaggacatatttgaaattataaccaacgatatgatggttgactctgccaggtttgatgctttcagacttaacattcttttgtaagatcagtagtagttgatatcttctatatactaatactaacatatacttcatgttcaaaccacacagaataatggaattgctaagttctttccaggagacggatgaggaagctccttacttttgcagacacattgaaccacaattatttgaaaagtacgccggtgagatgtccatccagtttcccttaccggacaatgcaccaatggatgagcaggtgatgaattttgtaaactatgaataggctgaatttaatcaagcatagacaaacaaacaacctgcaattgtgtgtagtagttagacatgttagtgaccaaagttttccacagcagatcaggcgtcttattttgctacttactgtcaaagatagtgcactggatgtacctactaacttggatgctcgccggcgcatatcattcttttctacttccctgttcatgaatatgcccacagctcctagagtgcaaaatatgctgtcattcaggtgatctttcatgcctctgagtattattttctgaattctaatgtgtctaaaactatataagatatgaaaacttatgatcagtgcataaaattttcattgatacagtgttcttactccccattacatggaagatgtaaatttttcaaggaacgagcttcattctagtcagcgagaagtttcgattatattttacatgcaaaagatctttccaggtaactacaaagctcagacttttctatatattttatttttccacttgaacacaatcataacatttaaatttttttccttcagatgaatggaaaaacttcttagaacggatggaatgtgcaagtttggaagcattgaaagctgaagacaaggaggaagaacttagaaattgggcttctttccggggccaaactctaagccgaacaggtaagggattaaaatgtgaggcataaatgtgattagattttacttatcttaatgtagcacagcttatttttgttctatatggtattatagttagagggatgatgtactacagagaggctttaaaactacaagcattccttgacatggctcaagatgaaggttttcaacactacctatttaatttctcagaccaattcttattcttcaaacttactttcttcttgtttatctaatgagagaatccattccttttgccttctggttgttttggccagatattcttggaggttatgatacagataaccatgtattatccgctcaactagatgctttagcagacttaaagtttacatatgtgatttcttgtcaacaatttggatcacaaaaatcggctggtgatcctcgcgcacaagacataattgatttgatgaaaaggtaatgaatgaagtacatgagaaaatgcagaatatagatagaacacatagtactagtagagcattttaactcactctacatgattaattattgctcaaaggaacccagctctgcgtgttgcttatgttgaagagaaagaagtgattgtgccagatagtaagcctcaaaagatttactcttccatactgctcaaagctgtcaacggttttgaccaggtaccacaccatctaatctaattcctgctacattgtacatattagtataaatggttttaaggcaacatagttttctttagataatacagtaaagaaagctcttaatcttcaatgttttaccaaaaaagaaatgttgatgtgtaaccatcttgatctttatgaaccaaagtagcttagttctttcattatctcttttgttgaagtagaacttttttttgtaggaaatatatcgtattaagcttcctggtccacccgaattggagaaggaaaacctgaaaatcaaaaccatgccataatatttactcgtggcgaagctcttcaaaccattgacatgaatcaagtacactctttgtccaaagacctaacagtttttctttacctctttcttgttcttatggtgttcagttaatttacaggatagctatttggaagaagcattcaaaatgagaaatcttttgcaagaatttcttcgaagccaaggaaggcgtccccctacaatacttggcttgagagaacatatattcactggaaggttgcatccacttatccaattatcaattgaaaatattataggctaacatacctaccaatcatatgctttaggtatgaataggatctgagaattcaacgagtaagatatacaattaagaaatgattaaggattgaataaacaacacatcatatgtgagcaattttaaccacacagaaatggtaggcatcaagtctaaattactatctactaacaagtttataggagcataaaacaaaactcctttgaagttgactaatgtccattggaaatttttggaataagaataaaccactatgatttatatgtaaaaaataattccaccaattaaacctttcttcaaaatgcagtgtttcttctctagcgtggttcatgtcatatcaagagactagtttcgtgaccattggccaaagacttcttgctaaacctctcaggtaatagaactgtgtttccacaagttcttttaaatgaactaagagtatttggttgcatgcttagcattgcatgagcttgagtttaagatccactgtacaattttgctatgtaataatatgtaaaaaaaaaatcttctctctttcatg

SEQ ID NO: 186102 - DNA, 2329 bp, Cannabis indica
aagtaattaaataacctggttagtagtgatctgatcatattacttgctcgggggggtgaagatgatttcagatgatgaaatgagagtgagtgatgagatctgatctctgtgaagttttccaagtgataatttttaatttattgtatgtatttatagtagtagttcttctacttaattactacaaaattatgaaattttaacacgaatttccatgcactatatgtataaatatatatgaataagagagagagagagttggaatatatttaattatttattgctaaaataattaaatgcagacacagatactaaactatatatattatttattacgaaattcaaactcaaatttttgccacttatgtttttttttttttttgaaaggaccactttaactttggtgttatttttcttctttcaattataagggtattaccgatattaagggggcatttggaaaatcaaaatggaattggaaatgggtgtaactgaaagtttggacatttatttaactacataattacactataattatataattaaagataattaagatcctaataaaaattgagtgtaaaaacttttcattttaaatattaagtactaaaatttattatttttttacgtaatgactaactatttgccaaataatacattaattgtgccgggcatagaaaaactccattttaaatatactacattttttttaaatgagacaaaacattgctccgagtaaataaatttgatctataatattgtaatattactttgacaagtgattcgaatacaccaaaaaaaaacatttttaataaagacaccaaaatagttatgtataaaatatataagaaaaaaaatcaaaatttatgaaaagaaaaaattgaaactatgtctccacgcaatgttataatattaattttgaatttaatgactaaataataataataatagtaatccagttttattttccacgaacataaattattagttgatactaatgacgttgacatgcataataatgctatttacactaatttacatccatgcagtcaattatgtcatgaattaattaatatttatttacaatttaattaatgtcaaccctactgaaattattatatcaagatattataaatagtaatgaaagtgttccatttatataaatagccgccccagttgttctttctttctagcttataattacagattatttattagatatacaatgattaattttcgaaaaataatttcgatatatccatactcatgaggagtatacataagacacaattgggtatatatttacgaacaaaaaaaacagccagctgtgcaaaaaatgaaaaaataatgtcaaatatttataaataatttatatatatattttttacgtatatattttaaactataataattttcatgccaaacaccaatataaatatatttatataatcatcatcgaagtatatggtagtttgtcacgcaagttagtatggaagctagctggaccgaccatttacttcaataattataaaaataatactactttgcttattattattattaaatatttaaatattacatatataaattagctttatatatactttatagaaagactacccttatgctataccacatcttatggagatcttgtcttctttctattttccctttatataaagtttatcaaatgtctatttaaataattattactctttccatgagtttttgtttttcttaggaaactctatctaaatatgtatatctcattcataaaatacacaaagaaaagataaaaaaaagtaataaagaaaaaaacttttgtcaaaataaataaataaataattaaaaaaaactaataagaattttctttgtaatgctaaagggcatctactagaagttaaattatgagtccgacatatttaatataataattattataaaaaaatactaactatataatttgaattatatagtaatatattggaatatcaaaaaagaaagtttttattcatttattttgagaaattaaaactaaaaggaaattgtagagtggaagatgatatagagagggcggcttcatatggggccatttcaattatgagcataagtatttgatcacaatgtgtcacatgaatgagaatattttttagtaaggtaggccatgcattcaatttatagttttgttttgggaaagacttcaacaaacaaaataattaagttggtacctctttttgtaaaaaataaataaacaaatggtatttttagctatacatgcaatattgataatatagcaacacatataatgcaaaactcttttttttttttctcc

SEQ ID NO: 186103 - DNA, 5063 bp, Cannabis indica
ttttctttccttataaataataatactaataataataataataatttatttacattacaaaaaaatgctacttttagtaacaatcttttagtcagaacataaattttttgtgactatatatgtgacttttagtcacaacaaaaattttcttgtgactaaaacatagtatttagtcacaacaaattataatttttgtgactaatacttttagtcaaagaccttttagtcacaagacaataatgataatttataattagctataattttcttatctttagttacaaattttgttgtgattaaaattaaaaaaaaaatttagtgttatagcatatattgcacactaatattagaattcgcacctgtacctcccatataacttttggactccctctctctccaccaaggtacgtgttagtttattattactccaaataaacaggcgctacttgatatatatatatggtaccatcctttcaatcttgtgagtattgctagatatgtctaacaccatataaaatgtgcaagtaatgagtgatttctaataattaaattataattattatgaattacacttatcaagaattacataatacaagaactaaatactaaaatagttgaattaaacaatgatataacacaataaaataaatttgcaaaataaactaaatgaaatagagataaagtttaatgagacttattatccttttgatggtgactaatctttgggaggaactgctctttggcaaagctttattcaatcttcaataatgaaggaatacaaaggagaatacagagattaatctcatcaacaagggtgtcttgcactttaacaatggttgtccctgggatcaacacccctaaaataaatatgtgacttctcagagttgatttgtaatcacgcagcattgctaaattcctctagaacctgaatgagagcagttaaggattgactggaacctttgctaaacgaaataagatcatcaacaaagcaaagattaatcaaccttaaagatttacagattgggtgaaatctatacttagttgtattggctgtcaaatgaagcaatatagtaagatattccattacaagaacaaagagtaaaggcgataaaagatcaccttgacgcaaccctttttcacctttgaagctcccttgaactcttccattcataataatggaataagatgtagaccttatacaaatcatcacccaacggacaaacttttgtggcatattataagcattgagtaaagcttcaaggcaatcccaattgattgtgtcatacgccctgcttaagtctatcttgatagcacatcgagggcatatgattttccttgaatagtttttcaaaagatcctggagaatcatcacattatgagctatagaccgacctttaataaaagccccgtggtaatgatttatcaccttaggtagcacctttgacagtcttgagcaaagaagcttagacacacatttgtaaagcactgagcaacaagcaatcaatctaaaatcgatagcttttgtcgaattgtcatgcttaggaactaaggatatcatagcagattgaagttcaagtggcatatgttacctgtctcaaagaaattattaacagccctgcaaatatgttttctaatatcagcccaaagcaccttgaaaaaacctgagctaaacccattcagtccaggagatttagaatcgggtatgctaaagagagctcttttgatttccttgtttgagaaaggttgcaccagtaaaagctactgatctaagtcaagtttttcagtctattcaaaataatgttgattcaagccctttgatccttcgtttttagttcccataaaacctataaagttgttcaaaaaatgttctgcaacttgggaaaatgatcaataacagtcccttgctcattagtataggttgctattctgctttcaaccttccttttcttaagaaaagcatgaagtactttgtattatcatctcctttttgtagccaacatattttgcttatctgtctcatgaagctaaagtacatcttctcatgaataaggaagttattgtaggcaaaattttcttgatcctggtactcttgatccttcagattctcttgagccctcattctagcttctactaacttgtctttagcttgctgaaaacttttccccacatctactaacttgtcttgaggctatgtttcaatctcatgagcttgagataaacaccctttagaccagtagcagatataggcttctcccaacttgataaaaccgattttttaaaatccaagtgaacaacccaaaaattatagtatctaaatggttttatcccaattttcacttcagctcttgtagtaacaacacatgagcaatgattgatatggtctcccaaccaaaatgagccatcgaattagtaaacatatcataccaatcctcattcgcaaaggcatgatcaatcttcgaataaattctactaactccatcttggttgttcgtccaagtatacctcgatcctgtgctcttgagagtttcaacataagccttagacatctaatcattagaatccaccaagtcaccaatacaaatgggattaactccagacctatcgtcaaagttgaacaccgcattaaaatcacctaatattaaccagggttttactgggtgtttcaaactagataggtccctccaaaggtttttcctatcttcgatggtattaaaaccataaagaaaggtaatgtagcaagctttaaattggctagacattttgacaaaacaatgaaccagttggggagtttcagctatgacaataaccttgacaaatgctttcctccaaacaataagaatgtgaccttcaatagtaggacaagagaagtgctcccaattaacgaacttattctccatcatctctttgattttattctcttttaactttatttcaactaatgcaccaacaccaattttattgatactacagaaatccaacacagtatcttaattctcctttttattaatacctaacgttccagtaggaaatattgcagctatccatgataaatagaataagtacctgtacctgctgttttgaagtgatcccttattctaagctgaccctgttccatctcttccaaagccttaaaacggttgctagcatcttgttcctctacccttgtaacaaatgtagatcgaatttgcttttgaggaattgttctcctgggcgtaacccatcttctgttattaggctctacctctgcttccttcttctgactatcttccttattcgacactgtaattatctcttctgccttctcaattcttgcctccatatccatcttatttctcgtagcagcttcagttttatccaccttggctctctgatttctcttttttatctcctcacgaaaatcagccatgatatggccataaccatgacaatttttacattttgactaagagccattcatagttgatgctctgttccattagctaatcatactcactaataaaatgaatagatttggggggagtatcatttatatccatctcgattaacagcctagcaaattgaacccttatgcgatccttagtatgttggtctaccataataggttttccaatcgtactaactaacacactcaggcatttgtttccccaatattgaagacccagatcttgaagacgaatccacaaaggaattgaatgaatctgtttaatggcattcaagtctgttgaccaaggtctcactataacatgttttttttatcaaattggagcacccctacttctaggacttgatccctcgtagcatcatcattaaatttgatcatagtcaaatccattgtcatcctgactatttgaggaattccaaagtgtccccaaattctcctgatgtagcctttaaagatagccatgggagggtttgctccaaggattatacaaatcactatcatattccaatttacagtttgttgtttcacttcatttggatctacacaagctattgtacagtcattttttattagagattcagtatataccaacatagggtcacgatacaccattttctcttctttaaacgatttctagtggttcctcgctgaattctaaaattgttccttatcgtcatcatgtccagtctcatattccacctccttggtccaattcatcttgctttgattcatattctctatttcaatcttcaacccagattgttcaccaacctggttcgtattctctttcaaaacctcaacaatcaaattcaatccataagctgaatttgaatctttgaattttgcagttccatcttgctgaatcgagcttaaatcgatcgtatcaatccaagtgactggcttgcgaatcaccctttatttctttgacatgaaagagagggaagtgggaaatgaagcttatctctttaatatcatgttaataattcttttttgatggaaacaaaaataaaataaaataaaaatatataggtacgtagcatattatagacattatagattatatgtcattttttagaattaaatataatatatattgataagttgatttcttaaaaattaataaattatatatacttacaaaattattatgcatatttcacattttttttgggtgtaaatatatatatatatatatataaatgaaaataccaatagattattagaaattatgaatagagatgttattatttttttattattcgaataaaaaaagttagagaacactacaaataaagaaaataagaaaatagaagaagaaaataccacatcattcctttaattatttttctttatgtatagatagatgttatgaaatattatttatggatgttcaaatcatcaaattaattatcatcattaatgcttgcttgtattttcctttatttacattgattttagtttcttcattcttttagttcattattttgttataaataggggttcactcaattaaataaataactaagaaattctcattcagtttctctttctctcttcatcatcttcttcttttcttcttatctattatattataacacgttaccagcacgagtctctgccc

SEQ ID NO: 186104 - DNA, 3954 bp, Cannabis indica
tggtcgtagagtgtaatttttggtgctcgtgcgaccaaacatagttcttctgcttatactattaacaaatttcaataatgaaaatggtaaagaaatgaagataaatttgccaccataaaagataaagctgactgacctgtatagtcaaatcaaatgatttgcattccccttggatgtgaggcaaaacttcattgttgcttgatatgggtttaagattttgagaggacaacctatgtcccaaccaccacagtcacaaaccccaccagatctccatctttcggtgagactggaaggaccggaattccttgttcttggtccaccatgaacaccagctgggatcaaaatatccatacttgtggagcaatcaccactatttcgaaaaccttcagaggcttccacagacttagtggtttgtttgatcccaactttcttgagaaatcccaagccccaacctccaggctcctccttctgactgttgacaatgtggtcttttacaaccactgcagccaattcaaaatttgtaggaggaagatcttctaacctacccgaccctactgctgattcgtgattgtcacttgtatcgagggatgattccaaggagcagtcttccagtattgcagacgatccactatacttaggcacggttttatgtttagatgagatactattcttaaatacttctgacattttctttgtaaaggctttactcttcctgagattatggctacaagtttgcaattctgtcatataatgttcatttccaccgtacaatacaaactcggtttccatgatttttgaattgctcggggcgagggtgaaagagcttgaaactttcatctttgcaacaaggtgagaatgactatcactaatctcatgatccttttgcccaccaccctttcctgaatggaacaagtatatatagtcaacacccttgtcaccaccctttgactcaactttccacaagttggctacatagacatctttatgatcatccatggacaaaacaaaatgaggatttccacccttccaagtacattggagcatcccctgattgatagtggcggtagcagacgatgaagtttgatccgaacaagcagaattcgtgctcgatgaataaacaagccttttttgtgtgatatcagatccatatttgtttctttccctggttggagtacccgtgttcagattcaatggcgacgacatacttaacacactaggagattccatataatcatagcatattgaatcattgacatcattggaattgacatttttcgagtttgcattgctatctaatgctccatattgctgtagcaaagggctcttcaagatgtttaacatactcttgcttcccatgatagtacccaaaaccaactgccctgtcgggcttataaccaaattttcagtcccggctatcattggacaagcgaatactaatccagctgaatcaaatgcattcccacttcttgtctctggactcaagttttcaaccgagctcatattgaccgaagcattccatcgagctgctcttgaagctctaaaatgaatcaattccaagcaacgacgaagatacttttcatccaaactaatcataggcttcggaatcatatagtctaaaccatgagtacttttaaagaaaggatgtttcccaccacttttaccaattttcgaatgcttaacacttaagatcaaggcttgctcaggatttacccatctaattattctttctgatttcgacctatacttaacctcaccacacaactccttctcctcactcaaactatctaatgaatcctcatttccaaagccagttttcttactctttacaaatttattagccatctttgttttcgcccgaataactaacttaaacccaagcaaacaacttctccaccatcttcagtattcaccaaaaaaccactccaaactcagtccaagcaaacaatattaaaacctgaaaacaaaacatcaataagaagagttttataagtgccaaaagaatctaaatggaacctttcataaacaaaatctataagaaaataattgaaagcaatggaggtaggtaatcatgtgtaaagataaggacttgttattcaaaatctaaacagtaacacatgattaatctatttagacttaaagaagaaaatctaaagtttctactcatttcaaatacacctttgtatcaaatgcaatagtgggttgttcttgttctcaacaactcataattattaaatgatttacacctaatccaaatcaagaataatgattgagaacatgattggttagcaaattaaacagtacaacagcaattagaagatactaacagatattaatcaaaatccaaaatataattctataaactaatgggaatcaaaactaagagattttgccattctaatcggaacccaactgagataaatgtctaataggtgaaaatacaagtcaagttcaccttcttccaaaggctattattaaaaaaggtaaagtctttccaagaaatgagaaagaagaacagcataccaaaaaagatcaaatcttttccacaaattatctctcaattaaaataatgaaaccccagaaacaaaaacccaactacttattagaaaagagtggtcacttaaagcataaagtactcataaaaaattacaataaacaaaacacttaaaaaataataataaaaaaattgtttaacccttttacagtttctccttaccttgaagaatggatccagcaaaaaccaagtgaagtatccagaatctgatgaagagaagaaccagctggtacccaataaacccaacaacactatctcttttttctgtttttctttttattataattatcaaaatttgagcttgtatttccaaaacactgaaaagtaaacaattaagaaaaagtttgaaaggtcaaagagtggggtgaggtgagaaaataaagaccaaaaataggcttagcacatggaagaagaaagagaagccaccatgactaatgatgccattatactaagttccaaagacccctctcactctctcctctcttctctgttgtgttctactttttttcttctctcctccttttaagaaaagaaaagggtataactgtttttagacattattattatatatactcaaaaccaaaaccaaaacaaaacacaagttaagtacttaagtactctcataaaccatgagaaacatcattataggccaaaaaaaaaacaacaaatgaaatgaaaagaacagtggtggggttatggagagagaacaatagattcgtaagccacgttgtttgggttgaaatatttggtctctaacattggtagagatacttaaaaccgagtaatgtttaggacccacttctctcatgttgttatttttatttatttatttatttatgagccaaagatatagttttttttaatgaatagaatttgctttttttttatttttatggaaaaaaaaatcagtaaattgtaaaaaaaattgggaatattttttttttacatatttataattttgtctaaaataatttgatgatataatataaatagagtattgttattgggcactagtattattattgagtacgtatttagtatttagaatttttaagatgtattaccttataattggttagcgatactctttaaaaattattgcattaaattatatgtgactcgtatttaatttgaccaatattaatattaacacttaactataatcttatagcataagatgctaaattattgttgtttgagaatttaaaaaaatatatgtatataaatacatatgcaaatttatataattagtatgaaaaaaaatgaaatttcagttattttaagtagttaaataaactttcataattacaattttactagtgacttatggccacgtaagtattatttaaaaaatagcaaaagataattgaattaatgagatatatatctctacaatatataat

SEQ ID NO: 186105 - DNA, 2293 bp, Cannabis indica
tttgatattggatgaatgagagggaagggagatggggtggttatatatataggtgtatttttagaggtagctttaaagtgaagtggtataatatgttttgttaattagatgagtaaatctttaagcttggttctcatttgcttggaatgcttttcttccaagcatgatcttgatcatggctaaaaaaggactccatggactaaacattaggaaagtaagttataatgatatcatacaaatattatatttggatttttaatagttgcattatagttttaagaaaggtgaaaatataattaattttaatgacaaatatgatagaatcacactgcatttgcatattgttataaaaattattttgtaaactatttagtgcttttgttgaaatttagaataagatgtatggagttttatttcaaaattaataggagtagttcattcatcttatgtatggtaatttatttctacacattaacaatgtgggactaactctaatatactctcttcacatttggggttggaaagtgtaagtataatgaacgacctttaaagaccacagggtcgaacgtgacatttaaaagaatctcgcaaagccaaatatcgaaaaatttgtaagtgtacacgtcggaaaatttgtagattttgaaacagatcaaagaccccaatgttgaaaactagcacacataaatcgaaaggtctcaaatggagattaaaggagagacagtgaaaatttttagtttgactctaataccatgttagaatttagagtaagatacatagagttccatttcaaaactaattgacaataaaagaagtagttcattcattttatacactgtattttttttctcaataatttctagtttttggagttatttttataccattttctaaactatatttgatggtaccaaaaaaattattcatagtacttgccaaatgtgtaggatgaattttatttattaatgatgagatgatgtctttgtaactttatggacgtagggacattgctataaagttatgctgagatacatgatgaagatttcaagtaggatcttgtgaaagtcttggtggaccacctatttccattataagccaaattctttttttcccatatattcaagagctccaccatgcagggcataatcactaaaataaaagaacatctgtttttggttttataaactttttttattaaaaatattctgtgtagattttaatcaaaaataagaaaaacgtaagagttccggccaacaagttaattgtctagtcaaaaagtatacaaagtcaagatattactgactacaagtaagacaactaatatttgaccaaattgcgtaaaaaatttagattttgtgtagctttaatgagtttttaagtcaaattatggaaaatttgtatttgtaaagttcataaattggtggaaaatggagcaaatcttattcacaaacctctaatttgattctcattatgaatttgagtgacataaggttaaatctgagcgacatataactaatttgatgaatatacaacaaacctctaatggagcaaatatttaatgctacaaaaatacatattttaattttcaaaagtttctctattttcttcaacattacattttatgatgatgatgattgtgtgatagtatatgtgttaaacataaattttaggttcagctataaaaattggatcaaaacctctgtaaatactttgaaaatatactaattttgacaattttttgcatattttaccctattttatttccaaaatgtattttatgaacctgttataaaaactcatgtgaatgcctaacaacatttttctgttatcttctttcattctatggtgattttaccaagtaaaaagagctcaaactcaaagtaaagtttctttcatgccaagcaagcaaatatcccatgcaccaaacattagtaaacattgttcttgtttttgtgacaaaatggaacaagatattgaaaaaactatatcccaatttaagaatgttatttgtcttagaagattgttgtaggttatgaagtgaagagtctcaagaatttggtttaggaattcttggtggaatgaaataaataatgtcctaaaaggaaaactttatttcaatgggttacttgagctacttgcattcttattattaagcttgcaaaagttttgttgagtgacaatatatcattcttacttagttgtataaatcttgtataccttgggttactatatcctcttatttacataatctacctattaaacaaggtcattgcatgagttttctaatgtacta

SEQ ID NO: 186106 - DNA, 1469 bp, Cannabis indica
ttatgcattttacgttcaccttgaagcttgccatgcccacatgcttacctgtccatttctcacttaaaaagcttcagatttttttcttaagtatttctgtgctttttcaatgctgtgcgtgtgggtatagcaaaacttaccgacgtagcatctttcaatgcaatggacataaagtagtgtaaggaattgccgtccaactcatgaagctagtcaccaacagcatgaagacacctttcaagatagttttgggaaaattcttttgccctgtgcaccataccaaaagaagttgcccgaccctgtctttggttgcctttactcggcatctttagaggagaagtagagctcaaagaaggatcaacaatcacaggttggatgaccagaggtggacctaaaggtggcagaggtagagtggcctgagtcatgtccaaggcaacccctgttcgggcagctttggattgagtacgcctgcctgaggggctacttgatgattgcttcatcaaatcttttatcctggaggccatgtatgcaaaagaaaaatagcaaggtcagaatacaaataataaacacaaaatgcaagtaagagttaaaaaattgctaccatcagtttctttgggatagtataccccaagaaaaccatccaaagtcccttcatcttcagaagaagattcactagagctgtccccagtcataatggccttgcctttgcctttttctattgccacgggtcgagcaattctcactgacccttgtcccttaagcctgatcagaactagggcatctccagtagtgcccccacgtgcaagacgctaccaaagagctcggtccctcctagtctctattgggcaatctcagccaaagagatctcatcatcaaatttactcctttccttctcagccacatgcctctttttcttcactttctccttctcaacaagagcattgcttggatccttagggaaattatttgaggcttcaacaccctcaccaggagggtacatgccatacctcctaatgttctcctcataggccagcctatagatatgcaccaagcaacaagaagagataagatttaattggccctatcccttatcttcagtgtggggatcatttggttgtaagtagggactcgatgaaagaactggcaaaaaccttttatgtcataagccatgaagtaacttttggcataacccctgatctttgacatgggtgtgtcattggtgttgtccaaccactagtagccctactggctaaagtagaagtatccagtcctgttctggcaagggctggatttcagctcaaagtaatacttcacctcaaaaggtgaaggttgcggccaacctagtttgtcatacaggatgaagagcactaaggggtattttatgcctttcggtgtgatctgagtttgacatagcttgaagaagttagctatgtccctaaagtgtggatgcaaaggaagtacctgttgggttt

SEQ ID NO: 186107 - DNA, 2263 bp, Cannabis indica
ctctctctctctctcttgtttatctcactattacaatggagctcaaaggagccttctctccgttttctctctctaaactcaactgacagagaagataaaatgctttaggtaaaaacttcagcttgaactgggttcttatagattctagtgcttgataagaatcgatagagtcttggatcactgagctagcaaaaattattcgtttctattttttgttgagagttagttaggacaagccttcatgcttccttgtaatttctttctattgtaactacggtaatgaactttagcttataaggggatttattcttgcaaattccacctaaattctcttatgagcgatgttagtgaagttactttgatggtcttagcttgatgaccactagggacaacttcctttgtctatcccaagaaagttcatacaatgtttgaacttagctacggttaccactttagttcctatgtcagtggaaaccttcactgtgactttccatgtcgctttgtgcctagtaaagtagtatttgatttcaatatgcttggttctatcatgaatatcgagattcttgtagagatgaatacaactttgactgtttgagtagatactagaaattcctttaaatagacttagttctttcatgattcatttaatccaaatagcttccttaatagcctctgtagatgagatatattttgcttctgtagtagattgagtaatcattagttgcaactgaacccttcatctagcacaacttccccctattagaaaataataggcagatgtagactttctagcgtcccttgcatagtctgaatcacaaaatccttataccagagttgggttttgaaactgtttacacactaggccaatatttgaagttcctatagaaggtacctaaagatccattgtatagcaaaccaatgtaactttccatgattagacatatactttttaagaacacttattgcataagctatttcacgtctagtacttaccattaagtacattatagatcttattttattagagtaaggtacctttatcattttctctttctctttttccgttttacgacactcttcctgagatatctttgtattaacttataataggctgactagtatttttagagcttgtcatttggaacttttctataatctttggtatgtaatcttcttggcataattttagaattcttttacctctatctctaacaatagtgatacatatgattctagttgtaatgtctaagtctttcatctgaaacttagatttaagcatatctttgaccaagtttatcttagatctcttattgttgactatcaacatatcatctacatagtgtagtaagtagatgacatcttttatatcacttctatgagaggatagacaagtaccatagtagcttttagtgtacccctattttgtcataaagccatcaaacctcttgtttccattatctaggggagtgcttaagtcagttttcacactaactgttcttttttccttttccacaaatgttaggatgttccatatagatgtcttcctctaattctccacgtagaaaaattgtggtcacatgcttctgatcaatttccatattaaattgattagctagagctaacatcatccttataatcttgactacatgggagaaaatctcagtgtaatcaacttcttctttttgagtgaaacccatagccactaatttggttttatgtctcacttgttcatctcttgtcctttcttcatttttcctaaaaatctatttgtaggacacaataattttccctttaggtctagaaaaaagtatccaagttttgttcttcgttcgagaatgcgtttcctctcccataacattgtttcaattcttagaatcgttacctttgatagtctcctcataatttttaggttctaacttttgtccttctatagtactcagtaaagcataagcactatattcattccagattttgtagctatattttaggatgggtctaggtgctcttctaactttgtccctagccaactaataatctttaagattttaatttaagttgtatctcttttgggttttcctattgtttcacctgacttgtaccatctccttcttccatttgatcagtatcatggttaaatctattatgctcagcttgttttgggctctgcttagtttatgaaatcactggccttagatcaaaactggctgtgtttcctgcaggattagtactaggattgtttcttgaaattgtaggattaataaaa

SEQ ID NO: 186108 - DNA, 1493 bp, Cannabis indica
atatatattttttttttttgtagggaattgtaataaaaagcaatttttaaaataaaattttattttcaccaataattgcttaaaacaataatacaaagtaaaaagtacaaactataataataattaccaaactgatataattaatttgacattcatacacatcaaataattaataaacataagaaggcaactaaacaaacacatgattaccataattcatatgacatggtggtaaatattattctcatgccatatattaatttaagatgggaaaataaaaaatccacctaagacattctaaatgatagaccagaaccattgaacttctctttcattatcttgttcacacgctccaccattgatggactaagatgattagcccaatcacccacttgaccttttctaaagaaaattttgttatcacacttaggccaaagttggccatgtttatttacatccaaattcttcaatttatcaaagctacacaactctaatattttctcaacaactccattagcctcttcttcttgtgagaaaggaaccccaataaagtttgcaacacttttggcttgaccaacactatcttctatcaaatcctcgtacttcaaaaacaacactttctcaggtgtctccaaactaactttccaataccctaaagcatggtcccaaaatggcccaaagcaagcctcacctctacaaaacatgtccacacactcttccataccccactcgtgctgcgaatggccacccgggtgtccattcgtcgaaaaatgccaagtagagactatggcatcaagagggtttcgagtaatgtaaacaattcgagacttggaatcatgcttaatagagttgtttaaagatgcatagggaatatgtgtagagatcaaacgagggcttgacatagtggccaagtcatagggcttatgatgggcataaatgttgtgctctaaagaagacacgagatgatgtgggtttgtggtgagcaaagggtgttgatcattatccataatatgatgtttgttgggtttggtataaggttacaccatcttttaaccaactaattgatttaggtagctcagatataatagccaccttatcattattaatattctctgtcatgttaattttgagcactattacttactgcaaagaataatagattcatttattaattagtcaaacacataatatatggagagaaaaatcattatgatgtagggaaacagattattaccttagttattaagatacggaaatgcatcaatggagcttaaaagttttgatgaaagagagaaagaagagaatattgacaaatttctatgcataaagaaaatgatatatatatagagaagtgtggaagtgttttaggagcaatttaaggatttctcgtgcgtcttgcgtagatatcacaataaagtttgagctgtctttataaaatttatacatggattagcgggtataggtagggattgaaaacttagagaacagggaga

SEQ ID NO: 186109 - DNA, 2560 bp, Cannabis indica
gttctctatacgcttatgcgcaacattgttggcacatattatgtatgttgtagcctatgtcgtgccaataaggttcaattgtaaggttaattaggatttttgttacttaaactttaacatgtatcaaatcatgcctcctgaactttttaggttgttaaaaattctccccgaactattgaaattgttggatttaacgatttttgtccaattttactagcgtaagtttgacgtggatgaaagttctgggaacatgattttgtacttgtcaaagtttgaggagtacaatttggtagatatcgaagtttcgggtgggggaggggggagcacgatttagtacatggattatgaccacattagtaaaattgaacggaattggacataaatctttgaatccaacaatctcaatagtttgggggaaatttttaacggtctgaaaattttaggggtatgatttagtacatatcaaaattcgggtggcaaaaatcctaattgtaaacacaattccgtagttttttgtcagtagatgtgaacagtcaagatgaattgttagataaatcagaatgttggcagatgtgtcaaaattgattccttaggattaaatatggtgtagggctgggacccggcaataatctgtttctacatatggattgttattatcctagttgaccttgttgtccaattctaattcttagcccaacaactaagatcacatgcaatgctatgattagatatggacgtctgttacataaatataatgcaattatgattagatcattttatcgggaaatttagatacataaccaacaaacttctctgagtgtaacatgcaatgttttgaaaggctaaaacggcgcattgaggcataaggctacacaataagaataaacagttcacaaaacatcatataacaacacataattccatatcaaagtcataaaatataagtcttaaaatcatagctaatataaggttcaaaataaaaattcttgagaaagatggaaggactgccttaaggagatggactggttgtgtgtgattaaagagaagagagaggatgagacctagttgtgttgctacatgtgtgactggagaggaggaaagcttgctgtattgttgtgtgtgtgcagagaagagaaggggagagatgatgtgctgctatgtgcgtgaagagaaggggagagaggaagagactattgtgaaagagatagggaaaaagatgagtctttttagggccttttctcatttagtattatgctttcaacactgttaaaattaaacttaaaatagcccaaaaaaatcgaaaaaagggccactcaaactctcaaaaacaggcccaaaatactctaatagctgaggtgtaagcttcaaacacctcgaaggcttaagcctcaaggcctacgcctcatgactccgaggcgtaagcctcacgaacagtgactgaggtcagaggctatttttgagcacctcgaggcgtaaacctcaaacgccttttaaaacacgggtaacatgattattactactaattacattcaatttcaattgtaatatagctttccaacgcaacttaagtatacattggaccaaccatttagtatacaatggacaaattttagtataaattaaacttgatcagttatcgctcttttaaaccattgagttaacaaaagtcaccaagtatttatcgattaggacacaaatatttatctatgaactaattataaggttttatcgacaatttatcagtcttttttgtcaacatggagcatttatgaatatctggcaaagcactactaaacatatacctaatatttgtaacataaaagtcacttgaacaatctcctacaaaatataatagattatacatatgcatgcatgatatgtatattttgcagaaaatgccgattgacaaaagttggatgaatgggaagaatcgtctatcaagagagtatagaacaggggtcaaagagtttgttgaacatgcgaagcctcatgtcaatcatgaaggacagatgagatgtccatgcatgaaatgcctcaatcaaaaatttcagattccaagagcagttgaaatgcatttatttcagaatggtatccaatcgtcctacacagtgtggtcatttcacggagagtcattccataatcctcttgttgattattcaggagatgaagatgacaacaatgaggatgatgagatggctggtatgttgatagatttagctaggcatggtggacacaatcaaggatcatgtggagacaatggtggatcaggtggcgacaatggtggatcaggtggagaccagagtaccactaggaagaggaaaaccagagcagagtccagaagtgtggttgttgagaagatgcttcggaagcaaaagactgacaagttgatagtcaagtttgatcctcacacagggaagagtttggaaaagagtgggaagacattcaacaatatgattgcccaattagttagaagcacattttcaccacggtttacacgctgggaagatgtacctaaaactgatattgagacagtatattctcggctggatgtaagttttcc

SEQ ID NO: 186110 - DNA, 4890 bp, Cannabis indica
aagaggacagagcaaaaggctgagtaaaactgacactcgtgttactgactacccattggcaaagacaatgtgcaccttcattttttgttggcaaaacctttgcagagtctcagtcaaacacaagaaagatgtgaaaaaggaagcaaacaggtttaatatactgtagagtttggaaaaatatgtacttttaaatgatgggatacaatgaaacattagtcactagccttgtagggctagtagccagaggtgttagggggcccttataccaccaaacctggagataattagggtagtgtatctttgcttgtgttggtccgtcaaatagcattatggaagagataactgtactaattattttccttttctttttgggtaaccgaacccaaaatgaagattatttcagtaaaacaatgcccctgttatcatgtatcattgtgtcataggataagctttaacaatctatcagccaactgaaagaattgacaagttgacttcaccaatacaacaaatcagtacatttcctctccttgctatcaaaattcactttacaagtaagacaaccaaaatgacatgggaaaaaacagaaaatagtagaaaaattcttcaccagcctaatcttaccttccaaaattctataatacctcaaacattaaggaggaaaaaggaataagaatgaagtgattctcaccactcaatactgtattctaattaaagttcaaaacttgagaagggggaaaaaaaagacagcacagatgaagaaagaaggggacagaagaagcttgaaactatgaaaagggaaaaatggcaacacccatatagcagcagcaaggaagaggaagacctgcacatgcctaccttgactaactaaaaaatggtcaatatcagttacaggtggagtgcaccttttatgtcctcacccaagcaatcaggagatactattggcaaatttttcagcctctttttatggatttacttacactcaagctagtgaaggttctatcatcttgatgtctcgatccaattgtggtaaatttccaaaagatcccactattggacctgcgtttgctgtgttgatgtttacaatgtctacccttactcagtagttacttggccaatttatatgtgcatgctgcggttgctgataaacactacctccaggtcctaccatatcaacacccccacccatggtctgagattgttgcagaagcgggtgcacagctgctgcagttacagcttgtccagggtggtagataccagcaaaggtgccatggccagcctgtgctggggtgaaagccatgtgctgaccttggggaggaagattgtaaaatgaacttgctggcaagctcgacatgtctcggccgggtggtgcagcaacccacatagcgggaccttcactctggagaatgcaattcatgaatttttaaaattggagtacaaagtagttctaaaagcaaaacaagtgggcaaaacagtgcaaatcaataaagctatttcttgatacataactaagattacaaaaaatgcatttggggttttatagtaacacatctttcaaaacatcatactagaaaacaaatggactagtgtgatgatgcaggaagtgaatcttcatataatgaaatttacaatgtcaaaatatgataagaataacttagatattaattgcagtaatatagcaaaagccaaagcttacctgttgtccagcaatgtatgcattattttccttgaactgagactgaccaagatcctcattaggggtagaatttcctgctgttgtggaagaactggcattataaccaccaggagaggagttataaggcccataaccagttgctatcccagtatgagtggagtttcctgtattagtccccggtttgtactgtgaaagtgaatatttgactccagttgcagttgctgctggtggagctggataaacacctcccgcctgaggttgttggggaaatgctccatttcccaaaaactggtggatggatggagatggaacatagaatgggggaaaatagggaccatatgaaaagtagtttgggggataatgggaaatgtgcatcccagttggtggcctaaagacaggaacaggttgctgagttatagctattgagctctgcatgaggccagcagcttgtgtggccagtggagtttgaccagctgtagacagaatcccaccctgcaaacaggcaataaaaacataagcaagacacaacaaattttgacattgaagaattaacatctgcattttatgtgtcctccaaatagacaagatgactatcaaatgtatgttaggaaccaaacttcattcttataaaaaattatctttagtatctgtttcattctctgattataaatgaaaataagaacatgcttccgagtgttttctttaattccacgagaatatgtgatacttagtgctgtgggtactacactggaaaacagttgaacaaaagcaacccacaattttaacaccccacctccccgccccccttttttccttttttgtgtgacttaatattaataatattgatgttaaggaatattaagaaatctatcccgcctaacaccagaaactaagtcttctgttgtcaagatacagttgagaggttgagcatgtagtgcctaaaaatcctcaaaacacatcttaaagacgtatcacgatactgtaatacacgaggaggcacccaaaaaaaaatcaaaccaattcggcaggctagactataaccaaatacattcaaagaatgtctatatcgggttgatctttattatttcaccaataaagcatttgttatttatatatgctccatgaaacacacacacacacatataatgtgtattaaattaacagaactcctctcattaacttaactggtgaacttccacaacacacaagaaaaatatatcaattacattacaaagaacaactaagcaaacgacactgctaaataatgacattggcactgcaaatcattacaaagtaattatctggccatgatcaatctttgcaactgcatattatgctctgtacgagctgccataaataatgtgtcaaatctgataggcttttagcaaagcttaatagggtaattgattgtgaccaattctagaactgcgtatattaaaaacagacaatagaaacattacagaattctaattaaatgggttcatgatttagagactaacatggcaaaatgaatgtaaagaagtcaaatggtggcaagagggttgcatttgacaataactaagaaaatgatgttagttgcttctggaaattgcaccagaattctgtaaaacaaacctcaatggaaaaaaaaatttaggaccaacaaattgccatggccaatgacacatgtcagttgttttgaaatctggatcaaatttgatataaactatagctaccatgtatgatgcattgacaaaagaaataataattttgaatacaactccagatatattcctggcattccttgtaaaataagtggtttattaatgcaaacctcttgtggagactgtgacatcgaagggggcaatactgcgacattcccattgtacttgctagcaacaccgggagaaggaaaaggagaaaggcgaccatcactatcagcacctgagcggtaaaattgagcataataacttgcctgatcaaagggctgaacctataaacaagagtagttaagcactgacagtaataaaaaatagcacaagccaaagagtgccagagaaatttttattaaatcaacacattagattgcaaaagaatataaatggcaagcccatagaaagtaaatccaaatgagctgcagatataagagttgccccaataaacttattattaacgcataaaaaataaagcttgaggactcactacaaagctttgaaggcgagaaacatctcgagcttgagactctgagttttctagtgggccaagctgacctcctaaaattggaggtaagggcccaaaattgtagtttgacggagtattaactgatgcgtattgatgggctccagcaagcaatccggtatcctgcttggattcattatgtccaggggtagcattggatgagacatcaccctcgacagatgatatattctcggatacatgtgcaggtgattgtggattctcaggataatcctctttgtccgcagtttccaatacattctgaatgctgaattcaaacatactcattaatacagtggaatttgttacaaattcatctatcagattaagaatacaaaatcataaatgaggtagaaatgtgctggcaagcaaagtttcaaacaaaaccagtataaatgccaagtccagcaaatttatgacaagaggtctggcaaatagacctagtcaacctcacaaggtataaatggaatgcatgcacaagcagtaaaacaaaatcttgggctatgaaacatgctaaatgaacttgggacaagaattgcattctttgacaaacgataaatcattgcatattcaattattcatgtgcccttggtctataaaaacaaggcaataataaacaaggatacttcatgataaaatttatctttttcttcaattcaagtttttcttaaaatataatattattattattatttaaagcaaaaggaaagatgataccaatataccataccaacctacaactaacaataagaaataaaaaatgtatagcataatacatacctaggggattgttcctctgcattttcttcaatagcctcagaagtgccagaaaatgatgtcgagctcctgtcactctcaggaacaatggtgttgctcatggttagtccaaaacttacaccaaaacttccaaaactcaattttgttctttcagattcaggaacatggatgtggtttggtaaaataacatgctgacgctgtggaag

SEQ ID NO: 186111 - DNA, 2065 bp, Cannabis indica
caaacttagttttcctccaagagtccattcattccactataaatagggatctaaacccattgtaaaaggaataaagacttcaaaaaatagagaaaatactccgccaaaatcccccccaaaaaaaccatgtttgtaaccttttaacgtcaattcaagtgactcgtggactaaggctctttaagtcccaaccacgtaaaaatatcccctcataaacacttttattagtaattataaattatttactcagttgccaaaaaactcagtaaatattttggtgtattcattgagagttgtaggaagctttcacaacttcatcttcccctaaacgttcttgtcaccacggaaatatccaaaaacaatcgaagacctcctcatccacctgacgtccagtacgccctaacgaggatgtagcatcccgagttgaccgtgaggaagaagacatcaacgatcgagattacgggctagaaaactacccagaaggttatgaggagagaaatatgattatacgacgcttccttgcaatggtgggctgtagagtacgtcactgagttggcaaagtagcgagaagctaacaaaataatgcaagaggctttagtcaccctaaaatgagtcttggccattgttggactagatgtggagtccgcgactaatccaaacttacctagtgaagtcagagttggtccttcccaacctcaggaaaggcgaaaaccaaatgagtggacaccaagtaccgtaaggtacccaccaaaatacttcccaatgccaaggtgaacccttctattgtacctagggggcatagttaacccggatccaagaaaggtatgctctaacaatccgaaagagaataggcctccacggaggaggcctaaacctcaagatggtggccaaccccgaagcatgtctgtcaacaatgggaagggaaacaactgactcaatgctgagaggttcggtgaaaatgctcatcgagaagaactgagagaaaagttgaacgcctggcaaggggctctcaggattaagattaacaaccgaataaatgacctatcacctcagagagaagtcataaatgagagaattttggttgagcaggctactctaaagaggatcttgccaagtgcccaaacacaaagagcaatgactccaactcagagaatgttgacatggagccctgtgcaaagagccacctggaagcggagctccctaaaaattttaggatgctagaaatggctcagtataccgaagataaagatcctagcaatcacctctcccatctcaatcgagtcatgaatgtggtacgtgtcagcaacgacgcaaagtgcttgtgctttcctctaaccctgggatgctctgctgaagaatagttcgaaaaattggaaccagactccgtgagctattgcaacaaactactacaaaaattccagaggtaatttgtcgttgccagaaaaatcaacttggaggcaacgtgttaacaaacatcaaacaactacccatggaaacactaaagagtttcattagaccaaaaagtagacgatgggcaataattggccctattgcgtgttgggatccagacgggttcccttttctggaatgaactataacgtgtatcctaatgattaggtgtttgttatatctaatatctaactatgaatgtcatgctacattattgaaatgactagtattttcttgtaaaaagaaatcaatacaatgtaatgctcataccaatatgatttattgcgtgtgatccactacttttttccatttattgttgataagtggtttccttaagttgatatagtattccatgttggtggttttattaatcttggcggagcttggatgtgcatctgttattttctttgtacaaaagctaggaagaagtaagtattgctttctgttttcatatctaagattgtcagactggatatagcttggatatctgatcaatgacataagttgcttttaagaaatcccaactgagaaaactagagatgttatcccatttttttgctactatgcgtgggcagcatgtacgagtgacacgtgtccatcactcttttgcactttggac

SEQ ID NO: 186112 - DNA, 9882 bp, Cannabis indica
catggaaggaaggcaagcatagtagaggtgaagagagcaataaatcaaattataccgcatcgtgataattgagttataattaatatgctagcatttagatttataaaataaaatatagtgtgatcgattgagataattatatatgtaggatatacaacattgtttcgtttctttgtggttgagactgtggcacctcgacccagccctatgataaattctaacatgatggtgtatgtatttgtcattgacattaattcaacatatagagttctaacaaatgtatgatcagacatgttctcgtgcctattatataactaatgtggatagtaacaattttttaatgaacatatgccttgttgtgctgtctaacattgatataaagcatcttatactattagtcaactgcggtttttttatatagttattaaattaaaatataggacaatatgacacattattattaatttgtaccctttagcattttttttttttatataattttacaaaaaaattatagggtcaacttcaaacatttatatatatggatgactgatgagctaaaaattaataagacatgatttgagataatattttaagagggaagaaacttatcgtttaagttaaataaggtctaatgtttggtcttaactagacttttataggaaatctaatttgacctactttctttaaatgcattttcaaatgtaaaaagatcaaaaaatgttattatgttggcttctttcataaaagacgtatggtggttttagagacatagttgaaaactttgaaacagagagtaaagaaaactgagagaatatgaaagcctcaggaccaagaaaatgcagcttggttaaactgaggaggaaactctttatttatacaccagattttacaagacaaagaattcttttaaaaacagaattagttacaagaaagtaacagaaataacagtctaaactaaccaaaactaacacgtgcattattggttatcatcccccctcaaacgaaaggtatacaaatcactttgagttttcctttaagataatgaaatctttccttaggtagagactttgtgagaatatcagcaacctgatcaacactcagaacatgtccaacagagaattgctcacggacaaaatacaaatcaatctctatatgtttgcatctagcatggaaaattgggttggctgcaagagctgctgcaccttgattatcaacccagataattggaatatctggtgatgtaatgtgcaactcagaaagcaaggaacatagccattttatttcaactgcaacattggccactgccctgaactcagactcagtggaagatcaagcaactacttgctgctttttggctgactaagatatcaaatttggtccaagaaatgctgcataaccacccgtagagcgcctgtcatcaagggaactcgcccagtcagcatcggagtaaacttgcagagagagccgagatgctggtttaagaaataacccctcattaattgtgcctttcaagtacctgagtaaacgtttacatgcttcccagtgcacactagttggagcatgaataaattgtgacaatttgttgataatgaacgccacatccggcctggtaaaagtcaagtattgtaaagtgcctgaggtacttctgtataatgtttgatcttcaaaagctataccttcttatagagagagtttataggcagtactggtagaattggaacacggtttagctccatctagatgaacttttacaagcaaatctgagatgtattttctttgagacaaatagattccttctttggttctgtacacttcaacaccaaggaaataatgaatggcaccaagatcttttagttcaaagcattgatttagatcagaaattaacttggtgattagagtagtattgggtccagtaatgagtatatcgtccacatatactaaaaatattatcaagcttttaccagaaccgtaaacaaacaaggatgaatctgctcgtgatgttgtgaatccccaggcaataagagtagtctttagcttgtcattccaagcccgaggggcttgtttaaggccatagatgactttgtgtaaatgacaaacatggtcaggtttagttgggtcttcaaagccttttggttgcaccatgtagactatttcttctagtataccatttagaaaggcattagatacatccaattgtttgacttcccactgaaatgaaacagcaagggttagcaccattcgaactgtgactggctttactacggagctaaaagtttcaccatagtcgagccctggtgcttgtagataacccctggccactagtctagatttgtacctgtcaacactgccatctgaattcaatttaattcgatgaacccacttattatcaataaggtgcatatgggattgataaggtactagagtccaagtaccattcttcttgagagcagtaacttccttgttcatagcagcattccaagctggatcctgaagagcagatttgagagacttaggctcacagggtaataaagattcaggaagtttgtgctatgtggccatgtatgccttgggtttaaaaatgtcatgttgggatcttgttgtcatagcatgtgttcttggtggtgcagcagatggagtaggcaaggactgtatagattcaggggaaactgaggatgaattagtaggcatattggcatcagttgaagatgacagatgttgatgttgatgtgtggatgagctactggaagaagttgcagagtgcaaaggagcagcataggatggaagaaagtcatttgctcattgacaacaacaggttgagtattagtttgaggaaaaaactgtgcagactgagtataaaattgagcagtagggaaggattcattggaatgtacctgtgttgtgttgctggtgttgaaggcaagaaactgagattcattgaaaaccacatttcgagcaatgaaaattctaccatctttattttcacagatatatcctttatgctgtggagagtatccaagaaagatgaattcttgagatctgaattccatcttatgatgagagtaaggccttaagtgagggaaacaagagcatcttaatggcttttgaattctgtaatcaggttgttgcttgaacagacattcaaatgggctaatattgccaattacagaagttggcattctgttaatagagtacacagggcattggaattcatgccaccaataagacatgtcaagaccagagtgagctagcaaggttaaaccagtttcagtaacatgtcgatgtttcctttctactcttccattttgctcatgtgtatgtgggaaagacaactaaaacttgatgccttgatcactgagaaatctttcaaatggtctatattctcctccttcatctacttgtacaacctttattggtaagttaaattgcttttccactaaacttttgaaccgaatgaacacttcaaaggcctgagatttaagtgttaatggacaaatccaagaaaaacgactgtagtcatcaagaaagacgatgtagtatttatagttatctttggacacaacatgagagggaccccaaagatcagtgtgaactagttctaggggctgagatgctctactggttgacaaagaaaaaggaagtcaatgacttttgcctaattgacaggatttgcaaaaatgtaaatttttgagagtgtgtgcaatgttggagttggttaatattctgctgagaacatcagaggctggatgtcccaacttacaatgccacatgtttatctcattatgcaaacaagtgttatagacagaagaagatgaacaaaaagcatttttattgatatagaattcatgacaagaggaaattgcagtaacagtaggtttacaagaatcaagagtattacaattacaggtaaatgaacttggaatagaagtgacaagattgcagtgtagtgagctattggacagtttggagtgaccatctcctaacaggtataaatcattcttgagaattcctttgagaaggatagcccccgagtgtttgtccttgacaaaacaacaagatttgtgaaattcaagaaagacatcattatctttagttaatttggagacagtaaccaaatttttggtaatggaagggacatgtaaaacagattgaagttttaagggagtacaattaaatgaaggaagagtggttttaccaatatgagagataagtaacttcttacaatctccaacagcaaccgattcttgaccattgtaaggtgtagcaatgtccaaagattccatagcaaaggctacatgatttgttgcaccagtatcaacataccatccaatgtcatctccaaagtcagggagagtttgagtctgatgatcaagaatagggctttgttctgtgagatgaacatgaggctgaggtgaatgatgctttggggtaacccagtttttgtcaaacctgtagtgacaggtagttgcagtatgaccaaatatacctacttttataagtaggttacccaatataccctcactctctacttaagtctaacatattacattaacttaaggagtctaatgaaaaaatcatctataaaagtgagtatatcttaaagaatatgaaaatgaaccgaaaaattaaaataagtgggtatacaatgtaatttcctctaaaaatatcaccattagagatactctaagcggccagggccagccctaggcataggcagataagattaggcctacgcctagggcccattcattttaagggcccaaataaaaaaatatcttttaaaaatatatttttattaataatttttaaaaatattatttataataagagtcccaaaaaaaatttttacctatgacccatttcatgtaagcggcatcttctcaaacaaaatttcatttgatggtgaaccttcatgcgaatttccccttggtgagatcactgcaactttataaccaactttgtggttgcaaggctttatagcaggccatgatacaatattacttatcttttgactacacaataaatttttaggtaagcacttggttgaggaataaaaatatagaaataaaatttaaaatacacaaaaattaataaaaaaattattaaatttaatctcatcatgcgttgaaatggtctttgcttttatttcaaaatggaatagtcaatccatcaaaataggtaaaaagtcattcattagaatgacattcaatagaatgacattcaaatactttaatatgcaaccaaacaaaaaaaaatagaataaagattgtttcctttgtattccatttcattttatcacctccgaccaaacttcactttttcctttgtattccatttcattttatcacctccgacctttcaattattgttctgagaaaatcacaatcataaacttcacaaacgattgtgagggagagagctttcctgtctctcctaacccctcataatctacaacagaaaggagtagtttgtgttgctaatgcaattaaacctgtcttccgtcactcttttatcaatttgttatattattacattaacaatacaaatgactgttttaattccaaaaatttatgataaatgtgaggtcactgtttctagggaaaacagaatagcagtgccatgcaatgcctacatactttttgacaaaaagagcataaaataattgtgaggattctttacaagtcatattgaattggaaccacaattgacaatacctcatttaaaacttggtacgttagtccggtaaagttctccattcccaagcctgagtgagtaggatgaagccccaaagcacaaaacatacgagttaaatgcaggtaatgagatctgcataacaaacaagttctgacgaagccattgcttgattcgaaaatcccatctcacaattatgaaatgtgtatatgcattctcattcctctgttggtttgttgaacgctaatcccttgatcacatgtcgacattggaacctaaagaataagccgaagatctttgtaaaagctacagaaattgaagctgattttgtttttttaactgaacatgaataaaagagctaactagtggaaaattaaaccatcagtagttataagttctgcatgagttagcaaagttgtaagcctctcataagatctaaaactaaaaaacatagattaggaaaatgagcagcaaatcagaccatcttgtgctagaaacagttgatttagaaaagacattctttaaaatgttagaagcctctcttaatccctaccagattaattcatttgcagtggactcagtagagctctcagtgtgaagctcaagatgattagcatccatttgtttacaagcttgggttctacacttacaccgcactatgaacggcacaacctgaaaaaaaaataatggacttgtaacaatgctatatggaagcataaattggatggaatacataacccatttgtgatttgcttctttgtatgacgactgggggaaatgtcattgatattatgaataaaagtgcatattgcaagtaaatggaatgggttatgtcctttctttaaaaagggcttaacttacacaacaacccctctaactctaaacatagaaagcatatcctttgagatagtaaaagatgataatgataatgcaaataccattttaaatcatttatgtaatcacctttttgctatatctgaaatcacgtttggggacaaaatgaaggggtagatttaatgaagacggagctttaaccaatagaaacaacttagaaatgcctgagaaagttcgatcagcagaaagaaaaacaaatgaaaagttaacactgcttttattgtaagctacaaacatttcttcataaaaagcatgcttaagtagctacttttacattatatgaatgtaccaggataagaagcagatccaacaccctttgagatcagcccccgaataacctgtaaaagagaagataaagtttttgacttatggagcaaaggaacaaacacaaatttgaggaagaaagtagagccttgagaaccttcttcgccagcacttctgctgctctggttttggcgaaatcaggagatgtgacgacagaagcagagtggtgattgggaaaagaaaactcgtaaacatctcggggtcgtaatggagtagcgccaaggaccaaaattgctacttgaaagttaggaacttcactgatcataagcttaagcgcagtttggaaatctgaaatggtgtgcattaacttgtcgaatcgtttaattccatattttatctctctcatttcactagcgtgctttcttcgaaatgccgccgtcccttgaatttgcgcgagatcagtttcctgaaaatgacgaaaaagattaaaaaaaaaatccccaattcttcaaagaaaaagaacaaatccaaattcgattttggaaaatctactcttaagttcacaaatataccaatttactatactctttacaccatttctcgaattcgagagtgatatcctgcaagacactatgtaaaagaaagcaacatcagatttctgcttacaggaaacatagagaacgtaaaggaagcatgatttttactctcaactttccgagaaaccaaacaggtcgcaatcacacaactcgaatcatttaggtgtcgggttttggtatgatttctcagagaaggaaacttacgaggggatttgttggtgcatgtagagaaggaatccggagacatcgttaatggcatggaagatcattgagcagtcgatagagtcggcgttggtctcaatctccatacagttcgtctccggttctgagcatccctgcccctcctccatggctttaggtttcatttcgctttggtaaaaaagacgataaatatcgtcatttaaatttaaatttaaatttgggtgttagcacgtagtttaggcggggaaaatcaacaacgttggagattttttctttattgctttcctccttgtacgtgatgaaaagaataagcatagatgttgttagaaaaatgtgaaatatattatataactcatatcaaaatatcacaataaagttgtccattcgggtggcccggcccagcccggcttggcccgtcccgtttttataaaagccttgtgagcctaacccatcctattttataaaacaggctgggtcgggtctagtccatattttcaaagtaagctccgcccaacccataagtataaattattcgtattgggccggacccagaccgggcctaaacaggccaacccattttttagggacttcccgaatatgaccatccaattcaaataagttctcttaggatttatcttaagtacttattgatcttaagacccactggtcacatggccaacttcgcaactgccacgtctattgggacaaaagaggggcaacatttaccctctcccaagtcttatttttgcaatcttgtaaaatgagatttgagactcgcctcttgcctcagagagtgacgtaatcggtagtctacacgcgcgtgggttatttattatttataatcatttctcctcgtttttggcaaagaacaatttaattcccgcctgttcgacagggcctctcattaatgtcgttgtcaaaggagtactcgagcatttcaactgccctttttttttcttcaattttttgccaaactgtcctggccattagatcactagaatttggatggtttgaaccctgactgtcaaatgacaatcgattggcattcatcctggaggacctataaaagcttgtgccttttcctactgaaattcttacccactcattgtttctcgctctcagactttctaaaccttctagaaaaactcctaactctttagattttctcttgctctcctctatcgttgccaggaaaactaatactaatgtacagtggtttggacaccccctacatcttcttcaacatgtaagttcttacttctttcattttcatcttccgaaatgttatgtacattgtagcacattgttgttcatgcatttgattttttgaatgttaatggtgattttcctccgaacctccatttaaggttgcatttgttgttgttgttatttttttcttctctttttttagagaaaggaaaaacctttgcttttagaccttggtagaaatttttaggtctagggcttacgaagaatcataaaggttctcatttcattcctttttccttattcctttgttgtggcttggatattttgcacctgatgtatggcaataggactcgttagattcttctctgcctacatccaaagggggcctctctctagtggttagggaactctcattcccctttttaacttaggatttgacaaggggctaacagcttggtttcttatcttttagatgagtgaagttcttcaggatcttcacaagcacggtttcttcatatttgaccaagagattattgagcttcattcaaaaaatacaatgtcaaactctaaagtaccgtcaaacactactcttgatgataatccctctttggtcaaggcattttaaaagcttgtccccttggatgtcgttatgtaaggtcctataccttacaagaagtacatgtgtcgctccaacaactgggaggctgatgagttgcactcatccttgacgtctactcatcaactggagaaaattgtggccgtgaacgagatcaagccgatcggttcaagagtttaccatcgtttgcccagagatgaagaaatacccaaccacaactacaacgactttggagagtggagccaaactcacctaatgtcaggagccatgctaccacttcgagattattttgtaaactttttagtttttgttagacttgccccacaccaacttatcccacaagcataccacctgcttttaggtctttttatttttttatgctgatagggcactacaagaaaagcaactttt

SEQ ID NO: 186113 - DNA, 3527 bp, Cannabis indica
atcaaccagtatgctaatatgaaagaattacagtgatgacgagtgtacagtcaattcaagattaacccctctctcccccattactctaactatatatatatttatatatattatcctattctcccacttatttaactctcaatacaatgactcatacacccttttatttatacccttctatcttgttctactcattttgggatctaacacatcacgggatcaccagccttgtttggcaattcacatcccctagaccacttctgttagactttagtccctcaagtttgacacactttgcatctcacttagctttactgtttttctgttcttatgacataacatggttcgagcctagcaaattatcagcagcctcacaagtaatattgacgctcaaaataaaacaaagaagcactcctgaagtcacataccccaggtgtacaaaaagcatcttgcatccctagcatctgtgtttcagatggctcctccagaacctacaataaagaaagcttaaaagttagccagatagcgagtcaaaacacaaaaaatacacattaaatgcgaaagaaattgaattaaataattttttagttagctaagaaaataaaagtcaaaaaattcctaggacataatagacaaatataaattccaagagaacatacaaagtctctgatctgcagatcttcaccagcaaaatggcttgttttcactgcaattaatcaattaatttacataagatacagcaagaacactaacttttattacaattctatgttaaatcaaataaaaaattgtttagaacctgttttattagaaaagtcaaaaccacccaaagatgggattgctgcagaataattggaataagccatggacaatcgatgcagaagggacgcgtggagctctcttctattgtcatcagagacattgtcttctttagttttccattgtacttcagcgtctctattttgtccatttcttaccactgacaaattcggaaagttctctgcaaaaaattgcaatactggggtctgcaactgctcctttttaaaatacgaacggagcaaacgcaattcagtcaacagatgctcaatctctacatcccgaatagctctaatggcagcaatttgacgctcaactgattaaaattgaaaaaaaaattataaccaggcaacataaaaatagaatcagcttatgatatattttgtgagctcacatgtcatgttaaaaggagaaaactatgtcttgttaaataataacaactcaaactcatgagggcattctaatccttatagtaattagtcagaaatgcctacaattcctagatggacaggaggttaatttgaatcgccaaactcatggaaaataatactgtggtacaatctaaaaaaaaattcaattacccataatgcaatcttataaaaaacctcagctaaaagcatttctcattgaacccattagaaacacaaaaattcacagttagcattatggctactaaatcccagccactggcataaacaatgataatcattagtaaacataatataccatatgccttgacttacatatttttaaaaactctacactgccttaattccaagtactaataaaagccaagatgaaaaacgaacgaatagaaacaaagttgtgaatcaataacataccatctgggtcaatgaattgagcttcttccttatcgttttgagtttctttcacttcaacattattcaaatcagcccctggtgacgagggagcttgtttatcagttgttttcttaacccttcgcctagccatatattcaaataattacagaaatctcgattattctgcgacagacaaattgaagttacaatgtgagaacaattttatggtttaaattaacgacatattttagatgtgattagtcaatgatacttaaactacttgattttcgaataaacatgagaaactcatgactgataaactagaacacagaggggaaaatggaggttgtcgctagtcttttaaaaatacactcaccttgccggaaaaaaaaaaccagattaaaagctttgaagagagagaaggaacttcaaagagaaataagcagggatatgtgggcagtgctatttttcttctattggtatgtatggagagcattgttcatatcaagatggcaaaggagcaatgtgctaaggatgggaatcttcatgagtaagtcaacgtggcatttcgctagtataagtttctaagctagagcccaaactagctacctaatctttttctaatccaacttaagcataaatacgaaaaatttcaagattttcttaggttagtactctgtttttcttgaggattaccattcatccaagatctagctagtcctaaaactttgaatcaacgaaataaaagatcacaaacatacaattaaaaatacaaaatctttaaagcctgataaagaattaaactctaactaacaatccaacacactcaaacaattcatactcaaacaaagaagagaaattcaaatataggcaaccaaatcccagcaattaaacactccaagtgaaaccaaaaaaagccattgaaaattaaaatttgaaaagtaatgaaatagagtgaaccaaccttgcagtccagatcaacttgtcttctcttcagaaattaagacgcaaacccacaatgctcattgtaatttaaaacctaatcaaaacaaaacaagaaaatcaaaagggaaatccatagattcgccgctgcatgtttgttggaaacaaaaacctaggtgtaacaactgtatactagtcttgagggcacaaaagaagacggaggaagaggatgagaggagaatacctgattaaagtgtagcttcgatagaatatcgaattttaggcagaggagaatcgcagaagtcgagctccattgttacagagacagttctctcttctgaatttttgttttctgaaaattgtttcgaaaaggatatggctaaggccgtattttcttttatgaaaacaattttctatttcgaaaaagtgagttatgaagccacaaaaattgaattaacttggagaatttataagagcaaaatttgagaaagttggggatagggaagggggaaaatttaaaagaaagaatcagacttggaagggattttttttttttttttttcctttttgaaataattttttttaatatcatttcccacaataatttattctacaccaaaaatcactctctatatatcttacctaatatataaatgcctatctaacagattttgttatgcacttcacagattggtgtgtatttaacagaatatactatttaaaaagttaacttttaacagacacacccattccattccaagtagagtccccattcgattaacaaaaaaactattattcacaaacgagacactctttcagaaaagacacccattccatttagaaaaaaaaaccccattattcacaaacgatcaagacactccttcaaaacatcaattcgataattataaatcacaaataaacaatcaaaaatctaaaatccttaaaagc

SEQ ID NO: 186114 - DNA, 2099 bp, Cannabis indica
taaagaaaaaacaaaaagaagagattaatataaatatatattaggaaaagaaaagtagggcagaaaaatgcatcgatgacctaaatttgtgttgataataagaataagaaagaacaacacaacactcaatttgattccacttccaaatgctaaatgacaaataacacgactacgaaacaattgcagcttttccctatatttatttatttatttatatatatttttttaaaatttaaaaaaaataattaattaaattaaataaaaaagaaaaatataaatgaaaaaacttcttcttcgccgcataatacgtggcgctttctcacatcgatttctatgctatttttttctcataaacacccaaaaaaacagaatacgagacttgatagttttttttaaaaaaataataaatcaatatttattttatgaaagattttattacacaccataaaatgatatgtacacaaaaattaaggttaaaataattttttaaaattactcttaatatatattttttatttttttaatattattttgtgttaattttaatatttatttttatttttttctaataaaattttacattattttttatttaattttttgttataatatttgaaatataataaatttttgtttgattggtgtaaaaatatgaattggaagaaaaaaattaaaataaaattatttacaatacatcttcttaaaaaaaaaatgtactgatacacctttatctatatatttaggtatgtgaaatagttttttagtcattctttgtcacggtcatgtacgttacaactatttgatattttcggtaaaattttaacaaaaagcttaacacgcccaaaaaaaagttcaaacagtgtgttgcccgtgtaattattttattttatacgcgtgtgaaatagactgtttgaatattgtattctatattgtaaattattctaaatttctcaaaatttcgtaaaatatcttagataaccatagtaaacacgaatatgaaaaaaaaaaatatactaaaaaattcttgtggataccgaaactagtagaagatgcatcattgtataccttttaaggggatgcattgtaaaatgacctaaaaatatatattttatgtaaaataaaaattattaaaatagggtggatttataaaattttcgagttgcaaatagaactcctatttatttatttatttttcaaaaattggaaattgcaaaatttgtttgattgaatgtcggaaatacccattttgtaattgaccttgttttattggtagtaacgggtaataaggtaaaattgtctttatccactttagtagtgaatgtgatcaataataagccaaaataaagttattaatatcagagaatataataaatttatatataatataaaatataaagtttaattttctgtgttaccctagattacaaacactagaatccatctgcatttcagctaccgatctaaccttttattaaaactagaatgtgtctttttataaaattactattaatcttttcaatttatttgactctattactaaaaatccacttttgtttcaaaaaagtatcttactgaattgcttaacttacttactaattattaacctaattagcactaattaaatatataaaattaaaagaagagaagaatacttgactttattctcttttcttggtttattaactttttcttcattaattaaatattaaatattaaataagttcatatatctacttgcccaagtggcattaattaacaagtaatctaaaaccataatttaattcattcatgttccatatattatttagaaaaattattttatatactattttcttaattttttttcttttaaatttacaatttgaattgctttgatagtttttatgtggcttgctatgtagactatagttacaatttaagttcaaccgttaatttttacgtgggttgctatgtagactttagttgatatgtgaatttttgtaaaaataaaaacaaaccactttaaagtataaaattaaaaaaatctctattattaaaccaatgtacgtggattacgtaattacccctttataactcatttatttatattaattaatttt

SEQ ID NO: 186115 - DNA, 984 bp, Cannabis indica
tgatgtgctagtgtgaggctgacctaccaaaaaagagatgacatgtggttgaatgctaaggaacttccaaaactatttgagaaagttgcaagtgcaaggttggatgtttacgccctgaaatcatgagtcagaagggcattaaactgtggttggcattaaactacaagtgcaaggttggatacgaagagagctataagtgcatggttagatgtttacgccccaaaatcacataagtccgaaggacattaaactgtggatgtggatgatagtattgttgagattgagattgatgttgattgccaaaatgtggttgattaccataatgaggaggtttgaattgttgcctttgttgctgaggtgtatgatttagtagcttaggacactaagtcttctaatgtcttttttgttcacaaaagctgcactcatcgatcccaaacttttgtgtgaggtttattctcttggtatgcaaaagttctaggggaaattgccaaggtagtttggctaggtgctggaaggatgccttttcttgctttgagacttaaagacaaatctcatctaccaataactcattgaccactaaatcaacagaaggaagtggaggacaatgctaaatagacccttaagagtccctcaaagtcatcacgaagtgccattaaatattgaattaattgttgtacctcctcgaacattataaagtgcaaaagcttgcaactttgtggattaggtctagtcaatatcccaaaattttgtaataactcaatagaactcttgaatgttcatgtcttcctattcaagagctttactattggaattctgctttacaaaattagactatgtatattgtagaaatgaatggattgtatatttgattcaatagaatagtatgtatttgtatacataactaaatagactaaataggaaactacttaaattagagagattaaaaaagaaattatgtaattagctaatatattctaacactcc

SEQ ID NO: 186116 - DNA, 1033 bp, Cannabis indica
aagggaaagaagtcgtctaagtcctcgcgttctaagcggattaagaagaaaagaagctctgatacagagagtggaagttcccatcattcagaggagaatttggattctgaaattgatgccaatagtaaaccaaaggtggaggagttagaggaagaaacagatatggaggccctgaaattcaaggaattgattgaagcgcagaagaagcctgctgcattagataatgaacctatggttgggccagcgccattgccaagagctgaagggcatatcagctatggtggtgcacttagacctggtgaaggtgatgccattgctcaatatgttcagcaagggaagcgtattcctcgtagaggagaagtgggtctttctgctgaggaaatttcgaagtttgaggatcttgggtatgtgatgagtggaagcaggcatcaaagaatgaatgccattcgtataagaaaggaaaatcaagtttatagtgctgaggataagcgagccctggctatgtttaactatgaggagaaggcaaagcgtgaacacaaagtcatggctgatttgcagcggttagttcagcgccacattgggcaagacgttggtcctacccacgatccttttggtttgaagccatctgaagcttcggacgattgacctcatcatgttattgttatctaaactggtattttgttcgacctctctttttatttgaatgtattttaggtgatattgaacgttgcaactacttttgtaaaattcttagcttgaaatattttgtgcatcagctataaaattatgacaaacttggtgtttcgattataatgttgcgataacttatctaactgtgctaaggaatgagtttgtagctggtggtgaatttgtatgaaattatgataactaaactgagaaaattttgttcctcaagccttacagcccaagattaatttgtaggaaagttgttgtgtttgtcaggcctgttttgtcatttaaccttgctgagtaagaatttgtacttgatctgtaagatttacaaatttggtta

SEQ ID NO: 186117 - DNA, 8182 bp, Cannabis indica
accttggtgaagtattggttgatggtcatgttgcgctgcttgattgagagaagctcattctccagaagttataatctcgtatcattcttcttggtgaacactgatgtgaaagtatcccgtgcttcttttggtgtcttcaccgtctttatgtgttccaacatctcatcttcgactgtggttcgaatcgtaaacatgattttgcccgctttaatctttcatttcttccaagcagacgcgtcctccaattgtgtgacttcattgccaccaacgcaagttttggccttggagatatgcctccattgcattgaccacgtattgtaattttagttgttaagtttcttaattccaccgaccactaaacatttttattttaccactaaacacttctattaaaatacttttaaattggtgcactttagaacacacgcaactttttttttttcttgataaatgttacctccaacggagcaacaaactacaagactaacgaaagcagaaacagaggcccaaggccagagaaaacagcaaagtacagactaaactaagaaaacaaagagctaagaaaataaatagcagaacagactaaaaactaaaaaaaccgattcagccatccgccccccaaggaggcggggaactgtcaaaattggccaattcaatcgatccaaactgtccagattgaatcgcccatcgagccacaaaatcgactgcacaattgagtcttctcgggatccagatggcctcccacaactcaaaactcttggcatgactcaggaaggcttgcactagagtttgaacgttgtgattgagagttgatatccttgtgtgatcagtggtaatggcctctactgcacccttggagtctgattggaaaataatatttttgtatccaagcttcatagctatatccgcgccccagcagagggcgactacttcacctgcaagggggtcattataatgcatacactttgtagatatgttcttaattgtgctatcttcattacgaaacactgctgccccgacagaaaacgcatctcctatggcgatgtcagtattgcacatgatccaccctgctggtgggggaagccaggtgctaggtagagtggcctgttctttgtaagcttcacccaattccaagagcctgaggttgattcgctgtatgaggacatttggtggtgtgaccttgccttgatgcactctgaaattcctttcaagccaaattttctcaaagatagttgcagctccactaagcagtaagttgaaatcaatgtgtggtggcctattggcctcattgtggaaccaatctagctattcgtcccaattggaggcaataatagcagaagttctaatgtgccagtcactcccaaaccacaaagctctagcaaattcacactcccagaagatatgaaacgagtattccacttgcatagaacacaaaggacaagatatgtcagtcagatttagaataaacatgagtttacctcttgttaacaaacaatcggctaggatcctccaccagaccatctttagacagttgtgtatttttgccccccatattcgtttccacttagcgttttggctcacacagtcttgaacatttttgatagttctataggcagattttatgctgaattgaccactttgctccggaagccatagccaagagtccttggcagggtggttcgggagggtgatattcagaattcgtttagcgtctgctggttggaaccatcttctcaccaactcctccctccaagagccatctccaatgaagttactcaccaagctgataccttccgtagcatccagccgaggctgaggttggaggatcagtccagggacccacggatggaaccagatggaagtggtttcaccatttccaatctttcgacaaaggcctctaagaataaactgcctagtattaagtatagctttccacataggggagtccgtaggttgagtttccatgtcaagaaatggcgtatttctcatatactttgcctccattacttgtttccacaaactgtcatccgcctctaacattttccatccccatttcatgagaaaagctttgttagtcgcttccgtgactctgaatcccaggcccccgtacgttttgggacggcacagggtatcccaagccactggatggaatactcgtttgtctttcgaatcgccccaccaaaagtctctcagagttctgtcaattcggttggttgtgttctttgggatgacatccgaagatgcgatgtagttagctagagtagaacctacggacttgatgaggcaagctcttcctgcacatgatagtagcttggccttccacccttgcactctattgaggactttatccactaggggcttaaaatcttcggatcgttttgatgatctgaacaggggaaggccaaggtatgttgtgttgggggacatcttcctcattccccaaaattgggaaatagcctgcactgtccctcgctgcacccctttggagaaataaatagaagacttttgaaagttaatagactgtcccgaccattggcagtacgtgtcaaggcattcccggaacgccttggcctctctcatcgttgcttggccaaaaagaatgatatcatcgacaaacattaggtggttgaccgatgtaccttgtctaccaatcttaaagcctttgatctgccccctaccctctttcaaatgtaggagtcttgatagtgcttctgccgcaagtatgaagagtgtcggggatagaggatctccttggcgaagccccctctccggagtaaggtttccaaccactgaaccattgaggagtagtctgatttgacgaaccgatatgcaagctttgacccactcaatgaatggggaggttagaccaatgtgtctcagaacacttaagacaaactcccattccattcggtcatacgccttctccatatccagttttatcatcatgaatcctcttttccctttcctcttagagaaggattgcacaatttcacgagcgatcatcgtgttctcagctatgtatcttcctttgacgaacgctgcttggtttggcgatattattttttgaattacgcttcggagtcgtgtggctattattttggatatgactttgtatgccacattacagagagcgatgggtcggtacactagaacacacgcaacttagcacactaggacttcacttatttgtgcacacaccacaaagaactcaaggtccatatatgtagatgttgttggtcggtagtgagggcttatgtctaaggcccaagttctaaatagcacttaatttatctcaatctttctcaaagtttcaagaatgttcaatgtaggtgttgactttcaacactcttcaaatctgactttttttagaaagaaaatttttatattaaactcaaaagaaaaagttgaattaaacttttctcgtagtgtccaaacagttgataagtttacatcaccaaaaaaaaaaaaataatgacttacggcttaaatatctaagtttaactttcgattataaataaatactctttcgattataaataaatactttccgatcgtagataaatagctaagtttaatttttaaaggcaataatacttgttatagttctaaaacttttgtaggcacatgtccattaagtgtcaaatcattatatgtgtcaatttcttattggtatatttaaattaagttttaaattaaaaaataaaaaatttaatgaccttgactattgagagattgttatgtggttattgacttgaaacttatcaactaggtacctcctaccaaagttctaaaaatatagcttaagtattatttctgtcgaagaattaaactaatgtatttaactgcaattggaaagtatttatctataataaaaagttaaatttaaatatttatatcgcaaattactcaaaaacttatatttggatatttctgttgttgcttccaaacttagatgatagttcatgaatttatatactcaaatggtagttttgtcttatgagactcagcaataaaattttagcagcttgtagtttggggaagtacactttttggttagatagtgaattatctttgattggagaaggttctaagactgattgaagatatttgtattgtaaattcttaagtgatttacttttttttttgaaaaaatattccccgcttctgtgcaaatatgatttttggagttttataacttacataaaataaaaataataataataaagtctagctatttagctatttttggcatcaataagttttaatgtttatttgtgggagtaaatgtaatctcaatcaatgccacaggagcctggacatatgctgaagtctctaaacagacagtcaatgcttgagaaggtgtatactcgtgaagaaattatgctataaagttggttgttgctctcattaaagttgacggccacaatttgtataaaattacaatctgtagtttctctgccagataaatttgaactctcttaataattaaggtttaaatataaagaaaatgatgctcgttcataagcagagcacattcattataaataacgtttgagctgttagtatcagttgccgattttaaaagcagcagtcccggctgggctctaaagtttttctcaatctcctaaatcccataatagaattatatatccaaaaaaactagccatatgatgagaagtcaaatccccgttaaaaacaaaattaacttcccagaactaactatagctctttctaatgacatcctaaaatgtagttgctgtgacacaaagtcaaagggtgttctttgatataacttgaacaaatctaacgaaccactgagcatcagacgaattattctcctgctgcttcacttttggtagctgttgtccgttgtcaatcaaaaatttggcatagtcaatagtctttggaagattagaacaaggtttagtcacaagatcagagtcaggaaggagggagaccaagaatcttgcaacctcgtgcatggttggtctttcccttggattacgtttcgtacatagaagagccagttggaaggtcttcctaacatgtcccaagtccaagcaggtaacagaaacctctggatcgacagcgtccatcaccgtgtcactatctgccttggacaatatctgagataatgttgacacacaaggtcaaggtaaataaaatgaatgggttaagaaaggaaaaaattataactcaaaattaggtatatcggaacataccagttgatgcaagtttgattcgttatcaacagctttcttccctgttagtaactccagaagaactatcccaaagctatatatatcagacttttcgttcaggcgagatgtgcgtgcatattctggatcaatgtaaccaatagttccaagaacataagttgaagcgtgggtcttagcagttggaatgcatttagctatcccaaaatcagcgagatgagcctcaaagttttcatccagaaggatatttgaggacttaacatccctgtgaataattcgagggttgcaatcatggtgaagataagacagcccctgggcagctccaattgctatccttaatcgtgtttcccagtcaagtttcacttttttcgaaggtcctgtaattagtgccaaccaaaatagtagttcagacttgcataactattcatcaaacctttattttattttttttattatttttgtgtatgagcgggaatgaaaatttctttaattgttaacaattgtgagcatactaaccatgcagtaaatcccaaagagatccattcttcatgtagtcataaaagagtaggttcccgaactgtgatacacaatagccatgtagactgacaagattgcgatgccggatgctaccaatagtttcaagttcagtctcaaactccagcaagttgtgctgatcattgtagagtcgcttaattgcaattggtcgggaattcttgagaacacacctgtacactgtgcttgaagcaccataaccaataatgtacttctcgctcaagttctcagttatcctcattatatcatcaaatgtgtgaatagccatgtccatgtgaagaataactaatttggaagaacctgaaaatggtgaagtacataaaaagtaagattatggtaagactttttgtggaaataaatggtagaattgatgaaataccttgaccgatcttgccagatcctgtaatcaattcatttggttggtgggatttgtaaatggcaactattaccaaggatagcagtgttatgaatcccaatgtcatacatacaactgcagctctggagaatactggtagcatacggataagaatgacagcttgtcaaaaaccaaggacaaccagcaaaatctttgatgcaaaaccaaaacaaattacacacaaaatcatacctttggattttggcacataaggtctgcagattgaccccaaccagtttccacacaacaatggatttcctatgaagctgtcaaagaacccaagaactcaacacaattgaatattaataccgcattgcaaatatcggaattaaaggaagcatgcatacctgtctggtgacaaattagaaaagttcctagtaggagggacaactccagacagattattgtaagaaatattcctgggatgtacggacacacgagtaaataacaatcataaggtaggcacataaaagaaaagaaattcaaggattgataattacaaggaagcaagacttagacaattggcaagctgagcaggtatctccccatgtatattgttgttgttaagtatcctgttaataaatttctttttaacagtatgccttaaaaagacattagaaacagaagcaaaaaaattacacttacaaagacacaatgttctgcaactgtcccaattctaccgggatgtgaccggcgaggttgttaaaagacatatcactgtaaaagtaaaaacagaaaaattagtccttgataaaggtttaagatttttgaacaaagttcaggcaagagaaacacatcaaatatcagtaagagcttacatggtcactatacttctgaggttccctagttctgctggcaattgaccatcaagattattcctacttaaatttctgcacccatatttgacagtttggaataattttaaagatggaattcctcgcaacggaaaccaaattaccaaaaggaaaaagaatggacaataaaatggccacacttacaaggtgagaaggtgctctaaattaccaacagaagctggaacaggccctgagaatctattgctggacagatccctgaatttaataaaacatttattatcctctgccgtccaaataaatggttgcaggtaaaaggcaccattaaagaacatacaatgtatcaagattgataatgtggcctaactccataggtatcttccctctgaaactgtttgctgaaaggttcctgaaggtccaatcaaattaattaccattactaaaacagaagataccatgaggttgcactaaaaatgaaacaaaatcacgttattactaacacttacaagtaagtcaaactctccaagttccgaaatcccaaaggaattgatccattcaagagattaccatgaacattgctttgagacatgcaataagatgcagttagacacagttcataagatttgcataaacaagcgtatgaaaatatatacaaagacaaaattcgagacatcatacaattgatttaacgccgtgcaggaactgatattatgaggaattggtccttcaaggttattattcgcaagattcctgacatctcaatatgtaaatgtccacattttatcaaataaattaactcaaatgcaaacatttgaacttacaactcaaacaattgttccagctttccaagttcaggaggaattctgccaaccagttgattatcatttagctgcctgcaaagtgattccttcagtaacttaatacacaaataaaaggaaaaatatttaagtttgtcaaataaggctcacaaatagctaagtttagacatatttccaagctcaggaggtattggcccagtcagcttgttcccatgaagatatctagttaaaaaaagtcaatgcattagaaaccaagtttcagtcaatataatgcaaaaccattttcttttctctcaactatagaaactcacagttttccagtgtaagataaattgccgagtattgcaggaattggcccaacaagttcat

SEQ ID NO: 186118 - DNA, 2558 bp, Cannabis indica
attttttttttcattggaaaataacaaataggtgaaggaagaatggatgttaatccccagtgtcatatcattttcaatattttcggatacagtaaatgagcagcaatatgatgactttgctgttgatgctaagagtgcagagcttaacaacataactcaaaatagtaatgacaccaacaaagaggccaacggaaccaactccatcccttctgcaacaagtgaagttaagtttaacatggttgtggccaaaagagatgcatcagtgccaggaaatggcgagttgtccagtggaatctgtggaggaggatgtggaagtacatttggaaacatggtgaagagtgatagctgtggtggatgcggaggtggtgggcaatgtggaaatatggtgaaaagtggtggttgtggtggtggctgtggaggttgtggtgctggtggatgtggaaacatggtgtctagtggtggctgtggaagttgtggtgccggcggatgtggaaacatggtctcaagtggtggctgtggaagttgtggtgccggtggatgtggaaacatggtgtctagtggtggctgtggagggtgtggtgcaggtggttgcggtggctgtggcggctgtggtggtggtggttgtggtgcaaaatttgctcaatctgacaacccttgtgcagatgcactgtcgaagggaacatcaacttcccaagtcaatgaggcagtagctgcttagccttaatggggtcactgttcatatcatggactcgaaaaaagaaatgcactgcatcttaaaaataaagttcttatgaagtgacacttccttgttttgtgtaattgggtgtattatggtatctactctggtaataaatcagcctgagaaatcactctcaattggcttgtacatatatgtttatgcaatgtccaattactttgcacatctgcttttctataatgtcaaatatctgaggtgacctaaaactaagatatttaccctttgatgaaaagctttctgtattcatgttcatcttatttatatgtccaaactaaaggtcattgtctccccaaataaataaaagactaaaggaaacatatgaaaccatccaacaaacatggtcctagtctataaccaaagccataattgtcgctttccaagttggaagctgatggtaaaagttgtactgtacatacacatcattaggttaagccaagaagatgtaggtaacaatttacagttaaaaagtaggtaaatggatagatatgtaatgaagtatagtctttatcgaagttgagaaagttaacttaataaatgaagactatctctcctttcaaacactgttatcaaaaggctgaaacaaattgaagttttggtatagttaaattaataggttttcccatgtgaaaggacagaacccattagtaacttatgtacaatgattataatacggaccaaccaacccccactaagtatatttagacaacctgtttcttctattactttcacaccattggttctcttccattgactagggagttgcatacttacccaagtctttaataactaaattttccaacttcacgtatgtgtgaaactataaaatacgatacctttcctcatagaccatagtgggattgggataatatacatatttctcatgattcctaaaccaatttttcactttttgagtttggagtccttttccaagaagtttccccgcaaggaaatgacatcatgaaaaggacccatagatataattaatatatgctctaattactaggagaagtcttttaagctatcaatggcctcgatttatccacctcatgttgtgtcgtttatgcctcgacaccttactcttatccttctatattcttcaactcactcgtggcatcaactttatgaatccaaacaagaaatagcgtgttgcttaagattagaattctcatctaattccaggctttgttaacttgattataaaaatatcttgcacttgcacagcttccattttcaaattgtctattaatatttggcattgttataaaacacccataattaatcatttttttattaaatttattatatctcgcatgagagacgccaatagttatattatatctcatatgataggcaccacgaatactctttaccatttatggttaaatattatatggggttaaatttttctaaaacaagtacaatggaatccaatttacacaatttttaattgtcaaaggtcgtcttacctttaaatatgaaaagtccaaatcatggcacacgtgtgtaaatgtgacattctcattacttacttggatttacgccactaaaaaaaaccacaaccacttccgatgaagacactagctgaaatttttaacttgttaagaacttgactggaggatgacattggacaagttaggcaacacataaaatatagtactctgtacaaagtgcactagtaaaatttcatagtaagatcttaaaatgaaaaactgtggtatctgctaatactaattgtttctctcattgcagtcctattttactgcatttcataacaactacaactagtaataataataataat

SEQ ID NO: 186119 - DNA, 1762 bp, Cannabis indica
tagcataaatatcgctgaaatagttttcaattgttctaccaataccctaaagagaggattgttcattgccttgatcatcaatcagagattttatagtgttttaagagcgccttttatttgctttttgatggaaaaattatgtatttgagtcaccaaatttgagccaagaaactgaagaacgctgctgctaataatcttcttcctgagttagaagttcaactaagattgatgcactcaatttcaacaagtcaaagtgagtagggctagtatcatttgagttgttgagagaggccacttagtcttgagtaatcttgattttatttggaagatcaccaaatttagggcggtgccaggaagatagttgagaatcgcaagctgagatgattttgatgacttggtcaggaggagtcgagtttgaaaccgtccagaattctgcgataaaattagagaaagtagcttcttgcagccatattttttcaaacctgaatcgggattttgtcttccgaatagcaacatgttgcaaggcagcaattctagttttcaaagctctgtgatccgattggtaaagtccaaatgcaaaataatagggatagtaaaccctgaagacagtaggagttaacaaatccataatccaatcgttctttaacattaattcccttaacactattgttatgccaagtaaatctttctccttcaaagtttagttcaggatgaccacaaaaataaatagaatttctaaaagcatcaatttgttgttcattcttttgtggaccaccaagcttatctgagtgagagatgatttcgttaaaatttcccataactaaccatggcattaaagggacagtgtctctaagcttcttcaacagttcctaagtaatagctctttgtgaaacaattggagctctataaaaactagaaaaatgccaagagggaccatcatccacagcaatacatatagcaatcaacaaagtttattccataatttaaaattgttacattaacattagacttcaaaaaaaaaagtagcccctactaagacctattctaggaacttcaataccattaggaaatttaaaagtagaacaaaatttagaaatagaaccaagactaagtttagattccataataaaaccaacatcaggattattttgtgaaatgagtagacgaagttttcggaatgctctcagattgctcaagtcccgagcattctagctgacaatattcatgatgattggcgaggctgaatgtcaaccatccccaaagaagcaccactgccttcagcccctagtgagaggtgagttaactcagaggaagggtcaggttgttgatgcagagaaaagtttgtggagtctgtaagaggaggggctctagttcgacatcgtttgagtacatttctaacattgcctcccgaggacaccatttgtcttttataaaataaagcagaaattttatttttttttggcggtaattgatgcaacattaaaactaggaggaatcgagtccaattcagagttaactctgtcagtagtcacacaggttgaattaacattctcaacttgtggttaagggacagaggtgttgggttggagggagcatggaacatgaagatatgctggaggtgtagccactaataaagcaattgaatttactagactagaggagatattcgagaccacatcaaaaaactccttagacctgctacttgaatgctttgttttctgttgaatgaagagaagtgatctgtgaactagaagactctccc

SEQ ID NO: 186120 - DNA, 1426 bp, Cannabis indica
tctctctctctctctctaataaaaaccactttgacaatggtttgttgctatggatgatctattatctaatagattatatacacaattgaagcatggaatttgatgtccacagataactagagaagttaaacaaaaaaagttacgccagaagtttggggagtacgcaaatgtggttcagaataattatgtgttattcatttatctctttttcaagagatctattgtgaaaactagttatgaaaatgtgtccaaacaaaccaagcaggacttgtattttccttttgggttgatatcattatttgtgaggaagttacaatagagtaaattaaaagtgtttttttttagcttagattgtgattttcttttttgctgaataagattgtgaatcacttaaataactaaggatttatatattcttccttttgtttccttttaaatggaaaggtagcctacccttacaaattttcagtactaattgtgtcattttctgtgtgcggtttcagtctgagaaaggagacaattcaaataaattggggtgcataccctcattacaaagctcctgaagtgtttgcaccatttatcttggatgatcgacatttgtattatgtgaatgcctttgagaatgcagctagtacaatggagactagtgctgtggcagctgagaatattgctcgactcatcctgtctagattctttggccaaccacctttcagttcctcaagatcggaatccaactctaatgaaggaactttacgagtagatctgtgagttttctttctacggagaactgtaaaattatacaaattgtactttaaaatggtattaaaagaaatgacttttgtaaataagattttttttctctgggattcttgtaatggatgaataaccaactacaaaatgataagtttgtacaccatttacttgttctccatgataataattgctagtaatgtcaccccaaatttccacacaagttattcttatattatgtcgattttttttttttcttgtcaccttttttgtgctgtatcaactagcccattggactgaataaaactctgccagactacttgaccctggggcgtggacttcaataataaataaaagtgtttcctttttaaataaacttgtcataatttttttaagagagaaattccgcaaacctttcaaaattgtttttttttttgaaagttagcgaagcattttaaaattgttttggtacaaagtaatccaataataaataattttgtttcccactacaatttattattctttttaaaaaaaaattaaagaatcttttattcatgtgagcaaagagtaattaaagcattttatttatgagcatgcatgtgaggaaagagtaagggaaatttgattttctatacttagaaaaatcaaaaaaatttgatttctaaaccaataattt

SEQ ID NO: 186121 - DNA, 3917 bp, Cannabis indica
atttaagaaaaataaatcataatagcaaatgatattgagcaactgaatcattgacaacaaaaaaaaaatattaatgccaaacattaacaacatgaattattttttaaagaagaaaaaaaatattcaattgttttgtcattttcaaacatgacaacataagttttctccaacagtacatatttcaaaagaagatcaaaattgttgaaaaaataaatagtgttatggttaatgctcatcatctccaatcaacatatctatttatactttaaattaaattcaagtcctctttttcttttaactgttactcatacaaacaacactatttatctacctattcaactttaatgctttttaaaattgttaagaggaattaaaaaaaagctgttatgaaaaaagcaaggcaaaatttgaagcatattacccctcaaccaaccttacattttttgaaaaatgtacctgcatagtgaaaaataatgattatttagttaatcatttaaccaagatggaagacaatagaagcagaaaaaagaggcaccaccaaaacatacctatcagttgtcagtttcacttcaaactgaaaatgtaattttacttgaatatatcggaaagcaatcgacgatttcccgtttctttgtttacttgtttatgttcggtctctttggttttcaccacaccctgctgtttagccacttcatcttcttgtgttgaaggcctttcactcttatgtgtgtgctttttgtcttaagctcacctttctttttctcaattgctttctcatctggtttttggcatctctcgtctgatatgtttccttgcattgcaccctgttgctcagccgcttcatcttcttgtgttacatggagcttcttctccttcaccgttgaaggcctttcactcttatgtgtgtgcttcttcgtcttaagctcacctttctttttctcatttgccttctcatctggtttttggcatctctcatctgatatgttttcttgcactgcaccctgctgctcagccgcttcatcttcttgtgttacatggtgcttcttctccatcaccgttgaatgtttctcgctcttgtgtgtttgcttctgtcttcttcttcttcttcttcttcttcttattagcctcgcttttatttttctcggttgcattctcatttggttgttcgcatctgttgtctgacatgtttcctagcactgaaatcaactcttccctgggtaattcatctacttcgtagaattttgtatgtttattagctcgttcttggcatatccctatctcaacaacctcttctgtcaatcgagtactgaaatgctcggaatttataccgacttcactgggaacaaaattgcgtttcttggctggctgatgttctatttcaggagaacaaagtgaaatactgtgtttttgtcccttcttcacttgcaattgctcctttatcacatcagaaagtcgagtgtcgccagtgatctctgtatgcatgcaattgttctcctctgaaacgttatctcctcttctttgccaacagcccattgtctcaagaataactttgccaacaacaaatctcgtctcccataaatacccttgcccaagcaaggcatagtcaatatcaaaacactttcttctttgctcatgagattgacatcctttcttttttaccagcaactgaaaaatttcagctacatctttgcttgtcctctttggtataaatacctaatacatggagttataatagaagatcagacgacacatttcaagatgacactgtcattgcaaatgtgcctaagcatgtaacattgtgagcataaaaccacgataacgtttacacttaatgccatacctatattttgtgctaacatgagatatcattgatgaaacgaaccatgctaccgttaacaaaataatcaaactaattgattttgccaagcatcatagaagagaaaggagataaggagcatgaagcagcacataggtagatctatataaattaagccaatcacagtcaacttgatataattactagacatacttaccaaaccagagcaaggggaagttgggtgtctggtcactgattcaagataattttctgactctgttaaaatatctaaagaatcttggacaagaatagctaactgagaaactttcatcacaagttcttcatcaaacttaggagcgaaggaacttgagagctcagggacaaacttagcctgaacttcagaattttcttttgcaaatcgaataccctctttccattctccgtggtacaagatagaagcaaaagtcaatactacaagagcatcttgaggattattgattaaagtgagatgaaatgccaacagtccaaccctaccaaattacacaaaaataatcagcactaacatctcaaacaaccttgattgtaaatatgtacaaacatgcaacttggtgttaattattactaatgttttaataaaatatcacaactaaatacggggggctccctccctccctccctccacactatgaattttttttctccctagaaaattggatttaatggttttaacaattaattaccaattattatatcatatttggatgcatatatggcaggaagaataatcttatgctaaatatctgtcagcttgttttgtttgtttttagatagtgtacacgtttatattcacatctaaccgaatcctctcccattgatatctgaattttttgcttatgcatatgcaagaaagtaatctaaaatggcattcttatcctatattctaagttatttaagttcctgaattgggaaaaaaaaataaaaaatcacttgctccctagaactttgagggtaagattaacaaactttgtcttaattatcactattgttttcaataaaaatattaaaataactagaaaatgggaatactgccgggttagccacaatagatggtgcctcatcatcttaagtttgtgcctagttttccgagaattggatggccaatgattggtcaacatgggaaaggaagtttctggtgtttattatcatgttaaaggaataggactagggaatgggggcttagagatcagtgaggaataatttgtaaggtacattttttcgtatgaaatgccaggctgtcaaacaacctggggtttcaataaagatttcaccaattccatctctattctccggtattttgtttgtattaagtcaaaagggtaaacataaaggcataacctttgaaaaacttgaaaatattggcgtcgtacatatagagcatagtcggtaagaattttcaggtttaataaaaagtaatgataacataaaattacataaactcaacaaccaaatttactgatgaaatcatctaggatatggtaaagaatataaagttcaaatctagcaaaaaagatcatcaattttcttaccacagcctgcagtcagatggatgatcacagctgaccaccttatccatattgaagaataatttctgccaaagggaaaattgaatcgaaatagagtaattactcgaacatgattgtaacttggaacagccaaatgtgaaagtagcacaaaggcaattaggaaaggaccatcgaattagtcataaagaaaaaaaacttgaatgctaaagttatatatatatgtgtgtgtataaagaatctgttagatattaggtgtatattagctgtaagagagttagatatttagtagatatttagtagatatttagtctcctaactctgtatataaatatgtattattctatgaaatcaacacacaattcgaatcactattttctacatggtatcagagcattgtgattcaaaattcgaaattcgaaattagggttctagaaaaaaaaaaaaaaaaaaaaaaaaaaaaaaaataaaaataaggttagtagtttaggttagtttcgaaaatactacttggagtgagc

SEQ ID NO: 186122 - DNA, 2337 bp, Cannabis indica
ctctctctctctctctcccaaatacactactaatttctcttgaattttttgtagcacttctgggttgcaatttccatggtgttctttgttgctgctacagtcttcaccttgctaaagctttccggtaatttctttattagtacaatccttcatattcccttgcatattttgtgtcatttattttatcttatcctgtatgttatttcttttttgctggattgaaagataatggcattttcatgtggaaagaacacattctcttaacttatccaatatttttaatgatgtgagaaaataaatcgcactatttgttccattaattacactaatagtgtgctgcatcctggattttttctttttgttccttttctcattgtgtgtgattctagccctgcaattaatggagcgatggccataaacttctgaaaaaaaatctcaacaacaatttgataacctctgaattaattgagcggttctcaatcggctgtagtctacacacgtaaaatgtagaatggaagcctgatttcaccgtctctcagatcttctgagatctatagctctagtataattggattcttatatatgcttttgtagcatgggaatttctttctccaatttgtatctgtagctccaaaatttcaaatttgcaagatttttgagtttcccacgctcgctctttgggcttgaatccaacttgtagtacggtgcagtgcatatgtaccaatccagttaataactcagttcatttgtgtccatataaaactaaaactatactttgctcttcaatgcaagtacatgtattttaaatgattttaatttttttaccctttcaaaaattattttctgtatttataattatctattagatactttgctttctacccctaccatttattattagctacatgaatctacatttagaatttatttgaatatgccattggaattttggaccctatttggtttttgaaagtaaacatcgggacttgtatcattctttaaaaataatataggagggtattgagtgaagacagtccactccaataacactggaaaaaacaaaagaaaactgacgtgtacagaaggaaatttttttgtacgcttagttgaaagataattttgataattgtttcatcatgcatttgaactccttaagtttagtctggtgatgttgttatgaacatttgaatgatgaggtttaggattgtttaatggggcccatgtattcaagctgactagttgagaatttttgctgtcttaaattgcatgtattatagttgataatgattagttagtttcactttcattcactttttgcaggggatgtaggtgctcttggctggtgggacttattcataaattttgggtactgttctccatatcttgtaataacttttttttcttttttctatttatgaacaaacatttttcatgcttgtactaatttttttcttccctttactgcagaattgcagagtgctttgcttttcttgtctgtactaagtggtcgaatccagtgattcatagaaattcacagacaagagaatcaagttcatcttcttcatctattagatatcttgactggaacagtggattagtagtttcttcagaggaggatcaggatcaggatacattatgtggactacaagatattggtgggcacattatgaaaattcctgtaattggttttcaggtcctcctatgtatgcggcttgaggtatgttatgtttttgagttcagctcatccaatttttgttgacccttatatattgataattgatgtcgctccaacttcaggggaccccatctacggcaaggaaaataccactccctattctcttctctcctctgtttttacttcaaggtgtgggtgtactagctgctgcatctaggctagtggagaaaattgtactcttactacgtactggagctagcacaggagcatactttagattttcttctagagctcatgattgcttggggttcttgcaccacggttcaaggtaatcattttatcagtcaccatttccacttttgctctttttcatggggcaatttcttattaaatattaattgtaccagttaccttgtatttattattacctcagaattctgatagtctattaatcaagtgcaattttttcaattaattcttaattggacattaaatatctaggcttcttggctggtggtcgattgatgaaggtagttgtgaagagcaggctcggctgtatcaggagagtgcttctgggttagtactgttgattgatcatagtttttgagcattcatatttgtaaatgtgatttgataggtgatatgatgttcttattgggata

SEQ ID NO: 186123 - DNA, 1151 bp, Cannabis indica
tgttgttgttgctccgggacactgtatacatcaactggatcatcttcaatatgaacagaattgacataatccctggcctcttcctccaaatcatagtcagaaactgcaaaaaaaaaaagctctaatttagacccgagaaaaacagaacagttttcgacgaaacaaaaccccctatttattgttcaactgacctggtggctcgggatgagggctaggaatgttcacttgggaatcaaatttgctttcggaaagctcgggtgtttgatgctgctggtaaattgtttcatcattaatgtactgaaatacatcattgagaacaaaataacctttctcttgaggagccaagaaaaaggtttggataaaatttctcctgaaagcaaagtcctttgctttaacagaacccgaaaccaccacgagtatacctccattccaagactcaagagaattgattgtcttaatctctatagcagtaaaattcagagacataataactgaatgaatttgctgcaaaaacaatcaaacaaaaaaacccaacaaacataaagtcaaacaaatcaaaacaatcaaatctacaaacaataaacagaaacgcattggtgctctttggtaaaattttcaatatttgttttttctgattcaactgaggaaaattttctcatttgttcttagtaaatctcaacaatcaaatccacaaacaataaacaaacaattattggtactcttaggtaaaattttcaaattttgttttttctgattcaacaaagaaaattttcaaatttattcttaatttctaattaaataaacagagaaccaattaatttatatttatttcaactaacgatatggaattcaacaaatacaatccaaacaaaatattaccagcatttcagaaacagtatcagttaaatcgccatcgatgcgaaccatagagcttgattcagagtaaaactgataaactagatcgggttgctgttgaagaacttgatagtactgtcccacaaagtaggagcctacctgaataatccaatccaaaaccaaacataaatatacaaaaatccatcaacacgctccaaatgtaaattcacacgtaaagattggatttttttcaaaactatttaaaaagaaaaaatcgaaacctgaacagcactgac

SEQ ID NO: 186124 - DNA, 5107 bp, Cannabis indica
tttttttttttttgaaggaacaaccgagttcattaaattaggaaaagaatataggaatcacaggggggattcttttcccttgaacaacactagcgttatggctagaacacctagcactcttagccagcgaatcagcaagatagtaaactttctaggtaaatgataaaaattacagcaaacaaaagaagctaaaacatccaaaacctgaaaagacgtatgccaactattccattcaagaggacacacccttgattcaaaagcccgaattgcataagacgcatccgagataatagccatattattccaaccttcattttttgcccaattcagtgccgaaagcattgcctagatctcagcatccaaagcagaaacagttatggtgcagcacgaattcgtagcccaccttcccgagactctatgtatcataacaacagcaagcccagccaaaccttccttccgagaagcatctattaagaaaaagtagtcgtagttcttccacggcttacctgagaactccacccggttcaattctaatctctccctctctgttgaaacctctatcattttgatgaactttgcatcaatgcgagcaataatagggcatgttggatacgttttacctatcaatatcatcaggtttcgttgtgtccagacctcctccacttggcaaccaacatacatcagcactctatggctgtcctcccccgtgaaactccgtaggagattcaccaaaaactctttgagattttctcttggaatgcagttagctctgcagttgaacataccaccgtaccacaaatacaaagaaaaatgacaatctctgaatagatggagaccatcttcgacatctacctggcaaaagaagcaatctttttctttaacaaaaggaaactttattttgacaggaagtgaatcattgaagcatcgccaaagaaacaacgccacacggggatgaatcttgggaggccaaatatgttttctgattatgttgaaatctttgaaacgattttgttgatccttctcgtacgcttttctcatagaaaaaacgcccttctgtgagggtttcgacaccatcttctcgagactgtggtagtcgaggtatattaagaatgagactccccatctcatctccaaacatctcaaagactttatggctacaccaggagttaccctgagatagatcactaatggattggacctctgggaagcttggcctaagttgattcacaagcctttgaaactctccataatcaagccagggaatccaaggttgattccaaagatcaatagtcgactcatcagccgcaatcgtatgagctccttatttaatgatgtttctttcttcaataattttcttccattggagcgaaccactctatcttcgtttaaccccctagaaactttccttgttacagtattttttgagtaaacattgaacccacggtttatgctccgtacaatccaaactcgaagccaattttgcaagcaaggcatgatttgcatctttgaatcttctgaaacccaagcctcctacacacttcggttggaaaatgttgtcccaagattttaaagcaagaaatgtatcctttaccaggttccccaagatccagaattttctcataagaccatctaaacttctacaagtgctgactgggatcatgttggttgacattgcataaattggtaatgcagaagcgacttcttttagtaggacagttttcccactataacgtaaaagtttcattttccatccctccaagtgcctcatcatcttagcttttaatgattcgtactcctcccttcttcacctattaaacacaaaaacaaattcccacgtgcttttcttcaccatttgtttccttgaccttcaattccttcagaaatgtttgctttcggttacagttcaaattgttggagaatagaacacttgttttggatatattgcaactttgtccagaccatttctcataaagaggattgtatcgtgtgagaaatcggtggggcatcccgagatattttaattccatggataaggtccttagcctcagctgtaataggagtttagataacacttcttggcaaagtaagaatagaaacagggataagggatcaccttaccgtaaccctctttgaggtaaaaatttctttagaaggctcccactaaggagagtcgagtaggagacactgcagacacaggacattaataagttacagctcttctcgtcaaatccatttgcatctgggatttgtctaaggaattcccattccattctgtcatatgctttataaatatctagcttaaccgcccttaagcattctttccccttcttctttctaatcttatgaataatctcttgagtcaatagcaaagattctgttatccaccttcccagaataaaggccgactgaaccagattaattaaggtctccaagcaaggacgtaatctatttgataagatcttagcaataatcttatagatgaaattgcacaagcttattggtctaaatagatgcatccttgttggattcttcactttcggtataagacaaataaagctataattaaacttaggattcagagtacctgattgaaagaattccacaatggcttagctaactccttccccaacaatttcccaatttcttcaacccatcaaatttgggggctttaagagggtggagactaaacacaacgcttttaatttcgcccaaagacggtgtttcctcaagcatactgttagtgctggtatccatcttcttgtcgaacaaactaccaagatcatccgttatagaagggttttctgaatgaaaaagatcctgaaaatactcgttgacaatccctattaagtgcttatcaccctcccatctctttccgttcttgtctagaagtgatgagattatattccttcttcttcgaacaattgaaataaaaagttttggactctaatgtagtagtatgaataaaattctgaagtcctctttcttgacaagtaggacttgttcagttctaaaattatagcacataccgagttgtgtgctcatattgaatatggaggtctatctcgggaggctaggccctttaacagtgagcaatctctacactagcctaacaatgctacaaaaacagaagcgtaaatggagaacatgaatgttaaccaaaaatgtcccaagtatagataattccacatacacaacaagatttcacgcctttttttgggtattatgtgagggcgtaagcactacggagaacattgttatcgacatatggtcttttataatcagacaatttgattttcttctttcttcccctgtctttcgcctttctctcctcaaaccctaatccaaacctaagctttcttgtttttccacttatctatatgtaatttcctactagattaggtacattatcgtgtttcctaagtactatgcacttcatttctaatcaaggagtttgttgaaaaatgtgaataattaaaatattcataattaaagttaaacttaaatacataagtacaatacatattttgggatctcatttttataagttacataggtttacaaaataacgatactacaaaagttatcatctggcaactatcaaaataaagcccaactatcttaaagatctaaacactccaggtataactgcctcgatataacaatcttaatcgagcgtgagctcactaccgctcagccttaactttgcctttacctacacttgtaaataatatatgtgagtcgacatactcagtaagaaaagcataaacataaaaataaatataaaaccagattgtggcaggcgcccatacacctaatcacaatcctatcccacatccaatgcgtactaggtctggaacgttcgtaagatagtacgattgactataatatcaccctatacttggtactctagtcataccaatgttatagcatcaatccatactttgcgaaatatatatttgtcgatattcagtgcaactctatgtacactaatattgctcttacagatatgttatctactaggtatttataaattatgtacgctaaacatgtaagcatgcatatcattatactaatcttacctcaatctaaatttaggtgtgccagtccaccatagtggaaactgctgcttaacgatttaaaggcccctaactcacaacatacataaactagtgagttatccgctaaatcactttttgaggacttagactcaaaactaaaactttttttagtctataaatagcgtagaaatatcctaaatatctataaaagaacaaaaagaagactttagaaaaatacccccaaaaaaggcacatcatttttctgggactctacctgctaaaaatggtagaccatttaaggaaaaatagttttcctattttctactggagattttctaaaaatcttattttcaacccaaatctacctcaaaaattctacaaagctccagaacctctaaatagagtctaacaaacatactccagccgataatttcatcattaatcttctaaaacaaaatctaccattaaatgggtcaagtttgagcttaaaagctaaactcatgctcaatcacaaaaacaacaaacaaaactagtaaataacaacataaataacagaaaattaactccatataacatcatcaactcatcccaatacaaaatgaaataaatccctataaatagcatggaaatctaactccttaacttgaaaatttaaagagaaaaagagagagaatcttacctcaacaatgattaataaaaacctttgaattctatgctataacccccttgaattaggtttgaaaaatgtgaaaaaagatgagttcctttgatttctcctttggtcgaacacaaggagagagaaagagaggttttgcttttctatttttggtttatgaataaatgactaaaactcctttttattttcttataaatttaattaattaaatgaaaataataagatcatagcccactataaagctctaaaaaatacataacaaaatcaataataaaattgggacagtgaggtcaatatgtacattgctggagaagactgtcacctcatggttgatctagcatttattttccttaccctgcaccacatagcaccc

SEQ ID NO: 186125 - DNA, 1105 bp, Cannabis indica
gatttgcaattagtaaaaaaaaatacaggttagttcatagaattgttgtcccttgactgttccctcagtttgttcctatcattagttttatttgaaaaaaggggtgtttcttcttagtgtgtcctattcacttatgagaaaaaggaatcagagaaggctgatccagattgagcaatacgtggctaagtggtgttatggcaagttatgtctgggattgtttgggactttttttggagatataatggccgagtggtgccattaatatattctggtgtgatagtgatgtagggttttctgataagaataaggagtattgggcggtaaaagggttattgtgtggtgatctttctttgtatttaagagtgttcctggataccaacttcaatgcaaactcagctctcatttgttcaatcttgtttttgtcgaatgtttttctctatgaatatcagtcatggctcaaataagtggagaattactgtctagccatagtaggcattccttcttggaagttggaagtataccacctaaaaataatataggtagctgcattttcatgttcaaagattataactcatagaatgagaaatcagacttcaaaattcaaataatagatgatgatgatggattatgttaaaaaagacgcgtggggatatttttatatcaggtgtcaatgtataatgtattcttgtttgtaattgtaaatttggaatggtgtacttttgaaacaatgtgcttgtgatattggcaggtggcccctaatggctggtctgaaggagagtgtaaggggaaggctggatggtttccctcagcttacatacaacagcaagagaaagctccagcaagcaaaattgtgtaaggagaggtttgaagtggtcgttgtggttttcccaagttaatttttgtatattctcttctctcttgtaagttagtttgagtcatttttggctatctgtaaaatactttgtataccatgtacaagattctatatttgatttaaattgtatatgaacgttgtggatttgattttatatggatataagatacatagtttactgcatccatcttaccaacttgtttatatctaaatcctatgtttggtattttt

SEQ ID NO: 186126 - DNA, 3850 bp, Cannabis indica
tttgtatgcaatcggtggatgaggcacttgactttgtttcgagtgagcctttatgtgactggaagggattaaaatcccaagttaattttccaaattattacaggtttcttcaaagaagtatttgtccacaaaagttggtaacttatttcactgtggaaaggttagaatctgcatgttacatttgtgctgcctttcttcgagcacatagaattggaagacagcaactgcatgatttcataggtaacacactttcctcgtggcttatttctctctccaaatacacccacccacccacacgcacataatccatagttatttagctatatacttatatgtgagatacggtagctacgtataacccttgtttttcctcacctttaatctttaataaattgattgcttgtgaactcctgaattagccttagcgcatagtcttatggaaaaatgtattaaactcatgacttttaactagttaactctaaaaacacaagtgcctgcacaggtaaagggaaaagttctgactggtgttaataaaatagtgataatcatcatcactttccatgacattttttttgtatacataacgtgtatgttcattaactggccttctttcctagtgttatgttttatagataaattattttgtatgggttcgtgaaagtatattattatctttgctttattgatatacatatattcacctccttgattaaaaggaattttaggtagttactctgagagtgttttattatgtcttatattcatacgcatctttttaggtgaaagtgaagttgcttctactgtcatcaatgaaagtgaggcagaaggagaagaagcaagaaaatttctagaagatgtccgagtaacatttcctcaggtttttacctaaatcccttcccaattttatcttttgagcccttctatattagatgcatactgaaaattttaatcatcatttatcatctcttttcttgcttaaaagacatgatggcaagagaatatctaatttaaataatgttgatgaatgagagtatctttgaaacctttttaggttctgcgtgttgtgaaaaccagacaagtaacatactcagttctgaaccgtttgatcgactacgtccaaaaccttgaaaaggttggcctattggagaaaaaggagatgcttcatcttcatgatgatgttcaggtaagtggtcataatctttttgctttcttttattcattatgttcccaactgtttaatgcttgattttaatttctgaaagcttctttgcagaccgacttgaaaaagcttctaagaaatcctccactagtaaaaattccaaaaatgagagatgtgatcagtgcccatcccttcatgggagctcttcctccttctatttgtaaaccacttgaaagttcaaccaaggaaatgatgaaattacgtggtgtgacactttacagggaaggatcgaagcctaatggaatatggcttgtttccaatggggtagtcaaggtaatagaaaatatgattgtacaattttatgaagtttgtttagagagagtttgctaatagatgttctactttgcagtggacgagtaagagcttaaaaaacaaacattcgatacatccaacttttactcatgggagtactttgggcttatatgaagtgctaactggaaaatcatacatatgtgacatagtagcggattctgtggttctctgtttctttgttgaaacagataagatactgtctgttctaagatctgatccttcagtagaagacttcctttggcaggtatactaagtttaatattgtgccaacttagtttcccccatcaattgtattctttcagtgcagcttgtccagaaaatgatactttctaaagattacattataccttttattttatatataaaatatttgaaatgaatggcatgctaccttttctgacttggttccttgctttataattttacaggaaagtgctataattcttgtcaaactcttggtccctcaaatattcgagaaaatggcaatgcaagatttaagggctcttgttgctgaaaggtcaatcatgactatatacattaggggggaaactatagaaattccccaccactccatgggttttttattagaaggatttgtcaaaacccaaggcacccaagaattgattacatcacctgcagctctcttaccttcgcatgtgcatcaaagctttcaaaatcttgacacaacaggtagtataaggccttatgctcacttctccatcgacctactttgtaatatctgttggtctccaaagtaatcttctttattttcttatgataacagccatcaaaggagctagcttttcccataaagcatcctgctatttagttgaaacgagagcacgagtaattatttttgatatatctgcatttggatcagaaagtaagcttgagagaaggtcttcctcatttgttccacgttctgtagatcatcatcctcatagacctcttggtcgagaacatggcggtcttatgagttggcctgaacatttctacaaacaaaaacaacatagggactttgaagggattggccaagaagctaacagcttgtcggctagagcaatgcagataagcatttatggcagcatggtattaaccgttataatttgaagttatgtggataagtttcttttagtctcatctttgtgaaactcattccatcttttttcttgtcaccaggttaacatccgcaaatactttcgtagttatccaggaattagtgtggctaagccgtcacacagcatatcatatcctacaattccctcacaccaggaccgtccacttgtttctgtcagatcagaagggaccgtgagaaataacttagaagggagaaatctcactggagaaactactttggcaccaccgcgaataagtacagctccaaaagacagtcatgctgaagattcaagtgatgaatctggtgctgaggatgaatttatagtgagaattgattcaccaagtaggctttcttttcgtcaggcttcttaagtcttatatcttctgaatgaccatttatgatttacatcttgttctactaccactgtcttttataagaaataccatgtagataggatacatataatgtaaaataagttttaaataattggtgtgcatagcttgatattgtagccttgtttcatatcaaaataaagtcttttctagaaaagaattattgatcaaaatgtggaaaaggagaaaaggaaagaaaaatccttgttctatctacttttggttatttgtcattttattttttcagatatttgtagccttgtttcaaatcaatttaagcatttctacttcctcgtaaagcctttataactttgccaatatctaatataagaatgattatctcagactactctttaaagaaacttgagaaatacaatactgtgattattttgcataattttatttggaaattaaggtcaaattagtggttgccttttgatttgaagttttataagtaaatttgattgtatgtattaagatttaatagaatgtaccttttacttttccctgccctcttccactctctttacaaacaatacatttcttgcttgttctttcctcatttttcttctcaaacaaacataagagtgaacctagagagaagttaaaatatgggccgtgttcttatgtgattttcaaaatatgggtcgtgtaccatgccaatatttttaaatggtagatctaggctaaatacttgtgtcatgtttaaccctggttgttgtttttcttaaatagatgaatccattttttcatacaagcttaaattcatgctctaattttctattcttttttacaattaataagataatt

SEQ ID NO: 186127 - DNA, 5468 bp, Cannabis indica
aatggatatatgtgaaagcgaaccccataccagttgtattaaactccccaccattctcatcttttcagattcaatcatttttcactttaaaatcatcttttaactatgtttagaatttggatttgttgggggtatcaattcaacccaagttgttcatacaaaaaaaaaaagtaagaattatcttgaatataataagtgttgtacctagtataaagttttttagaagttatccaaaaataaaattattcaactaagctcaaagtgaataatatcatattaatgtaaaagtaaagtgagcttcctgttagacattattatttaaaaataataaagcatatacaatcgatacgaaatgtagaataatttaaccatatcgaacatatatgcaaatcacatcgtaatacctccagtttttgaattttaagtctaaatcccctgtataatttctgattgggtaatcgtgcttccaagctctctctactccctttagatagaatttgttgttcacagaatgagtgatgagctcggagaccaggactctacattataagtgagatactccactagtatctgtgtcacattaatttttagattattttgataattaattcgggaaataaatcaattagtaaatcataatatgactatatttagaatattcgttcttatcacattttgatttgtgatcatatacagtcagcgaacagtcaacgagataaagcaaaatcaattcataaatgattttgtaccaatattagaaatattctaatattctctcacttgatcaacatttagatttaccacttaaatctaacgttactcattacataataaatatatgaattatagcgatatatcctcattttatgacgagtattatcttccatgtattacgatatattcattacataacaatatactttttgtggcaatatatttaagtgaataaatccaaaaccttatgtttattctggttctttaaaattttctcaaatataaaattaagatgcacataaatatgagaaaaaatagcaaaataagagtttcattaataattttagttgtacaaccaaaaactgcatgagggtaactgaatcccataattacttatgatccttgaatttgtgttgcgacatgcctttagttaaggatattgcaatcacttaattcattattgcgtgtttgatgaccacttatgattttttatagttaaatatttaatgtcaatatgctagcttcgaccagtactcttatagttcttagccataaatattgtagctgatttgttgtaaaattttcttaatggcctgaaaatataattctgaactctaggcctagtataaaactctacaatacaccatacgagatgtatccttaaaacaataaatgaatttgacttctataatggaaataacaattaaatttctccacgatacaacttactggtaattgtaaggacgtaattaaatgttaatttacgtgaatcaataaaaccagtgaagtcataacttaagtggttaactaagtttctaaattatcagttggtatccttctttcacttggtatttcaattgcagttgaggattttcttggttgcattccaatacctatttcaattgtgtattagttctccatatttacaatcaattgaaatgaattagccactagcttcgtaatttggataattcattccttgatcaaattgtctattgtaaaatatgagtaataaaattgtgtcattttcctaacaatctaaaaattcaagcatgataagtcaattatgaataaactatctagaaactgtaacgcaacaattatattattaggcatctaatataaaaatttaaaacaactaataacaccccaaatgtgatacaaacttaccacaatcgagttttttctatacgagtcgtgtattgccaattcaaagccctgtttttatatataataatattgtagtagcacaactattatacaatagatttacaacataatcacaactatgaatgaaaaatgtgttcgggcatcgttcagtaaaaatttatcaatgtttttttttgacactgattaaaaatcacttgtacgttaataataatttatggagaaataattgttagaactttgtaagccaatattaaatcaatcaatttaaatataaaacaatctaaccatattataatattttttttagatagctttgtgttagattgtcaacatgaaacacctgcaaatatcatacaaattattgtaacatgtcaatttttagattgttagtaaaacgttaagctaactgtaatgcaactactcagaaacataaaaatcagaacaatttttcatgtttgtggctcgagatgaattcaaatttactttattctttgtgattaaaaatgaataaatccaccattaaaaatttagaaaataacgttaatacaacgggtataatatattagctactatattgatacaaatttttttcccaaattatacctgttttagattgatcaagacctccaaatctatttcttacagttctatattttatgaatttgcaaattgaatttaatagaattaattttctagaatttgaattataattcaggattgaatttatgttttgaactagtttttctacagatttttgcatcactcgggaattgtagatatttagattgatttgggtcttcttctcaggtgacattgtcagaattaatagtggttcttcgactgtcggggttgattcattgttgttgtcctcgtttgatcgtacgaagggttcgagtctctcaagcgtggatcgtgcggcttgaaggtgagtataaaatgtatgtataatttttttttatttagactgttttaatacttaattggccggtacactataaatttgtaatattgttgtcttctttagatataaccgaaaaaaattctgtttttttttttattatttttttatatttttacgaaaatacacataaaaacctacatagcaatcaagaggataatctaaatggcaaactaaatctacataacaattcacataaaaattaccggagcaacctcaaccgtaatttttttttttaagaaaaattaataatagtttataaaataattcccgaaaaaacaaaagccagttttttttttggtagccggtaagccaccaaccgtgggagcaatagcattgttattgttggtcacatacatacatgctttagaactattagttttcatcatgaatttaccaactacatccaaaataagtcaattttctttccacaaaaaattagagaatcagtggtcctttcctttgcactcatcgatttaactaccaactacaaacaatctcaaccgttggttcctgctcatccacggctgaaattcttccctcttccttcttccaccaaccaacctttacaaattgacctcataacaacactttaaaatttacattaaaatattaaattactaaaatcatagtcaagtctatatttggatgggaactcgttagttctccctataaataccaactcaaactgttggaccaattgtcccagtgagttgagttgtgagatttagacaaccaattttctcttaaaggtttccacgttcaacactagcaaatcttcttaaaagaccaaaggttcgaactttttcaaatttcattgctggggttttctcttttcatcaacttgttcttgttcatttctgaaaagtttcgttttttattgtttctgaattgttctttatgaaacttcattgctggggtttagcttaacatagtttccattaagaaaacaagtttataaaatcatgagaaaaaatgagaaattggtgaatgaatgtgatctttcatttgttgttaaggttctttttatttgtttatgctttgttgttcctaattgagatcatagacatggtgtttgattgtggtatctctaaggtaacaggtagtcaattctgactttctcttcatctgatttgaattgcagcttgggagaatggattccttcttgttcacttcagaatcagtgaacgaaggacaccctgataagctctgcgatcagatctctgatgcagttcttgatgcttgcttagctcaagaccctgacagcaaggtcgcctgtgaaacttgtacaaagaccaatatggttatggtgtttggtgagatcacaaccaaagccaaagttaactatgaaaagattgcccgtgacacctgccgttctattggattcgtttcggatgatgttggtcttgatgctgacaagtgcaaagttttggtttacatcgagcagcagagtcctgatattgctcagggtgttcatggccaccttactaagcgccctgaggaaattggagctggtgatcaaggtcacatgtttggttatgccactgatgagactcctgagctcatgcccctcagccatgttcttgctaccaagcttggtgctcgtcttactgaagtccggaagaatgggacatgtccttggttgagacctgatggaaagacacaagttactgtcgaatacatcaatgacaatggcgccatggttcccgttcgtgtccacactgttctcatctctacacagcatgatgaaactgttaccaatgatgagattgctgctgaccttaaagagcatgtcatcaagcctattgtccctgagaagtacctagatgagaagaccatcttccatctcaacccatcagggcgttttgttattggtggccctcatggggatgcaggtttgacaggccgaaagatcatcattgacacttatggcggttggggagctcatggtggtggtgctttctctgggaaggatcctaccaaggtagacaggagtggtgcttacattgttaggcaggctgccaagagcattgttgccagtggcctcgctagaaggtgcattgtccaggtttcgtatgccattggcgttccagagcccttgtcggtttttgttgattcctatggcactggaaagattccagacaaggagatcctcaagattgtgaagaagaactttgatttcaggcctggaatgattgccattaacctggacctcaagaggggtggcaatggaaggtttttgaagacagctgcttatggacatttcggtagagacgatgctgactttacatgggaagtggtgaagcccttaaagtggagaaagcctaaggagtaagcttatggctacactgcctgcagttcaccaataatatgtcttcattgattgtcattgtgttcatctcttcttcttcttcttcttatttacttttgaaagaattatactcactttcttggccttctgaaaagaaataaaaaagctatggattttttctgtcatgatgaaatgaatcatggaagaatcaatgtactgttgcttttggtatattcgatcatgataattggtcgatatttttacttcttcttcaaactatcttcacatgtaaatgttgctagctagctttctaat

SEQ ID NO: 186128 - DNA, 4686 bp, Cannabis indica
tgcctattagttagggcattacagagtaaaccctagatccagcaccccctaaagttgtatctttagttccttaagtttcgctggagccattctatagggtggttttgacacgggttctgctccaggtactaaatcaatagtagtaaaatctatttcctgcggtggtggtaatcctggtaactctttgagaaacacttccaggaatttcttaaccactctgaccaccttaggtccaagtatctcaggccaatcagagtcaatcaccacttatcgaaatcctacacatccactgcataataaatctctagccttgaaaactacaattcttggaacttgagaagcttgaattaatctaacataaacaaacagttcctccccttctggttgaaaggtcaccgttttttgtttacaatcaatattagccgagtacttaaatagaaaatccattccgagtataatgtcaaactcggccaaggattattccaccaagtcaacgcttaattctctgccctcaattttgactggcacagatctcacccatttcctggagataatcaactccctattgggtagcaggattccaaacccatttcaaaaaatatcattaggcctacccaactgactaattactctcgatgtatctacgaacgtgtaacccaaaagtgaaacaagatagtataattgatgttattgacatgaagctgacctgtaactactgaaggactcgctgcagcgtcagcttgggtgatatcaaatacccgtgctggagtagacttggcttcttgcttaggtgtatctttcttcagctgaggacaatctttcttgagatgctggaccaacccacactcaaaacaagctcttcagttacattccccaagatgatgcttcgtgcagtgcaaacactcagggtaagagtaaggttgacgtcctcctttaccctggttcccacaaatcttttactttgacccgaactaccagtagtcagaaaagttctcttttttttgctcaatggtagaatcacaactctccttaccaggaccagaaataggaagggtagtggctataccagcgctagtagtctcttgggtctcttgcaaaaattttactggaccttctgctcaagagccttattaaccatttcggcataggttgtgatatcgttggttgtgatcactaaatcatgcttgatgttggcattcaacccggccaaatacttctctttcttactgaaatccgtaggtactattctagaagcttgcttggccgatcgatcaaattttttcgtatactccgttactcacatgttctcaccctgaactaagtcaacaaactctttctgttttgcactgtgaacaacctcatcatagtacttgtccttaaacagatttcaaaattcttcctaggtcattctagtgacgtcccgagttagggacaccatctcccaccacacgagggcgtcctcttgaaactaaaatgtggcacacaccaccatgccatttctcgtaaatcccatgaagttcaaaattcactcaataattgtcaaccactgctccgctttcaaaacaccaggacccccccaaaaatactagatgtgcctgcttctggaaccgttcatacaaaggctccacacggttgccagcaacaggtttttctgctggtaccgctaaaaccacaatagcttgtggttgcagaagaggccccacaggagtatcttgctgtctgagccttcgcatttcgtctagttatttattaatttggacttgcatctatgtaaacctctcttctaaatcaggaggagcttggggtagattgtcttggccacccctcggagtttgaccacagcctctgccgcatccacgagggttttgggggtttctacctccccgacaatctttagtctcaaccatttttccttgactcctaattcataatctaggacttagcctgctaacccataaggcatgtaggttagatagtggtcgaaacatttccaagaccacatttattgattttaggcagcataaaaaaaattatctagcacacttccaactataaattaaactagttaccactgggacatgcttacggaaccgtgagtggaactcatctctggtcatgattgtacatatcttgacggctcctagtggacaacatggtggctttgataccaaaattgttacaccaaaacatgaaaatcaattgaatttaaacgttaactttataaactagttataatcaaatatagatacataaataaacttttgcacactgggatcccgtattaaaaactatttttgaaaaatacaatacatacatatatatatatgtataataattttatttacatgtcacacggttagaacaaaagctaaacccgaaattcaatatggtcgaaacccttcaggttgtactgccgcgatatgtacaataattctcgagcctcaaactaactgttcttccactttatccttttctttacctacacatgatagcaactgatgagtcacagactcaataagataagtataaaatacatatatactaaatagtacaaacttgtacttatgccctcctaggcctaattgcaaggctcaccaaatagtcaagaatattcttaatggaagtccgacatctgaaccacatgcactaaagtaccacctccgtactagggttggtagggccaaattgtacttccaggtgctactgggtgttgtaccacataaactctctactcacttttactcatgttggtaacaccgtaacattcccttaaacactatacactataccacacacactcagtattacaactattcttgtagtgctagtctaaataatataaacaacatacattcgaatacatacacacatacatatacataatttatgctaatcttacctcatttctaaattcaaacgtgtcggtcaacttgaatggaaaattctcgaattgacgaggtccaaagtcacattacataaacgagtaaataactcaagtaaactttcctaaaaccctaaacatataaccaagggtagtcttgacgacctacaacctattactgcactaaatatcagggaagacaccaaactaggctctgaaaatagcacaaactgtaaaaattgaatttttgggagtcctgcctgtaaatcgattaaccggttttacaagtcctgtaaaactggtcgactggtttccaccaagaacccctaaaacttccccagctcaaccaaaacttctccaaatccaatcttactttccaaaacacctgttaacacattctatagcagttttcacacagtaacaggaaaagaaattcactaaaactcaacatgtcattgtttattcaagttcgagttctatgaactcaaacttgctcaacctcaaaatcaaccaactataacatcacaaaccagttaaaaacatcaattagagtccatagaaagcaaacctaactacaattcactaaactgaaccaaagtcctcaatttaaaccctaaattccaaagaaatcatccaacacataacaaaactaaaatagaattagcttatggtttttaccttaaacaagctcctagatttccaccaattaacctctgaaactattgaatttcttctcttgtgttgttggttcttgctggtcgaacaagaaagaagaaagacaacggggtattttttttctctttttgcttaaatttctctaattggatacgtaatagtgtaatatgttatttaattataccttgcttaataaaaataaagccatttgccacttatggagagagacatgtatcctaaagttcaaaatgaccaaactacccctatcctatcacatatatcaataagtggcgtaggggtaaaatagtccaaagccattattctgcctaaaacaacttttcactcttaacatgctatacatctctataaaaaggttctaagtctacccatgtgactaagataactctctattttattttctatcaccaccgaactagaattataaaaataacatattttgtatttatcatacacattcacatataattaataagaataacaaaattaatatctatagccccactaatctatttttatttctatttctaaatcatgcggtcattacataaagagattaagaattggtctgtggggtttacttttgtcaagttgttagaagctttagatgggattggttgcactgtcacttggggacttcgattaagtaacaaaggtgccatgctttggctaaagagggtacttgtaatgtttgacttttaaattttttgggtaggtgaattctcatatcatcactatcatttttaatttaatgaattttttcttttttgtagttttcttaataaaaaataaaaaaattagaaacataaaaatggaaacataaagatgaggttaaaaaattatgtttgtattaaatcatgatcctatatgtttaatacaaactttaggtcactgctgctcactattcaaggataatattaacaagatctcaagtactatctttttaaataatattaataaaaaaaataaaggctacttcttgctcttagagtaatggagtatgacgtatcagttgcatcatgttaattagacattctcacacacatatactccaattatatgtcatcaggttgagaggaatgaaaataaaggaataggaatgagaatgataa

SEQ ID NO: 186129 - DNA, 1823 bp, Cannabis indica
ttggtgagaactaagtctatgaaatgctaatttacatgagaataccctgcttgtgtctgaattctacacccttctgtcatccaactgagcaaaaattggattttgctctagtattttgcattatatgtagcattgagctgctatgtttgtttcctgttgtgttatatatgttctagatgcttcatctaaaagtgtggtttgttataatttttatttggtataggttatctacatagcacctttgaaggctattgttcgcgaaagaatgaatgattggagaaaagggcttgttcgccagcttaagaaggagatggtgaatatttcgatctgttagccaaacattgatttttgggatttgatgctgataaagcaaaatgtttcccccaggttgaaatgactggagattatactccagatttgacagctcttttgtcagcagatatcattatatccactcctgaaaagtgggatggtattagtcgtaattggcatagtcgaaattatgtgaaaaaggtgcattcattcacttccctatgttatttcttacgagatttattttcctttatgattatctatttttaggtgttcctattgagactaatagatcataatgtgccttcagcctgcgtttgttaacatgtgtacttgttcaataggttggtctagtaattttggatgagattcacttattgggggctgatcgtggacccatccttgaggtacttgctaacaaatataatatacataagcattttattttataaaattagcacccttttcattacttgaagggcactgagtggttttgtatttatttagaaaaatttataaactatgcttgtaaagcaaatttggacaaaaatgctcttcaggcaaatatatatccctttctgtccttctcccttctaacattagaaacactaacttgaaatccatctctcatccaatttccatactcatgtaagcaattttgttgacacgtccttggtaaagcaacacacaaaatcatgttgtccacataaaagctcattttgaatccattaaactaatgttctgtttatgcagtgatgtatatttgtctaaaaaacaaatattgtatttcgtggtgttttgtttatatttgcaatatttatttaatgtttttttttttcgctcagattttgaaaacttggttcaatctattattctacaatttttttcatgaatttctatctacatgttcttgaggattttaattcaacgctagttggatggtagcaaatactagttagattacttattggttgcaagtataatacatatagtctttatattttgatgctacttcttatggtagttcaatatttcgcctttaatgaatttcacattggcatttcaatggtaattcaatggttccatcagaacttaattttttcatgataattcaaatttgcatctgattcaaaccttcaagaacatattcatgacagtttcatcaaattggcaaaaatttgtagaaataacaaattaaaactagatttttagattcgcaaacaaaactacaaaaatagaaaaaacaaaaataatggaacaattctaaatatatatggcattgtagaaataacaaattgaaactagatttctaggtttgaaaaccaaactgcaaagacaaaaactaaacagtttgacatagacatatatagaattgatttaattatatacaaatatgcaacaatattaggggcagtggggcagaaaaggagagctattagggcaacaatatgcaagattaattctaatttaattgtaatataagaaatcaagagggagagtgtggataagag

SEQ ID NO: 186130 - DNA, 12052 bp, Cannabis indica
catatatagaactatatttcttgaatttagtgctgttattcgttttgttttagtaagggtagcacaagattgtcctgttacatattttcctagtttatattgtcttttgcaagcttgatgcagccaaaggaaatttctacactgaatggtagaatatctatttacacatgttttgtcaacttcaatcatattttatgtatgctgcagattattcatatggctttaataattcactaaccacctattggtttatctgatttctatcctaaaacaatttgttttgccaagttgttattttgtataccagggcgttattatttattgttttgcaaggatgttgtactctgcttgtcattggctttgcattgtttctttcttttatttttttgtagaaaagttactatttgggctctctatgatcggttattattcacaggaattcaacaggagggtgttagaaggttttcaagtcacaccactttggcatcaaggttccatttgtgatgatggcaggtacgactctgttactctatttgttttgtattgttaaagcatgtttccatcattcgactaaccagtgctatgtttggaaaaggaatttctgctgtaaactatgctgaactttatttgctgctgcttgtttacattttgacgtggttaagtttgtcacaggtcaaattatgtagagactgtgaagactgcacgttgggagtacagtacccgcccagtttttggttggggtgatgttgcctctaagcagaagtctacagcaggatggcttgcagcatttcctgtatttgaacctcattggcaaatatgcatggcaggtggactctcaacaggtacaagctttattcccaagtcttatctagtgaaaatccaaagctaactgattatattaatcattttcccttttcagaaagataaacggtacttatgttatatattttttgttgctggttctgggcttgatatttaggcacagggacaatataactattagtccaaaatggatgcaaaagccaaaatgtaagttttatttggtggctagctcacgtgcttgggtgagagagtgtgagtttggaccaagggcaaacaaaatgtttcttatctaaagagaaaaagagagagggatgcaaacacaaattgaaaatatggagaaaacaatattgaaataatatttgttggatatctgatttttggactgaaactaaattattgaattggaagtgggaaagagactttgagatcattagtgcaagcttgagctcctttcctcatgtttactttcataatgtcaagcttttcacatacctagaaagaaaccattatttttctgggacaattatgccccctttatacaaaatgtatcagtggtattgtgtttaaacctgctgttatccttggaaaagttccctcacatttaaatctatatttcaggctggatagaatgggatggtgaaaggtttgagtttgaaaatgctccttcatattcagaaaaaaattggggtggtgcatttcctagaaaatggttttgggtaacttcttatccattcatcttactatatttatttaagatcctttgcgaaagagtttatccttgcctcctttgctgtggaataaacagaatttcttactaggcaaactaaacataggggaaatttgacctttaaaaaaaattagacaaaattgcttctaccattcaaagccctcttcgctctcgtctttctctttctacagaattgcttctaccattcaaagccctcttctctctcgtctttctctttctctactccctcttctcttttgtctttctctttctctacttgcaaccatataagggaaaaaaaagccattatcaccatcactgaagcacccatcattattttctttttaatgtcttaatgattaaaaagttatccaaaatataaactgaagaaattattcacttaagatactaatttatagatttcgaacgtacaagatcttttgtgtctttcagatttggaactttggaaatgtagatttaaagtaaaaacgatgctaaattgatggtttgcgatggttccataaaaatatgatttttaggctagaaacgatatcaaattgatggtttgcgatagtccatacaaagttgattactaggcaaaaacgatgctataacgatggtttgtgatggttctgtgacgatttgcgatgtaatttgataaagctaactttccctcgattttagtttgtaggttattttttttttgagttttaaaaaaacccaaaattttaggaacaaattaatgattgggtgaaaagttatgcctcactaattttcattttaataaaattaactattgcaagaccattgttttagtattgtttttgtctacaatcaagtttttatgcgactatcgatttgatatcgtttttggtttaaaaatcatgtttttatggaatcattgtaaatcattgatttgtcactttttttgctaaaaaaattgtaattataagagttccaaatctttaaaaaagatagagcaaagaaaatttaaaaaatcttgtgcgttagcgttcgaaatttataaactaacgtcttaaatgaatatttttattagtttagtgttggattggctgttcaatcattaataaattaaaagaaaatgatggccttagtatttcaaagtaggcttgttttccaatcatattctttgaagttggcacattttaaaactaggggtgctttaaaatgtgccaacttcaaattttccaataaagggtcaaatttcccaatattaatcgacttaaataatatttttgcaaattcttgcaaatagtaataataatgataatatgttgcaattataaattataaattataataatggaacatattagtgaaaggcatggatactaagggtgtcaacttcttcatcagccttgaaataggataattattgccaagaacatatgtatataaactagaaatgtggcctacttgtactgaagaatcaaaaagggctaagatttgatttgtgtaataaagttttcatttgatctcctatctagataatgctctcttacattgtatcattcaattttgaagcctcctaattaggaactaggtgtagtctgtgtgtattatcatccttggttattactgttgcactacaggttcagagcaatgttttcaaaggtgtgactggagaagttgctctcactgcagctggagggttgaggcaactacctggattgacagactattttgaaaatgctgcactggtgaaattcttaactaatagtttcttttattttttttccctacgaatcttttctttgcttctcagtgaaaataagaatgcatcaaaaaagctaactaaaatagtcaggactatcaggtggttaattccacaagtctgaggtacttacatgacaattgctatggctcttgctctccatatattgtagagttaagaaaacccagttttgaacttgggccccttaagtgagcatgagggatttctgggtgtaataaaatgaatacaaaaatgggttcaaaggtagatgataagagaatgactggagcgatagtgatgtttgtaactcataactatggtggtgtctctgtgtcacattgactcgtgtggtgtttcttttttccttccccattgtcttgtacaataggaattagattcctgcagaaccaccacaaaatcataaaaaatttagtttttgtgtttgggaacttaaaatctggatacaaggtgggagtcaagttccctatttagtgatttatatttcagaataaataatctgaataatcagaagtaactaatttaagactcatttttgttatataccttatttccataagtaaaggggtattttgtaaataaattttatcttgaattttattccttaacttgttaataagaaagaatttccattcttagtcaaacttacaagtatacagtaaatccaataaaagaactcttagaacttcaatttatttattttcctttctaattcttcagcaacttaattccaatccatttgctttcagttatggattagtaaacgcaccatgcttctttagtttaacatatacttcattattccttggacaataactttaagttggtgtgtgcaatatgatgtgtagagtatatttgatagaggccgtttgatgaaagtgatccgaaactttgatctctcaaagaaatattttctttttcttcttaaattgaaagatgattatactgttgtttatcataatttcctatcactgttacttagtaagaaacatgcatcaaaatttgttaacatgaaaaagaaaaagcagattatataccttctcccaagattaacagttgcattttttctgtgtattgacttatctgctaattggtgcaggttggagttcactatgatggaagattttacgagtttgtgccatggaatggtgaagttagttgggaaatttctccttggggttactggttcattgctgcagagaatgagactcacatggtaatgaatattgttaatatgatctcaagtaaaacagacaagttagtaattacattttctgttaaaactgaagtttgcatttgtctatatagctaaacaatttgtcagcacttagttaaaagcccaataaagtaaaaaggaccactttcttgccatttaatggaaactacttaagaaatataactgggatatattcttttcttttccactaataagatctcctttataattttccttctagtgaacaaaacacgagtattgctaatggtttataatttgtgatcgatgagcaaggttgaattgaaggcaacaacagagcattcgggtacaacactgcgtgccccaacatcagaaggtggacttgcccctgcttgtaaagatacttgtatttctgaactgagattacaattgtgggaacgaaagtatgatggcagtaaaggaaaggtgcaatgcttgacacttaattgattgtattatagtgttattgtggtgttgatggttgcagtagatgtggcttttgtgttgcggaagtccattgcttattattacttggtttagcctagctaaacagggtggttgggctaagtctgcatttcgtatggcattgcatataatctgtgcatattttgtttttgaaccagctctctgatgaattgtgtgtagcaattattagtgacacatatgacagttatgtctgaattgccaaggcaggtaattctatacgaccttctttctatggattatagctcatgtagttgtaactagtaagagctcgtttaattgccccgtgatttaaattttggtttgtactctttttccttggctcttggcatgtttcaaaagttgataatcaagcacatgaaagactggtggtcccatgtgtattctttcatgtgatggccttacttttattttggatggaaaccaaaatcaaatgatttcttttgttgataatgctgttcctttgttttctttctttctcaataattggatcatctttggtgggtgtccaatgtgatttcagagtattcttatttatatcctttttttcttttgtaggtcatattggatgtgacgagtgacatggctgcagttgaggttggaggaggaccatggttcaacacttggaagggcaagacctcctcacctgagttggttagcaaagctctcaattttccggtggacatagaaggctttctcagtttggttccaccgctcaaaccccctggtctatagtaacgtggtctataccagttacaaggtttctctttttatttatctttgggagacgggaattcatctctccatctctaccaaaattcaagtttaaactctcgtctattgaatattttaatgttaataataataataagaataaactatgataccttttagcaacatataaacattaaaatgtaattaaaaaaacgaaaaatgtgttcattttaattgtattttacataagtacgagaagttggagcgtgtacccattaaaaattcattacatgcaagttgaagtttgtatgtttgttacattggagagtgagtaaatcactaaatcatctaaaacagttacgtgctttcttgaagaaaaattatttatcatacattcactatactacttatttttttttctagacttgggacagaatattatcattcatttatcaaccatttaaggtttgaattacataattaatatcaaggtctaattagcttgaatagtgttgttgacttcaagggaataaaaggcaattgagtaggattattaattatggttttgagccatagaagtgtgtgattaaattcggatgtggatccaagagaaaagatttcaagtgcttgtaaaactccttaggcttctctacaaagaaaacgtggccagaatttttgataactactaactcagcattgtcccccaaatgcctataaatatatataaattataagtcagattcaaaaatactataagaaaatgaattcagaatatgttttgaggtttcagagattgaccttttcaatctgtgagctagctctaatgggaatacttggtcatgttcaccccagattatcagagttggctgcatcaattcaagagaattcatttgcatttatatagctgaattaatagaagaaataaataatgcatgacacctcagggtctacagctaaggcttgttatatcaagacctgagaaattttgggaaggtctgaaagtttcctattttttgggatggaccttatcaaatctctcttctcttctacatattctgagaacattgcctgttcattcataaattttaattaaaaacatatctgtcagtagtggtgaacacccatgagtttatgagcaatgcaaagctagcttttgttatcaacttttcaaaaatatatttcaaatacagattcaaactaaaaaaaaaagtaaaatgcttgatttgaatatgatatagaatgcttttaaggtgcacttcaaaaaaaaaatgtactgatgagttttttttgtgttttcaatatagtagttataatctcaattttatattatggtttgtattgcattatctgatgtaccctgctgcacaattgaacaagaattccacaatacaagtagcagaagagaagtagagatgagaagaaatactcaattgagtgttatttcaattcagcaaaggttacaagcttagagcccagaaggactcctgctgtacagagacaatctcaatacatgcataaaaaccccccataaacccccacacacgagatatatgccttgcaaccaaactcaacaattacaataataccctcacacagaaaaagaccaatttacccttgagcagtagcactcttacccctcctaacatatgtgaaccgcaccttagtcctaacattaccccccccaatatctcgaaccttgtcctcaaggttgaaagaaggaaattggtgacggatggtctcaaacttttcccaagatgcttcaaacaagggcagatttttccaacgaatcaagacttccacttcatcacccgggccagcggggccatggcgcacattcaacacttcctcgggctcaacttgcaactccaactcaggggtaagttggggagggaaagtagaagatgaagaagcggctccgataacagctcgaagttgggagacatgaaagactgggtgaaccgcagccataggagggagatcaagcttataggccacttcaccaacacgactcaaaactcgaaatggcccataaaaacgagctgccagcttctcgttacgacgaatcgccagcgttttctgtcggtaggggcggagcttgacgaagactaagtctccaacttcaaagcgaacctcccgacggtgtaaatcagcagttgtcttcattcggtgttgagcacggaggagatgcattttgaggtcatcaaggaaggagtcacggtcttccaacatttggtccactgccatgactgctgaaccacccaagtgatagcgcacaagggttgggggatctcgtccgtataacaccttgaaaggtgtgcaccccaaagatgaatgaaagctggtgttataccagtattcagcccatgacaaccacttagcccaaacccgaggcttctcggaagcaaaacagcgcaagtaagtctcaaggcagcgattaacgacctcagtttggccatcggtttggggatgatacgctgtgctatgcttcaagatggtgccttgttgcttgaagagctcggcccaaaagtggctaaggaaaatacgatccctgtcggacacaatggagcaaggaatgccatggagcttgacaacatgagcaatgaatgcttcagctactgtttttgcggagaatgggtgtcggaggggaatgaaatggccatacttgctcaaacgatcaacaaccacaagtatcgtatccaccccttcggagcgtggcaatccttcaatgaaatccatggtaatatcatcccaaaccttggcgggcagcggtagaggttgcaataagccagccggagacatggccatggatttattgcgttgacacacctcacaatgccgcacaaactcgaccacctgctgcttcatacccgtccaaaaaacatccgcccgaagcctttggtaagtgcgggtctctccggagtgcccaccaattggagtctcatgatactctttcaagaattggggtagaagtgacgagttggcagcaagaaccactcttcctttataccggagctgcccgtgatcaagggagaacccagttatctccttgttgtgttccaaatccgtgcaaattttggccaacacgggatcagcctgaacttcctgttggaccaattgccaatccaaccaagaagaagtagtaagcatggcacaagctgctggtagaacacgtgacagagcgtcagcggctttattagctatgcccggccgatattggatctcaaaatcgtaacccaacaacttcaccaaccatttttggtgctccgtagacaccaatcgttgttccaacagatatttcaagctctgttggtcggttctcaccagaaatttccgacccaacaaatatggcctccatttaagaatcgccaacactatggccatgagctccttttcgtagatggacttcaattgggcccgagtcttcaatacttggctaaagtaagccaagggccgaccttcttgcatgagaacagcccctaacccataacccgaagcatccgcctcaatcatgaactgtttagaaaaatcggggagagccaacaccggaacagtaaccatagctcgtttaagagcttcaaatgcagctgttgcttcggcattccagcaaaaacgatccttctttaattgctcggtaagggttcgggctatggaaccataccccttaacgaactttcgatagtatcccgtaagacccaaaaacccacggaggtgtttcaagttggtgggcagcggccaatctaacatggcttggactttgctagagtccacggaaaccccttggtcagaaataatgtgacccaagtactccaatttctgctgagcaaaacaacacttctttttgttagcataaaattggtatttagccaaggtttccaagactacctgtaagtgggaaaaatgtgcttccatggtcgggctgtaaaccaatatatcatcgaagaagacaagcacaaatcgacgaaggtatggtttgaagatagcattcatgttggcttggaatgtggcgggtgcattagtgagtccgaatggcatgaccaagaactcatagtgaccatcgtgagtccgaaaggcggttttgggaatatcttccggccgaactcgaatctggtgatatccggacttcaaatcaagcttcgagaagaccttagctccatgtaactcatccaagagttcatcgatgaccggaataggaaatttatcagcaatggtttccttgttcaacgcccgatagtccacacaaaagcgccaactcccatcttttttcttcactagtagcaccgggcttgaaaaagggctagtacttggctggcatatacccccttttagcatctcgaacaccaatttctcgatctcatccttttgtacatgagggtaacggtagggtcgtatgctaatgggagcgaccccaggacgaagacaaatggcgtggtcacggtgtcttggcggtggtagttagttgggcatgttaaacacttccgcgtactgctgtaataaaccagaaatagcatctggaagagcaacgtcatcctccataacagtcgtatggccaagctccacccacatgccctcgtgctcttcgtgaagggccttaatcatggttttgagtgacacccgggtcttgtgaagggctgggtttccccgaagctcgacacttcttcctcccaccttgaatctcatcatcccttccttccaattatggtgagtctcccccaatgtctccagccattgaatccccaagataacatctgtactgcccaacgccaagggtaagaaatcctccacaatttccacggtctgtagtgtaatgggcacccctaaacaaattccctcacccttgacagcttgcccagtacccatttggactccatacgggtcggtggcagagatgcggaggccgaactttgtcaccagcgaagaagcgatgaagttatgggtggcaccactatcaatgagaaccgtaacttcctgcccatgtacgtgaccatttaatttcatggtcttaggtgaagtcaaccccactactgaatttagagacacctccaccatttgagcttcagtcaattcctccatttccgtttccaaacactcctctgtaaccatgttttcatcttcttccccaactccttcttgaaccaaaatgatttgcaactccggcgatttgcatcggtgacttcgagaccaagggccatcacacttgtagcacaccccgcgagctcttttttcctggatttcagtctcggtcagccgccgatacatgttgttgggttctctggccgtcgttgttgaagaaggccgactgtattgaccaaaagaatgtgggttacgatacccatttggtgagcccgtggtcacacctgaccctttggtattcggcccaattcgtggtccattagtattgttactattgaacccattagcaattggggtccccactcctttaattgggcctccaccccctttcggcccagcatagaaggccctagtcacttttggattggcttcaaccatttcagccatctccatcgtcttctccaatccgatgggttcaaggagtcgcagtgttccctggatgtcttcactcagccctttcatgaatgccgattccaacaacggttcagccaccgttcctagtgaggttgccaacgcctcgaactgttgtcgatattcttgaacggtggtggtttgttgcagcgccaaaaaccggtcgtaaacacttccttcatgggctggtaaaaaccgtcggagaaggaggtccttcaactccgcccaaccacgaatttcccgcctccgattctcccatctaaaccagcgaagagccggcccctccaaacacagaattgccgcctctaactgttcctccgccgtgagcctctgcaacccaaagtacctctccgcccgaaacgtccaatcgtcggggtctgatcccgaaaacacaggtaattcaatgtttcttggacggaattcagatctccttcccccgtagccattaatttcctcccgattctgtattcccgatccactagacccgattggaggttgcacagatctcccaaccggactccgaggaccatccgtaagctctgttgccatcctcgcctgtcctcggaggagcaaatctaacttctcactaataacagcaatgccccgttcatgagaatcgatcttctccttcatcgaattccattcccccgaaactggagtcggagattcttcatctcccgactgtaccgactccatgaccttcttcgagctccgagtattagtcattcaccaggacaatctgctctgataccaattgatgtaccctgctgcacaattg

SEQ ID NO: 186131 - DNA, 2519 bp, Cannabis indica
gaatacctagattacgagacacggataacatcagacttctagaaactctataagctaactttgtatctcatacataattgcccaggccaagtcaatctaagcaatcaaggctgaaacaagaggaatcaagcattgacaattaaactacacttttaaagaaataatacacataacataccatctgtaactgactgtcagttatgatttaatatacactacaaacactgagacaatttccaacatagattaaaaaaatgacaatcaaattaatgcaggccaaagacacacagatcatacttaatacaagtttaataataattatcaagagaaagatagtcagatagagcaaagaaaaaaatgacttgaatatatttgtacattgtggctttcaatactatgcatcaaagatgctgcctgcataaaaaattcaaaagcaaacaatgaagttaaaagtagatagaaaaccttagcaacagcataaacaccaaacaggccggtgtctttgtagttggtgttaaatgccatcatgctttctgcaatttcgttaatgccaatcctctgtgccagctcagaactgtaagcagcagggcagaactaatcaatacatgttctctttgaatgaaattgtcaaaggaactgctgaagacaaaaataagacatgttaaacaaaaggctcaccccatgtgctttccgccaccagcattcttattccaagagcccaacagagcttgcatgaccatcaatggaatagagtctggatctgtccaagatgctccattgaaagcaacggcaaattgtgcaaggggaatatcatcatcaatgattctaacctgatgatgatatcaaaaggatattttagttaaagaaataacaagccatagatgataacgaaataggataacatttcacacctcagaaccggtaaaaatagcaggttccttttcaaccaactgagaagctgttgttgaatcagatgacagcttggtgaaagaactctttactgccccaacaaaatcttcatgcttaacagctccagaagcgacaattacctaaaacagaagttccaaaaaaataataaaaactcatcataatcactttaaaataaaattctcaaaactgttatcttaatatacatatcccaggttaaaaaagaaagaaagaaaaaaagaagtacgcttcaacacttattacagaccaataccataatttaaaaaagaaaattctcaaataccattctgggagctgtgtagtgtgtttttatatagttctgaagatgctccttagtgatagtcttaatattctgagcaggaccaagaattgttctgccaagaggagtgtattggaaagcagttgcatgcaaatgatcaaaaataacttcctcagtttgcccttcaacctgcagcatcaccaagaccattaacattacaaatatgaaagaataaaaaagcctgcaaaacgcggctttgaaaccggtaaacatatgaataaatcagaggcagcaatagaaacttagcttccactacccttaaacatagcactctggtaaagtggagtacacgaatcaagaaagaaagtcagaaaaaaaatgaaatattaaaaccaagcaaagattgttttttgagtctgcaacctaattctacaagatcggatagataaagcctacagttttgctcatacacttcatgtgtcatagctacggcatgaaaactttttaacaataaaaaacacaacttttaatacaccggcagccaattaaacaaatcaattagaatagcataactacacatatatataaatgcccaaacgattatattttaaactagcaatttggagttcaacgatagcaattatcaggcatagtgcatcccggttagaatattccttctgatcagaccaaaaaggagttaacttttcaaaaactattcaaagtaggcaatacaaaatcaaagaacacagtcatccattacctcctccatttctctaagaatgacatcacgctcgcgactaatacggtgctcttcgaacttggaattctgcaaaatatcagaaaggatatcaagcgccttcggcacgtccttgtccaaaaccttagcgtagtaagtggtctgctccctcgacgtgtaggcattcaaatgtccacccatgttctcaatctcctcctccagctcacgcgccgtcctcttctcggtccccttgaagatcatgtgctccaagaaatgcgccgtcccattagtctcttcagtctcaaatctagaaccggcatcgatccagacaccaacggtagcggactgagccgcgaggttcgattcagtggcgactctaagcccgttaggaagagtagtgatcttagtctccggtgcagaaaggatccgagtgtggtcggtgacggtcgggtggggcgacccgtatttgagaaaacgagggtcggggttctcgagctgctggagcttggatttgacggcctcagcgaggcggtcatagatcatgacatctggggccggtggcgacggaaccggaga

SEQ ID NO: 186132 - DNA, 3073 bp, Cannabis indica
gggattacgcatactgttccagcatatctgctgatctatagtagcattatttgatgtagctccaagctcgaagtcaagcgtttcaggcagagaaccgatagtacccctttgcccttgcattacagctaaaaagattgcttgtaaaacaccaaacaattcagaaagaatttcaccacatacaatctgcaatcaggagcagatctgatgaaaaaaaaaaaacaggaacgtgagtacaggattagaattttaatccatcaaagagcttaaaaaacacttcccctgagaatacacaaattataagagttacagcaatctaattcaaacgccaaataaaccaaggaaaatgaaatttaattctcccaaaggaaaatccccttgtgttctaaccaaacatacggtaaattggaatcacgagcagcagagtaaaactccaccatccaccattacaagggaacaaaattcaaataaaaagaagtggttatccaccattacaaagatggagtatgagcttcgaaacgtataatcgataaaccaggaaaaaaaatcacatggaaacggtggaaacggtttcctggtagaaatacaaatcaaaagatggagtgaacgacttatataactaaagtttcatatggccttaacctaatatgtagtcacatagaaaatgattgaaaaataaaagccaagcaatacaacttatttttaagaaacggacagcaaacatgtgtccgtagaactgtgatttacgaaaagaaaactagagcgaaattcatcaccaaatttctgaatatgttaaagttcagaagattaacagagcataataaaatgataaattgaaaaaaaaaaaaatataataacgtaacttcaaaatcaatcttaccaccaaccgatcgaaaaaaaaacaacaaaagtgaataaacccaggaaacttacatacccagttgaagttactgatctatctgaaaattatgaagaaatcaaaggactgaaccccagtaatttgataaaaaagaaaatgatcgaaactctttactcttatatatatatatatatataaaatggtttctctttcttgagagaagaaagaggtgagaaaacagaaactagtgagcaataagagagaaagagcgacgttttgacagattgtgtggacaaacagaaataaacaatggtgagaaaagaggaaaaaaaacagaaagaaagaaggaaagagtgattttttttattttttattttttattttgatggaacagaaggaaagagtgattaaagaataggtagtgtttttaatttacaaaattacccagaagaaagagattgcggaattaatttagtcatactatcggtttttccaacaacgaatttaattaaaataaatataaaacaataaaacaataaagaacaaacatcaacattcaacaactagttgtagaggaccaaagatgtgccatgtttggagttgggccacttaccaattttaccaaacgagtcatcctcacctccccttttatttttatttctcacaagaacccaaaaatcaaaaaggaaggaaagaaattattattatgattataataataataacctataatttgtctagtaggtaagaagagcagctcccaatgcaatgcgccgaacgcaagccctagaagctgtcttgtttccatatgttcacgccaaacacctgcgttcaattctcggcggcttggcctcaacatctcacatgcccttttgcactgaggagctttttctgacttttctagacaacattgagcggtgaaattaaaaaaccgaatgaaattaatcaccactaatatatacacgtggcatagtacaattatttgggaccacctcttctacttctaccacgactttacattttttatttttccttttttttttaactctcaatctggcttactcatagtttaaagtgtgtactagtactattattatttttcactatactactaatggagttggtttggcatcacatactactataagaaaattaccaaaaacgaaatttgatataggtcacttaactataatgtcggtacaatttgttttaccaaagcagggtgttattgggtgattctgaagggagtagggtagatgcattttggatgaagtacacggattgcttaccttatataactttgcttaaaaagtggtgtgaatacaataacctaaaaaacgccttgtttggtatcttaacctccaacgagaagaaatatatatatatatataaaagaaaataatacaaataggcatctgggaaggttctttatcaacttctttaagtatcttaacgaaaataaattaataattaacttctttaaatagcgtccgctaccggtcaaaatctcaatcgtgggcctcttacttttattttcatcttttggttctatatgtgcttttatctttctcttattacctttcaaaggtgtttttctttgctttcccttgtttttgctttatttatttcttgtttgtatacaaagtccattgcaattttttttttttttgtgctttaatttaggccacgaaaacgaacttcgatctgtctatatgagggttgcttataccgtataacccctattgcgtagcagcccatttaaaagaaagaaaagagatatatatgattatatgatattatatatatttaacaagataagaatgacgattcccccaccatagagaatatttagaaatattttcctacttttgacaatggacgagttaacttgacaccatcgaagactctagttgcaaaacaagccaaataaatttagctcgtgacttaaaaaccaattacataataaagtataacatataatatgggttttggccatctatcaatattggaagttgaaaccacaaggcacaagggatagtgtctaatcccacatgacgctagcgataataaagaaatacctgttgttagtggaagggcaaagaaataaagtcaccctgaaaacaaggcatggcaaaagagagtggtggaggtggtagtggttggcaagcatggacctaatttgcaaatcaattactcttaaaaaaaaaaaaaacttaa

SEQ ID NO: 186133 - DNA, 2134 bp, Cannabis indica
ctctctctcacacacacacacatggttgacagcctttgccaattggtcagattcaaagctgtgtgattgctgactaccaccaccaccacccatggcagcccaatacacctctttctcatttcatccattaaaagtgattggagaccaatgtaatcagtgatggggcaagaaagaaaaggtttttctttttcagttggatcaaacattctaatgttaggaaacaaaattatattgtttaggccccctcttaagatcattgtcttattgcttaggcccaatcttaagtgaggaaatagtagcttaaccgtataaacacttgcaaatatgaaaaatgaaaaaacaagaaaagaaagaacaataattgttaaatgcagtgcaattggcagaggacctaatcatagtgtgtaatgaaggcacacatgctatattgtggcactcttttactttttggaattatttcttttgtggaccataaacccacatctaggaaatcccacgcaagcttttcctcctaacacatgagaactcttcagtcacacgtaataatgtagacccataagatgagagaaattccaaagtcttgtatataaattgattctttttgaaaaggaaaaaataaaacaaataatttcacataaatagacaacatgcatatcctaaagctttatttaactttacaatacctagcaaaagaacctcacaacatctccgatgctaatattttggagaacgtaatattttggagaacgcttgatgagatggaaggtggcaaaatatacatatgttatatcattaaaaataaaagaatattatttttgaaatttacattgatgctatatttttttatacaataaaatattaaaagtgcaatatatataatagtagggccggccgtgagttaaaacgaaagaggcagtcgtcttatgctcccaccgctcagggtccattcgaaaagaaaataaaatatagttagtaataaaataaataataatacttttaatgttaaatatgtgttgtatcttagtagtaatttgattagtttaacagctaagaggttgagagttcaaattccaatagctttttatttttgtcaaattaacataggatcgaccctgtataatagtttaataataaaaaaagaattatatatataataatgtgtgagatcataattatagtatttttaaaatgtattatatgtttttaaaagtaaatgtgtcaaatgatatggaaaaaaaataaaataaaatatattatatatttagatgatgtgtagttatataacatcttaaaaaaaataataatgctatcatgaagatgctaaaccataataattctcatgtattgatcctttacagcttgtacccaaaggacaacaaatcatactttgtcccatatatatagaaaaggccaggatcctagttcatctataggtatgaacactcaatttaatatatatccttcttgaattgattaccaagattttctattccattcccaatgctcagtttggaacagagacagccataatataatatacataaattttcttttttttttttttctttctttgagaaaagcaaaaatttccatttagaaaaacaataaaaggggtattaatgtttttccttaatatgttaattttgaaggtaatattattcctaacgacctcaaccaacgccaacttcttatatggttttggtgagcacaattcaaccaaattgatagacctttttgctatattcaagccaaccactacttacaaaccccaaccacaatcttatgatttggttcgatttgaaacatggttttttttggccttgccaagtgggggcacacacagaacactagtgttattacaatatgatacttttttttttgttctttttcttttttagtattgaaaaagatgtttatatgtgtgagagcttattgttcttagggcaaaacacaaaacttcccattttcatattgatttcatcaatcaataggatcacgacataaaatttaatgcacagctctacttctccgtatacattaactgcataggttttgatgtctaaaaacttttctccaagtaaagtgacatactaaaaacattatggtatcgaaattaaatatcaaaggtaagtgg

SEQ ID NO: 186134 - DNA, 4379 bp, Cannabis indica
aaataaatgcgatgaaatggcacttgtccagattttctgcatgcatcattgtagcactacacaaatgacaaaaacttaatatttatgttgaataagttcttgcatatatcaaatgcttttctatttttatttcttgtgaaattttcttctgaactcttaaaaaccaagttgggaagtaatcattttgcaaaatatttgaaattatattctaacatagaagaagctcacaccaattcgaaaagaaggaaaagagggtaagtaagaggcaccaactactgaaattagcataaagaaaacgaaagtgtgataaatgaaaacataaacttcaaattctgtagcaacaaaatttatagccaagcaaaatcaaaagatggaaaacaattcaaaaactgtgcccattaaaagataaagaggtctttaaactcttatccattcctgtccacaacttttgatacacggattaaaggctcagacgatgggggtagaggtagtgattcatcttcattcttggacaatcccatcagtggcacttagctgtagctctcatcaactcaacaaactccaaactctgaaaccggtcaagtgtggcctcctccagcaatggccgaagccgaggaagaggactagaatgccaccaccaccatcaacaacatgtcgtacaagagtgagacctgtatcagccgcagctcttccgcagcctcagcaaccactggacctgaccgaggacaacgtgaggcatgttctggccgaagcccgagtcgagctttcgcagctctttgacgattcagttggcattacaggtgaccctttttcttgtatgttacttttgtcaaatgccccaaaaaagaaagataagatttgctttggtggtttttgattatatgggttggtttttcagggcaagttgatctggctgaattggatggaccctttgtgaagattagtctcaagggtcggttttggcataaacgtagcactgttgttgctagactgggtaattatctcaagcagagaattcctgtgagttaattctactattaattcttttaaattttgatttttgtttatggaaagtgctgaattatgtgataatggcatctgggttttgttttgtttttgattttcaggaaatcttggaggtagatatagaagatgagaaacaattggatgacagtcccgcaagcttctgataagtacttcttttgccacagtttactgtaattcttttttaataaattttactttttcatgaactttcactattggaatttggaatgaatcatgttcatttttctctgttcttgctgttaaaattttgatagtaatggttgaaatagaaagtacgaaattaccaaagcactggaaaaatcatttgcatatttgcatatatataatatatatattatttcactcccataatctccagctcattgttatatgattaataagtgacatatttccaactagtggacatttattttagtgcaattgcaggacatagtaaacttttatatatgtaaggcatagacttgtaaacattactatcaatggaaatacattaacttattctttagaagcactctgtaagagctgaaatattcgattttgagctacagtttgctgtgaggggcgagatcagaagctgaatcaatcctttttaactggttaggatgaatccaaacaaaacatgaaacaagtttcaacataacgaaacaggggacttaatagaaaatgttatgtgctttatttaagagtatgcactccaacaacttccacctctgtatctcagcctcatgtactagaagttgtccttatacacactacttattagtcttcagtcagaaaaaaaaaaacaagtcattctctttgttgtgcttagttgcctttatctcgcttcctttccttgtaacattcctatttaaagctaaccagaaattcattctttcaagaattctacctaaagtcaagagccagaatctcagattgagctacttgcttcttgaaatgttatgtttcttttagcttctttgttttcatgacatatcagaattgagagtcagtaatactaacaatctcacacaaggtgctgtttacaggctccttttgctgtttgggtgaatgttaatgtcgacgctgatattactagtatttttatactctgaactttcacattatcaaaccgtacctctttgatcatcgccaaattttatctctttttattgaaaaatttaattaaacaaaaataaggactgtgctgcgtaatgcaagaggagatattctcgaggtcctctgctaacctctgaacgccaaccctcacgtggttgaagatatgtggatgcttgagtatcgaaatctcgaagtggaatcggtttgtcaaagcttagtttaagcataagagccggatatgtctagcttaggagcttgtgttggaggatgttcattacacttgtagtgatcttttattgtttctttcatgtattgttgtagagaaagtaatatcaatgagaagctctaagatatggtggtggcctggtattccttgctatattcatcattagaattgcctccaactatgcatttattgacttaactaatcatttaatttcttaaataaataacgaagtaagaatgtttgggtaattttctattgatgtgggtttctttctttccttgaggttggttcggcttgaactaggtaatgcttttgctaatatagaatattttgttctcatttctaggttgaaaaaaaaaaaaaatactatatatgagtagaatgatcactaagaattgaatcaacaatatgatgacaatgggaataagctatatcaacatagttaacatggaagtttcatcaacataaaaatactacaacaaatttcacctctttcttatgttatgctctttacgactttacctcaggttatttagcaaaatttacttgcatcatttatgctcttcaattatatatcttttttctttttaataaattatggaattttattaatagcaattagttaaaataattacttagaatctaatcaagacattgttggagatacaaccaagattagaattagaaaaacgaaccaaataatcaatcgcttaattcttagatcgttttacaaaaaattaaaataaatcagataaaaaagattgcagcatcacaattaaccttatgaacacctatagtctacttcattcactgctcaaaacacacaatagtagaaactattgcaacaggtttaatctcttagtttgaacactcaactattgttaaaggtatgtaactgcactactactaagaactcattcagtcacaaaaaacttgttactctcaactactaacaacgatttgatggcgagtcattgaaaacaaagaaccaacaacgaaacaaagcaaattaaaataatgtcacatagacaagactaaaatactcaaaaccatgtcacacagacaagacttaacactcaaagtcatgtcacagagacaagactaaaatactcaaaatcatatcactgatctcgaccaagacagtggttcagggaaggtcaaaaaaaagaacaaccttcgatagttatagatttagaaacgaaaaaaccttaatttttgtttttttagaatatatatttatgtatctttaacttttgagagaaggaaaaaaaaaagcaattgtttgcctttgctgtaagttgtaacaattttcttggaacactggttatgtgagtcatttaccttatgcattgtgctcatgtattcctgagatttctcaatcaattcctacttaagtatttttttttcttcttttccttgtgtgctgaaaagggtagttagttttacttcaagtgaagttgtgtcacactcacaccattgctctaagaaacttcatgatcatcttctacttaattatttgggtgaacatgagaaatagaatctaaggaaacaataatataacatatgaatggtagttagccaacataaagaggcccccccacttctcttagggaccactaaagagaaatcaagctaatttggtctctctctgtgtctttctaacaaaaatcttcacacgtgattcacatgaagattgaatctgatcatgatatcagaaacttagaagacgactttcttctattcaaacatgaagcaagacttgtcaagtttttacaaaggtttaaactaaattaatatgaaaaaaaaaaaaaatcattgtctttaagaaactagatgagccgaacaaaacaaaaaaaaaaaaaaaaaaatcgtagcaattattgtgtcgtttgaaaagaatttagatatatgcatatgttgaggttgtagattagattgtacataattttgataagcgtcttttgtggcaaaggtctcggcgaggaaa

SEQ ID NO: 186135 - DNA, 875 bp, Cannabis indica
atatatatagcccctttggcatcaagtactaccacttcttagatggtggtgattttattacttattttgcaatgctttgatttatttatttatttttatcaattgataaaagaatcaaatcaatataaagtgattaaaaagcgcatcactactacttatggtgcttcatgatttatctgtttaatcaattatttccctacataatttgcttataaattaattaactgcactgccatctctctaaataccgttttgggtttttttttttggaaaagatctttatgggtttctcaacaattaattatttaaggcagtgaataatgtgaaatttgtcataattattatgatcccgagatgggtttttatttttaatttgataaaataaatagatatttatatataatgcagaaccacccaagaaaataacaatataatagagaagggaagcttggaaattaattgcaacagcaatattcctttattatctttgaactttgaaggtcaatatgtataattaagcaaataagattataaattttttgaactttgttcaacaatattattattgaaaatcagctaatcatgtgggtcgtccaaactttcatgtgcaaaatgatatatttaacatataaatatgagatagaatatgggtgcccattaatattaaaggtctaagacatattccctcttctttaataaagaattcttatttgtttttccaaaataaaataaaaattgttgttcaaattaaacaaatcaaaggaagaaatctgtgtttaatttcatgtagccatatgtataaataaatacagtatatatgatgagtgggagggaagtgtccaaatctcatgccaatattaatatatatatatata

SEQ ID NO: 186136 - DNA, 3676 bp, Cannabis indica
tcacggataggcacattgagcaagagtgattgagtctaacaggtcagtggtgttaggagagaagtgagcgatgatttgcgtagtgacgagctggcccgagctaggctgtaaacatgaaggaggtccttgatttgagtggctgcgatgggagaagcatcactaaaaaggatgatgtcatcagcaaaaaagaggtgtgagattattggtgcattcctggaaatcttaagaccaagagcatgtttcctgtggagacgctgattgactcgttgggttatgagcgaggaaaggccttcagagcatagaaggaaaagataaggagaaagaggatcgccttgacgaattccacgggatgggataacggatccacatagttgctgattgatggagaaagagaaggaggtagtgggaatcgaaatttttccataaccctcttgaggaagctccattcaacgcggtcgaaggctttagcctatgtgaagttttaaagccatccagccgaaccttaccattttttcgatgagttaaagagtgagttacttcttgccctctgatgatatttgtcgaagattaaccgttgggaaggaaggcactctgggtaggcgagataattcggcaaagaattggtttgaggcgattgactaaggtacgggaaattattttgtacattgtggaacaaaggctaattggccgataatcagtgatggcttgagggtggctcttttttgggataagaacaatgatggtgttattgataggagacaagtctgcattgttattcaagaagctcagagcagcatgcaccacatcagctccaatcgccagtttttttggaaaaaggtgccattgaagccatcagggccgggagacttgtcactagccaactggaaaacggcttgttggatttcatcctccgtgaagggggcttctagacaagagcattccgtttcggtaattcagtcagagattccagataggacatagtctatatgctcagcagttggttgttgagttgagtaaaatgttgttcaatttctgttagaatgccccgagtatcagtgacagtcgaaccatataggtgagtgagagagtgaatcttatttttagctcgacacgaggaagcaaattgatgaaaatatcgagtgttcttgtccccgagttttagacaagtaatgcgtgagcgctgttgccagtattcctcttctttatagagaagtcgatcaaggtctccttggagttgacgacaatgaataatatgagagtttgatggttggggattgttttgagcgatgtgaagttgagattgaacttctttgatttggcgaggaaggggaggccctagagttttctgccattttgaaagagtgagggtacagtgtttaagcttgttggcgatattggaaatatgatcctgactctgagcatcatgggtatggttccacgcctgtgtgatacagtcttcaaatctgctttcggcaagccatatgttatcaaaatggaaacgttgctgtgaaggatgagagttaggcgcaatttggttgagagagaggataaagctcgatgatccgaaccaaagaagtttccatggagtagatgtgcattaggaaaggaggacaaccacgggaggttcgaaaggccccaatcaagtcgttcttgtatgtgggtgagcggggaatgtttattggtccatgtgtaggggctgccatgaccatgaatgggattaagaatatatgtatcgaggaaagtgcagaaaaaaggcgaaggtcgtgtattgatagtccccccaattttgttagacagggaaagaaaaatattaaaatcacccattataagccatgggctattataaacagtatccccgagacggtgtagaagtttccacgtgttggcgcaattattgtggtgtggttccccatagaagccagtgaaagcaaaagtgcaataattaggaaaccgaacatagcaatgaaagtgatttatattataggatagtaaagttacatcaacatcctgagtccataacaaaaggagtctgccactaaggccaactctagggacttcaagaccatatgaaaaggaaagcttagatctaattttatttatagcaccaatagggagtttagtcttcataatacacaaaagcgttggtttaaactgcttaaccaaaagggagatacgacagaatgctcgtttactccccaatccacgagcattccagttgatgagactcatggctcctggcgggtgcgctgagcgtcacccgcctcatcgggattgttctcatccaaggattttgcttgattacggttatgctttagaaacttccggaactcggcctcattgatgcacggagggcgtttggcttaattctgcggccaaggggcgcactaagggttgacgcagaggaagcaccaggagagaatttattttattctaacttcaatttcagtttataacactagagtaaactctagaatatccacttgaataactaatataaacctaataaaaaattattaatttaccatttacttactacttaagtaaacttaatgcctagtagtaaaatggtcaaaaaaatattacctcgcatagacttaagacatttcaaatgtctaaaaacttgctccactaattctttgatactctaccgtatcactgtgacccttatagccaaattgtcacattctactcttatcgggcattaatcatgaaaaattataaaattcacacatagcatgcgtgatatacctaaaatttaatataatctctatgattaaaaaaattatctctctaatgtctattcagacaacaagtcttatttttctaataatgaacatataatcaaaaaataacaattaaatatctaattatctgctaagtctcatgtttaaactatgtagtcattacatagttagttcgagcaggccaattgcttataatgtcaagaaccccgaagttcatcttctcaactctactcttcctttggactgctcagctgggattgtgggagctacacttgcatcagagcatctcacccaacaagctttctaatattttctcaccaagaacaataagactcaaacttatccttggaactaaatggtcggggctaaggaagtgggttgacaaagggaggtttcaggagagtagaaccgattatggtggtggtggctgcattcggggtcttggtggtagtggtggctgataaaaaagagagaatgataggggaaaggatggagggaaagatatgttaagaaaataatgagcatgataatttgggtaggttatgaaagaataacataaattggtaatgtttattagtagatgattgttttattattgggaccacagaaactcaaattttcctttacatagtgagtataattaagaaatttttacataatacattaaaaattttaaaaaaacttataaaaatatgttaatacggaaaaattttaaattttaaattttttctttacaaaatacgctcttgaataaaaataataaattgttcgatattattttttaattgttttatagtttatttatagttattataaagtttattttctcattactttttattattttatagtttatttataattactgtgagattgatttctcgtttttttagttgtttttattcattactatttttttttttacttaattg

SEQ ID NO: 186137 - DNA, 793 bp, Cannabis indica
aatatatactattaataatgaattactaatattataatgtacctaacataataactttttccttatgtggtgcgggaaatggatatgggacaccacgtttgggtaagatgactatggctccatggacagtggctctaagccatagaatgtgtgcatgccaccatagagtgcctctttggcctgtgagcgtatagttgtatatgtattgttgtcctggctgaattggacattgtgtaatgtatgcaggtccatcagcccaccctgttctaatttgtctaatgccatgcctatttttttttttaattttaaattccatataaatataagagatcattaaattcatcatcatgtttcgaaatatataataattaatgaattgtagaaataatattattaagaagtaataattatcataactcaccaatggatgctgagattgtattggacgtggttgaccaccttcaccaaaacggtgtcgtcttctcttgcatatatagttggaccaggaaaccttccgttgacagtcacaatgggcttagtagaacacaattttgtgctgttcttcaacaccacctgcagaatatagatgatgaaaattaataagttatttttatttaatgtatatttgtgcatgcatgtatatgtatatatagagtaactatatagctagctgctagctcttacgtacgttaaacttgtagtgtcgaaccatgcattccacagaggatggaaacaaacaagccaccaccactattaagaaccgaatccaacaaaacatctccattattaccta

SEQ ID NO: 186138 - DNA, 2216 bp, Cannabis indica
agatctagaaaaaaaaaaaaaaagtgaatatcaagcagttagtaaccaaactagaacaaagtagtaagagtacaagagagtcctccttagtaatcacttggagaggtccccactggaccctatatccaagaacaacccgttcccagataacagattaaagaacattgaaaagaaaataggtaatgatcatgttttgacctaggacccttagggtccaaaaaaaataagaaggatgcagttaggtccctagggacaccttctgtgtccatgagataaacaatcatgcaaaaatttgaaacaataatttctaaggcttcctgagtattcaattcactttacatggaaatgtctctacgaatcaggtcatgcttatgaatttctaagttctgagataaataaagaatttaaatttccctatacggcaaagcctatagaaccagtccataaaccccagagttaacatgcacatctattatacagtacaacaagaaaaacttgttcaagcaaaataatttttttacaagaggacgaattacttacttgtgatggtcaaattaggtgtgatgggtattgcatggctagtgagcttctctcctgaaagttccaaagcctctgtacgagtttgtcaaccgtgcctttaaagtttgactaggttgatgatggaatgggtacgaatgggacaactagtaaataacttcaaacggaattgcacaaggtgatttaataaattggaggtgggagcgaacattcaccaacggtggttttatgggttcggaaggaacttttctctctaaaaagcttaagtaattcaaaaatagtcaaaagtgtttaataggaaaactgttgagtatttataagaaaaaaaaaaaagtaacctgtgtgccatagatccaatggtataagtcaaatctaaggaaacacatatccccagatcaattggcttgggaatgcagaaggacacctcttaaatgctcattaaaaacgaagggatttaccttaaagatgacatgcaccttgggaagcacgctaacataataagtcatcagcgcacaacccaagacaccatgcaccccaagctaagcgtgtgactcatatgtgcctcccgcacattgacacgtgtatcagactaagggtataccaaaggtcaagtagtcatccacatcataccttgacaatatacctaaagggacaccccaattcaagcttccatgagctactggaaactcagacagaagcagcaagctttcgcgacccccatgtcctgaaggcttgggcagtaattggtatatgcgtttttggatagctaacaaatgggctgcattaaggcccaatatgagagaagaaccacttggcaagcctctaaaggacatatacaaagggttcaccccatccggggatgaatcaggagacataaagctagagctactagaaatatcctctactagtggacaaggagacctggattcgaataaaccaatgacctatattataagagcaagtgtaactttggaaaagtatctatagaaggcttttgaatacagaatgtgaaagggcatccgacaacgataaggttcgcaaaaattgacccacgtggcacacttcagacaggctcccaagaaaatagacggcttgtcccctttgtcagagcacaaagaggctcacgacaagaggctcacgacaaaaaggaaggtgccttttttccaacacccgtttgtactgacattctctttcacaaggccttcagcacccatacaaacgtcactttctactatgtctcattgtacaagcgacgattatatgttgtctaggcctcacctatgaggcctaaaatattaatattttattgtatttaccctatcactggactttaaacgtgatatcagttgtaaacgggcccaggtcagtccataaactcgactccttgcctataaatatgacataaaccctccatgtagtgcattggaatttttggagtagctagaaattcatacaaagagcagaaaatagtccatagctataagctttataatattgtctcgtggattaaaactcgttaacgttcaaattacgtaagatcttatcttattcattctttaaacacattttttttagctcaatcttcttttaattcgataaaatgtacggtcaacacatgccaccaaatatcatatttacctaataagaaagattctattagggtgcgtttggaagtaact

SEQ ID NO: 186139 - DNA, 2384 bp, Cannabis indica
ggtgggtcattttcatgtagtcatgtatatgtagtaggccatctaattcaaacttaccattgattagttgctacttaaaatcttgtttatgtatcaaataattaaataaaacctttaagttttctcacagcaaacacttttcttaagcatgcaaatgaatattttaatttggaaaaaagattgtaagtttattccttttctatttgagaaaatatcatgattaaaaggtgagaaatgtggtagaaaccaagtctattgatttgatcacttattgtggtgagattcaaagtggaaaactaaccccattttatagtgatgagttgagattcatatagcctggtccaaaactaaaacccatttcctaggatctacttgacattgtcttagtgttgactatattttgtgatcaagtattattattattattattgttatcgttattattatatatttctgaaactattattataattattttatctttactttttcttttccttattttattttatgaaaacacctacatatatttgctccacttcttccatcaaaaaaaaaaaaaggatggacaataacaattaacaaaacatatcattactcaacttgtccgaatttgactttggacttagaaggaaagtcctcgagatttaataataaatatcttattattttctctttttaagagctccacaccttcacttgcactacaactctcttgatgaccgaaaagcccctttatgtgagctagagatgagtatacaactctatcccatactcatatccttctgttgtattctttattagtggtcaagtaatactaacaaaagcaccttcaaaaaaatgagatatctaaaaataatgaactatcaaagatactattgccataccatattgatagttaatctgataataagatgggggtaaagtacttgtggtccattctctctttctaaagtatcaattatggttttcacacttagcaataagatttagccaaaatgactaatagcatagcacccacttcaataccaagtactactaagaaagatgaagtgagataggttgtcatgtttaatggtaggtgactaaacaaccaccttcagttcacatgctctcttgtgctacaatattataaaattaaaaaattgcttccttttctttatttatatatttatattcttcatatagcaaaacccaattttcaaaacatcactcattttcacttttgtgccaagaaaaaataattagcctacaaaaaccaacagatcacttttctgtatgtattgtaaaagaaagtacatctttctgataaaaagaatatcaattgtgctgctacagtgtttttcaagtttcaaaatgaaacaaaaactactgagaatgaattcttttactgggtgtttacaagtataataaccagcaaaaaaaagaaagaaagataaaaaaaacttgtgatatgaaagttgacaatggcctaattgaaggctatgagaagcagcacctcagctagttgttgaatctgcaaaagaatcaatgaaataatgtccagaaatagtatgtctgtacactgttttgaaccttcttttttttctttttatttttattgaaaatccatgggagggaccaaaaaaggggacaaactcagtttgatattagacccacaaaagcctcatgtttgtggctgcttccaccccaccatggctttagggaggcaacatgtccattgctgtcttcttcatcaggagcaggaagattcaaatcaaggaagtcccggatacccggaattggctttttgatcacaatggtttggctgcttttggcatctgaagaactattgatcaagtgggatctcttgtgaccacccaaggcttggcctgaggaaaacaccttgaagcaaattgggcattcatgacctttactactcttcttggacactttaattttctcaactacttctctctgggcttttttatcatcaccagcaggcatattatggtgatcatcaataaggctcttgtcatcatgatcatgatcatgatcatcttctgctgttggttctggagagatattatcagtttcaatgctgttttcacagctatcaatgattgaagcaaagcaacctttactcttcttatggctagctctatgacctccaagagcttggtaagaataaaagactttgttacatgtggtacactcaaatttactcctcttatgagaaatcttaaacatctcaggatctgaaacatcaggacttaactttttcaaagaatctactctcaagttaggatcataatgatcgaaattaagacttctcttggttgaattcaagtacttcttggaacccaattgagctaactcagtctcatcactcttaagcttcatct

SEQ ID NO: 186140 - DNA, 4708 bp, Cannabis indica
aaaaaaaaaagttcatttttcttgttcttgataggaggagaagaaatcgagaatgcccgtatgaacttaaaaacccctccttgtttttgcaacttacatttttttgcgttgtcattgaccacaatgtacggatttagttttttcgttttaggggtgaggaaaagacggtgatgcccttgatgatgaagagaccagaccagacagaccactgtctgactggttatattcgtttagctttttatttgatcatattattaacatcagggtatttgattgttctagtgttttaattataaagtggtgtctttttttatttttcttaaaagtagaatatttggttttttttttggtaatgaactctattgatttcgatagaggtgacaatggtttcatgttttaaagttgtgaagttttaattttttttttaaaatcacttcttgttcttatagttgttctacactgcttttatgatatatcgatgttttgcttagtagaatttagtaatgagataatgggatatctttaatctaaatggattaagttatctttgtattttggtcttgtcctggcgtagtgttaatggtttcatatgaggaatgtgataaagtgattctcttgtgcttttcaaatggctatagctacttgcgcttcagttatggtgcctttcttgattctactcttatttatgttgttggtatagggagttcgttttcatagagttatcaagggctttatggttcagtgtggggatatttcagcgggagatggtactgggggagaatctatctacggcttgaaatttgaagatgagaatttcgaagtgaaacatgagaggaaggggatgttgtcaatggctaactctggtccagacacaaatggctctcagtttttcatcacaacaactcgtacttctcatttggatgggaagcatgttgtttttgggaaggtaactaaaggaatgggggtcgtacggtcaattgagcacattacaattggtgagggagattgcccaactgctgaggccatcattgcagactgtggggagattcccgagggggaggatgatggaatctgtaattttttcaatgatggtgacatatatcctgactggccagctgatctcgatgagagccctagtgacttgtcatggtggatgactgctgttgaagcagttaaggcctttggtaatgactcatacaaggtatttaatacttgcctttctttatttgtgttcttaatttttaagttgattttcatattctgttatgatgaattgagtttatacatcattatagtaatcttcaattgaagtctattgaaacaaatcaaagtgcatttagtggaaatgaatgtttggatttttacttctctttctatgtttatgttttgttaacaaaaacaatttattggatacagaaacaagactttaagatggctcttaaaaagtataggaaggccttgcgttacctggatatatgttgggaaaaagatggcattgatgaaggtagcatgtctttcaaccataaaaatatgcattcccaaatatttgactgagtgaaatgtgcttcattggctcaatattctttatgttactcattgtacgcacactgttttttttaaaaaaaaatagggaggagttcgtctttgagaaagacaaagtcgcagatttttacaaacagctctgtaagttcatgctctctgtgtcattccaatatgtttataaaacattttctcagcctatagttgaagatttttgtgaattgtcatctaaattaaatatggaaatcatttctgttaagtttctttaaaaagataaaaagaagaaaaccacttggttgttcttctttagtccactgttttctgttaaccataaatgaatgttggaaattttgttttaggcctgtaagctgaaattaggagatctgaaaggagcactattagacacagactttgcaatgcgcgatggagagaataatgtgaaagctctgtttcgccaaggtcaggttggtatcttccattaattactgaaggaagtttagttgagccactcatatatatagtctatgaaattttcccattcccctgttagtctattttattttgtgctcctttaattctttttttccctataaactatgtaaagcatatcttttgggccttgttattgaaatggttgattctaatggttaacattatattttcaaatcttaacaatttggccccctctttttcaggcttacatggcccttaatgacattgattctgcagttgaaagcttcaagaaggcaatagatttggagccaaatgatggttagtgaatgttttagtctgtcttttggtcattttttttgttagaaaatcgaacaacctaataactagaattttcaaactataattttgtgtgtactcaaattgagtgtgtcgaaatctgtttgaacaatcctggttactgtgtgtggaggtcttgcattgtccaaaatctttgtaatttagtttttgacttccaatttaatttctgagcatctaatagttgaccaggtcttctaatttcttgctatataaaataaagtacataatggcacaataaagtgatttctatcttcattacctaccttttagattaaattgttgaaacttgctaataccttctatctatttggtgattacagctggaataaaaaaagaactcgccattgctaagaagagggtatgtaacttcaaaccaaattttttgatttttaaatagctagaaagaattacttttcattgtaattacatgtaaaatgttgtgaactattacagattgctgataggcgcgatctggagagaaaagcatacagcaaaatgtttcaatagcattttagcaggaaaaccggtattcttataatgtctgttattttcatttcataattccattttggtatgtagattccttatgttgtttttattatgcaggctgcccacaaattcagagaatgtatcagatttcatgaacttaatagttagagtcaagtggttcagtcttttttggctactacccaacattctggaggagattaaggtaataaattgttaagaatagtctacatctttgttctcgaatgatttagctgtggttttctttcaagcaattaggtctttgtttcttgttatggccatacttaccaatgctttttttggtttttttggtaggtttttttttttaatatgaatggagaacaaaccgctccccacaggatatatacaaactgtaaaaattctgaggcttgaaccaaatctgatagagttctagttcgtttttgttcatctcttcatgtgggaagtcttttctagcttagagaaacttgttaacttttactggattattataaatcaagaattttgtcatattccatttgggaaaggattttgggtatatagtgtgaaattttgattttatcttgtcttggccatttgttggaatttactatgttcatgttcctcgtaacgcccaaaagttttcatggcattctggtaccttctgatctcaggcccaccaacctttatgattggccttaatacgcttctttcactattatatgtataattttgtcaaacgtattccaacatagaatggtggccaacttaattttgtttttatacatgcttgtccaataaagctaacaaggtaaaaccagaaccattgccaaggcagtcttgcaatttgaagctgtttttgctgcattttctgaaaaagtatgtaacggcttaccattattgtcctgcctgtctcagttgagtgccattaaaatatacctttcaaatttataagagctggtaggtgaacgcaatgagaggccaaataaaactcttagcccaggcataaagaatctgaacagtgcccaatacatcaatcagtcaatatgactacactgtttttcctttctaccttttccgtagttgcttgacacacttgaaccttttttctttatgggtataatcaagttagagcgtacaggaacagaataaagcgcacacattttaatggaaaggaaaaaacatgtcctagcaaagaagtgaataaggcagtgaccgagaattatgagttgtaatcatcaagtcccagatcccttagagcgtcagtagcagcctccctacagaactcatggttttgtttcgttttccttatatgcttctcaacgccattatttagcagaatagttctgtcaaaagtgaaaattcttaatttagattgcaatctataatggaaatctcataaaagcagattggacaaatgggggtatgtcaaatgggagagggagagacttacctgttttcagggttcctagcaacaagattacggatcatgagacaggcacttttctgcatttgttgtgctgctggaaacttctgcatggcttggatggcaaggtcaccagacccagcttccattgcccgtgctgctctttccggtgacctcaaagaaagtatagagataattgacataacctgtaaacataagtaaacaagtgtgagataacataggtaatggtacgcccactgcatgggttatctttccaactcataatgattctcacagtgaaaaaagagggtgatttgaggaaaataaataaaataaacgtatctaaccctaattcatgtgctttaaacagataagttcctatcagtaggtccaaaacagagttcctactgcagaaaaccctatata

SEQ ID NO: 186141 - DNA, 3861 bp, Cannabis indica
tattgtaggcttgtaatgtttatatggtgctatcaaaatggccgttttgttatcctctatcttgattgaaaaatttgtccaataataataataataaaaaagaacaaatctgtaaaattatctttccaagttgatttggaatagcgttaatggctgtggtttctcaagaaagaagggaaaccttacagaatttggtaagtacaacttgccataaacttaaaactaaataggtcgaggagggttctatgtctcttgagttagtttgtcacattgtttgagctgatactttttttttggatagtcttttcatatatatttttttaataaattctcataaattgttatattcaaacaaaatatattttgctttttaacgataatgtttcgtatgaaataaattttcattgccgtaaaagaaagatatgaaataaatttaggattattttggcgtatagatatgccatattcatgtgtttgaaaatatgttatacataaagtttgatagaagagacaatggcatatattattgtataccgagttttgaaacacatacatttcatattttggcaagcatatgaatattagaatatatataccacttccttgacttgagccaaaaaaattgtacatgatacatttatccacttgtttgtcccctctttatggtggtaatatatactctttggtggaagtgatgttcaaactctcattgtttaaagttactctcaaatattgtgcaagtagttataaatccaaaagaaccagcacacataattagtgtaatataaactgtctaaatttgtatttcttagaatttttttttagaaaaaatgactacaatacaaatctcaaagcgtaaaaactttcagtcaacaaactaattattcacttaaattttataaagaatagtctctataaactaacctataaaagatcaatctactccagaaatgtattatatttcgtagtttagtatttgtagttttctgtaccatgttgtacactaataaagaaaaagaacttaaataaacgtgttattaagtagaatattacatgggtgttttgggtattatgcctcactactagtgattgctcaaacatcgaacgttccttgcactttcaaagatattaacaataatatacatacaagacaagacaaagtggtcttcaaactcagtcaaattcaacaatgtcggccatatttatattaataattcattgatggtgttcccacgttccttgaatcttcacttacaactcacttgtggatatttgttttgtttatgtatgaaatgctgcaaaagtaataagcagtgtaaatatagcaatggcagagagtctattaatatcccaattagctgaggcagttgtatctcaagcagtaggaagactcagtgagctaataatcaacgaaggtgcatcattgagcagtgtgaaggcagatgtggagaggctacgagatgagctacatcgaatgcactgcttctttgaagatgcagatcgcaggccacaccaccaagacaagcgccttcgccattggatatcagaacttagaggtgttgctaatgatgttgaggatgttattgagatgttcatctccaatgtctcctcttcttgcctccaattcttctacctccgcagactcaggagccaaatcaattcaatcaaaactaagatggaagatatctttaaaagctcccaaacttaccggattgaatctagtagtcgtagtagtagtagtagtagtagaagagttgaagggactagtagttctgtttctgagctacagcggcgtctgaggagatcttgcccagatgacaatgatgatgatgattatgttgtgagcatggagcatagtgtgaaggctttgaaagatgagttgatcatgttgaagaaggaagatgatgatgatcaattgtccatagtttctgtggttggcatgggtggattaggtaagaccactcttgctaagttggtttataaaagcaatgatgttaaacaacactttgattgttgtgcttgggttttcatatgccaacaatatgtttctaaggatattttgtatgaaatcttagttcaaattgataggggtagtgatagagagaaaataaggaatttgaatgagaatgagatgagtgataggcttaagagtgagttaaaagggaagaggtatcttgtggttcttgatgatatttggagaattgaggcttgggattgtatcaaaagagctttccctttaggaaatagtagtagtaaagtgcttttcactactcgaaacaaagaattagcattgtctgttaatccatgtagctctccaattgagccctcttttttaacatttgaagagagctggcaagtacttgtacaaaggcaagcttttcggagaagtggttttggactagaatttgagatgttgggtaaggacatggtgaaaaaatgcggaggactgcctctagcaattgttgttcttggagggctgttgagaacaagaagttcacttgaagaatggaaagaggttcagaaagatgttaactcacacttgaataagctccaatcacatcaagagtatgaaggtgtgaatggcattttagccttgagctactatgatctaccttactacttgaaaccatgttttttgtatttgggaagctttccagaagacagagatatagagaaaaagacattgattcggttatggattgcagagggatttgtacaaaaactgaaaagagaagaggcaaatgaggaaacattggaaaatgtatgtgaacaatacttgagagagcttacaaataggtgcatgattcaagtgagcaaaaggaacaattcaggagtgggagtgaaaacataccgagtacatgatcttatgcgagacttgtgcgtgtctaaggcgaaagaagagaacttttttcaggtcattcaacatcaaaatgagagtaacatgtcagagcagggaggttcttcaactcatcatggtgctaaaacaatcttttcacggaaaattgttcttcatgttgggtgtgatctcgatttgtgtaaagttcaactccgtctccattcccttttgtgtttcgacaacggtcattttcttgtgagtagcttaagaaagaagactttcatgttcttaagaacactgatacttggaagcacttctttgggagataacaactttaagattctgaaacaaatctgcacactcatacacttaaggtaccttgggctgcaaaaatccaataatttgcacaaattgccaaaatgcattgccaacttgcgtagcttgcacactttggatcttcgatatagcaatgtcaaaatgctacctacatcaatatcaagactgacacgtctgacacatcttatgagtgataaacctttaatgctcatggacaaagagtcaggtaacaagtttcttaattttgctgttttaagtgttagtcctgctaaaccgactccaccaaccaatccggcacagcctaccactcctatgctcataagggatgtcttaatcttcaaatatgatgttcttctccaacttactaatcttcaagagctaaaaatgctaattagaagcaaagaagaagctacaaaggtgctagaatcggccatcataaaaggcggtagaattcgatccttggatcttgacatggtgtttcatggacatgtacttcaaaatcaactagcaccaccaccaccaatgccttttccaagtctaaaatcactctctaaatgctaccttctcaataaactacgtctaagggggccaatagaaaaagattctttgcaatttctgtccacaagcctagtcaaattgactttggaacatacatgtattcaacaagaccctatggcagtactggaaca

SEQ ID NO: 186142 - DNA, 3513 bp, Cannabis indica
tactgatcaggatcagaattttttccagttacaggtatacaatgtgttttcttatgcttgtctttttttacttgtcccaaaataaatatttttaaatccatcaacttggagcaggaacacatgcatttccttgtggatgcaaaatgctgaggtgcatgttgtttagcttgtcttgtaaatttttagagttttaactcattagttggacctctaggtgaatgaagaagattgttcttcacaattgaaagggttggtgtgtgttcacaacgaacaaattattgacacccctgttagtcgccaccttatacttttgcaattcgttaaaaaaactttttggttgatacactgaaacaccttttctttcccttcattttaggcaagaggtttggttgttgacatggttgagaattcatcccctagtgctgaaatctcacagcagaattatcaggtttgaccgtttgtgatagggctatttgatttattctagcattgcttattaataatggggatacctgcgtcaaaatacgaagttagtacgtttgtagcacttaagtatctaacttgtttctttatttgcgaaaattctcaaattattatgtttgtagcatttgattatcctagttattttttaacgttaaaaataccttaattattacatttgtagcactcaagtacccaagttatatgcagatttgatatcatgcaagtacacttaagcaccaaaaacttggctacataagtgctacaaacgtaataaagtgtttttttttgaaaaaaggtaataaagtgttataaacgtaacaatatagttattttgtcgtaaataaataacttagagtatttaaatgctacaacatgataactttggttctttcgccgtaaatatccctaacaatatggactttttcatatttcttcatgcactacaacaaaatgcctaattttttcaataaaggatttttgcgtcattacaattagcgaagctaaatttgatgacgcaaaatgttagattcagcttcagtagggaattgatgcatactcttttgtgttcgtgcacaactgaagcaaatatacgcttttgtgttggaagaagttgatctagacttgcagtttattgtgtcagcatgtagcacatcccgtgcccgcgccaagcaccctgttgcaatagtttcagcgtctgttttacgctaatgtatcttaaaaacagccaatataactcaactttcaatgcaaagaacatcaatccaacattaacaattctaaaaagctaaaaactaatacaattaattaaattgtactaatcagacaatagaaaaaccaaaagaaagtgaatgttgatcacacaatattgtcctttttgaatataatgctgtctctttctttaaatgtagttttgattgacgtataactttaattgtatgtttcttcatttatagtctttcaatttcttgtgctttccaggaatcactggctcaatcaacgtcattaaaagaagacctagcaaatactaaagactgcaaagatgttagtgtgctcaataatgaacgaagaagcgctgatacttcctccaaaccaggaaaaccgagaaggtcagtgagctggcattacttgttgcctttgatgccattaattagtagttccttcaagcttgtactctgccaaatttaatcctgtataaaattactgtggtgatcaggagacttttgccagcctcatctgtacttctaaaagactttagtactctggaaattgatgaaaaaagtgagaaacgaaaggtaaattttgttggttttttccttttaggaaattaaattttactttttggtattaaagttgaatgaaagcagttcctataatctcaaatgaaatatatttttatatacatatatattcatttctctcattgttattccaactatattgtgcaggaaaataggggaggaaagaaattttatgcggaagagagaaatagaactcaagggaccatttctctcctgcggttgctgaacaacaatattggtgtttagcatcaaaataagcacaggtttaaggttcttttttgtgttttggtcagatttggcactaatccaatcatgcaggcatctagaatctgtgacggaatgctgctgctgattattgtcattggcaggcaagtgtgcgtatactgtattgccctcccagttgagtgaaattgggttgttgataactctattttttgactgttttccactctttcctctccttattttctcatatgatgttatgttacttttaacatcattgataaatatatatatatagagagagagagagagaaacactcaatttgtggaagaaaatccatttgtaaaaaggtgaaactttatcagtaaaaaccaaaatagggaaagaaagaaaacgagtattatgtgtatccttttgttgtgtttttactagttgcaaaaaggtgaattttattattggatatgtgtttcttactaatttattgtgcggaacttattcttattttcttacaaaaaagaaatttgagaagtccaacgagtttgtttgattctggtttcatcacttatacatgtgtatggattatggaatagtgatggtggagtcgtggtgagtggtcccatcccagtgatagtgatacatacctgtgacacttatttttacaggtcgctattagtttgcaacttttaaaacttgggattaggtacttactctaaccatatccgtatatgccaattgtggtcaaaggttaagactaatgacttaactaacttaaactaaagtctcaatcctaataactagctcaagtttcaaactttatcttccttcattcttaatttatgacttaaaatatttatcagaaacattttcaaacattattattattattataaaaattaggaactgattcaacgcagtcctctggctggcttttgccgtctttttagacaaaaccatatgactatgactgactatatggctgaccttttaaacgacaaagggaaagaaaaaggtaacaaaaccaggggagcttcttttttactcctcaaaaaccacgttctgtttttaatttactggccaaaccacgttaatcaaaacagtcaaaagttaattcttttttaacatattcgtttgaggccccttccaaaacaatcccaaaagctagaataatacattttgatttgtgccagttgccacatgtgtactgtatcattatttagatatatatttgaggatctgatctgccaatcttcgcatcttgctttaccgtttgatataatctctacgctttgcctacttgattttgacatgtcacccctctctgtctcactctcaaaaaaaaaaaaaaaacggtgaaggattgattttgacattgacatgtcccttcacaagaccatagtgtgattgtatttaatctaagtaatactttttaacggtgtataatgtgtactattctttatgtatcaaaaaacatgggtgttagaatcatagccaaaaactgcactaggagca

SEQ ID NO: 186143 - DNA, 4488 bp, Cannabis indica
cttgatgatatcacgactatccagactatttttccacataacagaatcattgcctttagcattaaccattaaaaaaatttcatatctgcagtatttggataacaagtagttcacccaatgtttcggctctctccttacaatactccaggaaagttttgataagagagctttgttcatatcctcaaatcttctaactcccagccaccccgagtgtttaggctgacataaaaagtcccaagatttaaaggctagatatctatctttctccacttggcgcgtccaccaaaatgttctgaccatagcatcaagatctctacaaatagagatggggattttattagtggacatagcatataccgcaatttaggcagcaaccaatttgataatcgttaaatgtcccacctaagaaagaaatctcattttccaaccagccagacatttgaacattctctcatttaaaatggcatagtctttctttttccttcttttgaaaacaaatggattacccaagtgtttctcctcaccattaaccatgcaattttgcaatcgattaagaatggaggactttctgtgttggcttaagttgtttgaaaagagcactgaagatatctacttgctagaagtttggcccgaccacttctcatatgtggctaaacagttgagtaattcccctgcctccttcttagttgtgacacattccataatcatgtcacagctccttatgctgaaaccgaaggcaagaagaacacgcttaataaacctccattccatcttgtcttaagctttgggcatatctaatttaagagccatcagaccaccatttcctctcttatgtttgatcttgtgaaccagctcttgagtaagaatagaggattttacgatccatcttcctagaatgaaggtcgattggataggagagatcaaatcatccatgacccgtgttagcctatccgtaaggatcttagcaatgattttataggagaaattgcgaaggctaatgggcctaaattggtcgatatgatcaggatgatccaccttagggattagacagatgaatgtagaattcatttgtttttccaagacccctgtttagaaaaacttttgcactacctcataaacattatcacccaccacaatccagaacatatggaaaaaacatcccgaaaacccattagggcctgggaccttcagaggatgtagctcgaaaatagttgcccttatttcctcggacgtgggaatgctgatgaataacacattgtcctctgagttaattttattagagaaaagatcctctaaatctgaggaaatttgggacatactggtagagtagagcttagtgaaatacccgtttatgatcgtagtcaagtgtctcttcccttcacagggtgcaccggagttatctttaagcacccaaatttggtttcttcttctacgaatgattgttgaagcatggaaaaatcttgtgtttctatggcctagagagagcccttctcttgatttctgtctccattccatttctttcttttgccaaatttctttcaacttatcctgaatataacttcctcatgtaccaaagacttagtgatcggctggttttggatccaaccaagacgattctccaattctgagataatcgaagcactgttgtcgtaatttaattttttccaactctataaaggggttctaactttgttcagattagcaacaaaagtggttgcagggtcggaaccaacgatcctccaagattcagacaacacctccttgcacgagtccaccaatgtccaagcttcaaaaaatttaaaagggatgaaattttttgcacaaaacatctgcgtatccaataagatgcaagcatggtccaaagccgtgattgggaaattctgcaccccagcttttggataccaagacacccaatcaaaggatccaattgctctgtctaatctctctcgaggaagatcccccgtgaatctattattctgccaagtgtatttgcagcccctgaaccgaaggtcaacgccttttgttacatccataaactcattcaaatgtctccggtcaaacgaactactttgtcttccccaagacttttcctccatcaagctaatacaattcaagttccccactaccaatcatggtaaactacaattgatgaatctgtcttgaaaggaactccagaaccgctccttctcaacattataaggagttccgtaagtagcaataagtctccattctctgcctgaatttggatcccgaagtaccgaatcaatgatggagttatcaagatacaaattaccaatcatcactgattcgttccatatcagaccaaaaccaccagcaatgcctctagaagcaatacacgcacaatttctataacccaattttcttgcacatatagccattctttcatcataaactttagtttccataagaaaaatgcaatccgggttgcatttttgaacccaagccctcaaggcctgcattgccgattccctaaggaggccctagaaattccaagataagagcctcattgggaatgggagggcatggtaagggccgcctcctcgcccatttgaaaattcggaatgtggtcaatttgaacatctaccagattcaagtcatctgataagttcctggcaatgtgaacctcaccaccttctcccagcttcgacgatttcggccatctattagaagaatgggattttgtgtattgctttctttttttatcttccttgccttgtgacgaagtcaaagggcaaggttaaatcgaaaggatttggatagaatggttgaagggttgggatagccgaatcaaagtcacgagaattatcaggggttctttgcacataaggaactaaagaaagacatgctttcctttttcgtggttggggcaggggtgaactaactcagatacatccacgggatcatggaagatggtggggaatggctcatatttctcaataggtggaggccccattaactcttcagtcaacccaatctcaatagcataaatgggccaagggaaatgagtgggctcagggtgtttgtggggttgtcttgatttgcataaatcactatgtgggctttctatcatttgcttataagtaggcccaacattagccataatagctgtcaaaaccctctcatcacgtggattagggatagggcgggaagtatacttcttattgatctcattatcaatatcagaggccttctttcccaaagagtgaaaacgcaacaaactaggagaaattgacctggtccttctatcctgaataaacttctcttcacaatttgagtttgcatcaggcccagtagcatctttatccttaggttgttttggacaaacctccaccactttcaaatttttttctagaaatactagtacctggttgattagtctgaaccgttatgactttctttttcggtaaataaggagaaaaggttgtttccatgcgtgagttggagttccccagaagactcttccctttatccttcagattaaacacaggttctcccgatacgttaccggaagacagcggagctatgggacgtatggggttaacaccattagccgcacagagacaatccagttggtttctcgtgttgaagcaactgtagacaaccgactcaactttgatccacggcccgaatgctgcaactgcttcacctttggggggtatgctagggccaagggtctcttacaaaccttcttatcatgccccaaatatccacaatgataacaaattttaggcagtttatagtacctaagttgaatctattctttcctcccccttttgatatcgagataaaagcctggagatagttgatagtaagttgcgatctctacctgaaacttcaaaaaacccctgcgttgaatggttctttgatcagccatatcgtaacctttgtactcgcctgccttggctacaatagtaggagtgtggacaattttcagatagggaccagggagtcctatcgcttagacccaaaaaactgcttttcacatatccacattgttccaaataccatcctctggccattcttgaatgatatgcatttttccattaatcagccaaggtctactctcaaggacttcaaaacaatcctcctccaagtcgaagaaaatcccccataggtctggtttcaaggttttgaacttccaattcccattgagtttcttccaaatgtcagggagaatttctttcagtttggttctcgacactcccctgcctccaaaaaaaactagccaagacaccagttctagtaacctctgcattaagttcaaaatccagttccagttcgagagacattgtatccaaaaattttgacgtaaaactttcaactctccctctctcttttccccatctgatgcttagggatctgtattcactgtatcttccagggctgctacatctaccgtaggtggggtatggccagttacatttatacctccaccatccctttggattccctcctggttggcctcat

SEQ ID NO: 186144 - DNA, 2833 bp, Cannabis indica
agtgtattttcaaacgtgagtccttgtcctaattctacaacctttaataaaataaaatacaaaagtaaatattaatcaattgattaatatttctttttcagctaaaaaataatattaatgaatgggaaaccgagtgtctcaactgcaacctcctctggaaagtcaacaaggccaacccacttccattgaatttttattttacttttcaattaatacaatacaatacacactctctctctcatcaacaacaacaacaattatagtaaccatgcccaaccatcgtcatcatcatcgttttcgtcagcacttacagaaactgtttcagctcttcgtatggcgacctggtcagaaccatactaaactccaggtgtggttggtctctgacccagttcctagtttatcatgctcttctctctttttttagatataatatttttttattgctattcaaccataaagttttgttttttccttcccttttgttctattgtaaaataaaatactaaaaggtacatttctttgccttttttcatggccaattagtttgaaagttcatgtgtagtttccatttgtaaagttgtactttttcatttaaaaaattatctcacgtattggtgtttaacaggggaaaggaaataatcgaattttgcagaaaaatttcgtattgtgtttgaagacataatcatagttattgtgagctttaagtcttggagatgtatttatcaaaatctttggtgttctcaaccgctctggttttgtatttatgttggtcttcattatatgttgaagcccagtttaacattactgaccctgttgaaggtaatttgaatttagtatttattttgggtttactaatttttgttaataaaataacttttggagaactttagctataaaagaagaattcccatatataatgattttgtttttcaagtgggataaaactaatctatgattgtggtaaatgaatactatttatcaaaacaattctctagttatggaacagtttgggctcgtagtagtactttgctgaacacctacaaaagctcaattttcatttgttggggttgatttcatggaattataactgccatttgtttttcatttcagtaaatgcattgcgggctattagaagaagtttggatgatcccaacaagaacttgactaattggaatcgaggtgatccgtgctcatccagttggaatggggttttatgcttcaatacaacgtttgatgatggttatctacatgttagagaattgtatgacttttatcctttctgagcataaaattcagctttgaatataattgattggactaaagaatcttgggacacatgtgttttctagtctgtcatcctaataaaattgagtctcagattatgatatttcctttagtgtctatatccatccatttctctgtggcttttgttagaataatcaatgttttatgtgttagataatacagcttcagtcctattcttgaggtttaatcttgttaaaattgctatcttatttgttgcaggcaattattaaatatgaacctttccggaactctgtcaccagagcttggccgtttatctcacatgcgaatattgtaaggcaaagaaaattgaaatctgcaaaacaattatataattattttatcttttttacagaagaaaaaacaagctctctcattttcagtacttggacactgtattttctcagtattccaaagtagcatatgatttcttcttccatttgatttggcttttaattttgtctcagggacttcatgtggaacaaattaactggtagtataccgaaggagataggcaacattacatccttggaactcttgtaagttaattttcctaaactagatgagcagcttatattggcatcatattttaggaacatattgtttaaccattgcttagaatttaatccattacatactttgctttcttcaacatggtcttttagctctaatattctgaatttgtttattcaatatttctctgcacctgatatctaatttcattcatgaaatgacacaatgttagcatgttttttattctactttgatgtctttgtctacaggctcctgaatggaaatcaattaacaggaatcttgcctgaggagcttggttatctaccaaacttggacagaatacagattgaccagaaccatatatcaggacccatacctaaatcatttgcaaacttgaacaaaacaaagcacttgtatgtgttatgatgctacttgaattttttacactaatacattcactgtttgttttatgtcttttaatcttcttgtttcacattcctttctttcgtttgagcagtcacatgaacaacaattctataagtgggcaaatccctccagagctctccagattaccgaatctagttcacttgtaagcttaagaataattagtgtcatacatttgatcttctcctctatctgtgccattttttttattctgttttccttgtttgtgtctgtgttcttcccaatttttcgctgatcaaatctatctttgatctttgcagtcttcttgataataacgagttatctggtgaacttccagccgagttctccgaacttcccgaattacttatactgtatgctttctgagtttctggcaatgtgcagcttttgttgtttttcgtagttttcttttattctcctttggcaaaatacaaagggaacctagtgtcaagttttaacagcttcagcatttttgtctgcagccaacttgataataacaactttgatgggagtacaattccagagtcatttggcaacatgtccaagttattgaagttgtaagtccttgtgattc

SEQ ID NO: 186145 - DNA, 5446 bp, Cannabis indica
aagtgaaatcctgctgagaaaactaggctgattttagtgattttgtaacaacttgtgaagcacttaatcacttgatcctcacaagcttttgggtaaatggactcatttttacaggtctaatatgcatttacattttggtttcaatttagagaacttctgtgtaacttcctgagcccaagaatcttcttttagttatttatttatttgtttttttctttctttttttccgttattgaaagactcagcctaatctatccatctcaacgctgctatagtacatttattcttatatgaagaaatgacaacttcctatttaaaatattgatcaataatgcatattaaatgaggttttttttttggttggaatataatggaaacagagaatgtagagatcacaatcagattgaattcactctgttgttgctaccctacctgttctctctctctctctcttcttcttttttttttggctaagagaagtaggtctgtaatgttaggcagttgctgcaataaacattctaagttggagcaattaatgtttgtgggtctcgtaagtcataaattatttgtgcttcgagttttgttgtttcctaaaaacaatagcaaccaggatagtaaaaaagacacaaatttctttgtcaattattactttatattagcaatgtagttttcactaattatgtgattctttgtgagtttaaatatgttgtgatatgtttgccaaaacttaagggtcttccttttaatttaaaatggtaataaattttgtgcaaaacattttttatgaactaaattattaaaaaaaacatgattactatataaaatattttgagagaagaaatataggttttaatcatcaaattttatcacaatttaatgtgaaaaataacttctattaataacaagagatagttgatataacaaattgatgacattgagatttttaattttagatactaatttaaaagatattatttttattttatagtagtaactagtagtaagtaccatatgtagtgtaggctcggtatcacaccatttaagctccaaatcgacatgtcattatgataatttaagtattgctttttcgtaccaactgatcacttcagctaaattaataggctgagtagattattgaggcacagtcgatttctattaaatttgcttgaattaataatacccaaaccaagcactttaaaacatcagtgcacaactattatgacaatagctagagaacaatactatttagctcaaaagagccattccattaaaataaaatttgtacttaattatgcatctttcagttacacaatataaaagcattactaataaattaatgatattgttccttatcttatcgatggaaaaaaaataaaaataataacaatacaacaacaacaaaattaataaaactgttgtttgaagaaattcatatggtctgaacaaacaataacaaaacaaaagaaaaagaatttaaaaataaagattgatagctgtttagtagttcttctatatataaaatcacttgtctatttatctcagttccacttctctttaattaccttcggaagaacgagtgtccgacacgtgtacagttcgtaccgtaaataatttctttcttctgggtggctaaagctgactgcaccatataaaccccgaaaccaaacaaaacgcgtgggtcccaccacttctttaaatgtacactcagatttcaaacccacctccggaccctacctattcggacatccaaacatgcccttaattaagcaaccccaactaccatctcactcttatttccacctgtctcgctgactccgttacatttgccgttacacttaacggctacactaaacgacaccgaattcatcgtcgttttcatagctgcctcactttcacccttcaaactcgtcaggattccctccaattccctgggctgtaaatttaccttaagaccatacttcatgaacagagtcaatgacatcttctgctccacttgatggccgggaacgacgctcagccgatgccggagaagaacagccgccgcgattgacttcatctgaagataagccagatccttcccaaggcaaatcctcggccctgcattgaacgccacgtacttatacgtgtccatcatcgcgaacctcgtcccgtccggcgaaagccaacgctctggccggaattccaggcagtcctcgccccaggtcgacttcattctccccgtcgagtagatcgagtatgtcaccgaagatccagccgggacaaaggtcccgtccggcaaaatgtcgtccttaacgacatgcttcgagtcttcaggaaccgacgggtacaatcggagagtctcggagagagcagccttgaggtaaacaaggcgatcggcctcctcgaagaccagcggctcatcggtccacgtggcgatgtcgctgccacgtgtctcgatcaagacactgcagatctcgcgaaggatcttctcctcgacggaagggttttggatgacaagccagaagaaccagctgagagcaaccgatgacgtgtcccgtccagctaggatgaaattaagtgccacctcttgaaggaacttgtctgtgtacgactctttctttttcatgaacctcgataataaatcgtcgtgagggttcccatccttgtgctgttgtagctccagcttacgtgaatctatcacactcgataaatactcctctatgtgttccaaggagcggctcaagctgacttccattcctagccgaagccatttcttcagcttccaaagcacctccggcataataaaccgctggagtgacgcttcggtggctcgatcgaaagccgtggcgaagccgttttctggaagtcctttagcgcaagtctgaggatctttaccgaaagccaacccacaaatattgtcgaaggtgagccgaagtaatagatcttggagatcgactggctgggctttttcctcggcttcttttagaattgggctgaatctgagcttaattgcacggcttacccacctagccatggcttggcgaagtgtcctggttgtgaattccagtgcggcagttttcctctgaaacagccacgtgtctccatcggagttgaaaataccttgaccgagtagatcatggaaaacggcttgccacgtgggacctttcgggtaattatcgaatcgggtctttagtatgtgctctagattcttcgggtcgcacgtgacagtcacgagaccttgcttcttggcaaggaatgggatggcacagatgcatgtttgatacgtgccaccacatgcgcgtaggttatcacagatccagtcatgcatgcgatcacagttctcgatcaaaccgggtagactacccaataagggccagacacgtgggcctttcagtgaacgtgaaatgaaagtgagccaaagcaaataagctgtaatcgccgttaaaagcatcaaagcggtagaaatctccatctcactacgaatataagctttcaaaatgtatagtttttcccgggaaagactctttttcccgagaaaatgcttctgtgctagcgttatcgaacttcagctgagatagctgaaaaatgaagaagttatacaaacgtaaaagggtatgtgtgtaaaagaattagtatatatagcttgttttgatacaatgaaaacaaaataaaaatggtttattacttgatcaccgtacaatggggggtatcatatataattaaatgtgtataaatgttttgtatatatgtagtgatgataaactaagaaggagaaagaagagagaatggagagtacaaaatgtgaagaagtaggtaaaaatatatataaggaagaaggggaagaggttgaaagtgtaagagagtagtgtgtagttggggctaggtaatataatatagtagagaaaagagagtattatagagataggttatatagatgaaagagtaatgaatggcaataatcgtagccagactggtttttgacaatccaggactagtctttctctcacactctgacaatgcactaaaaacttttcagagctctctcattaatgcccacaaatcggtcgttgagagagagagaaatataaaataaaagtatgttgtctggtttaccctttttgcttttgtttttgggtgaaatgtttattgtatgagggtttacaatttaataaaagggagtgattatagctctcaacccattttctttcataatttcatacatagaaagaaaatgaaagtcactgtagtaaaactaaaaagccctaaaggcaaaaggaaaaagctgatcgatcacttctctttttctctacattgacgcgcctgcacgcgcttgcacggcagctaataatagaaattttggtgaaagtagtataaggtggaatgccttattaattcaagcattcaatactactctaaaaggatttaatgagattagttgagaaactaagatatagtgaagacaccaccccaaaaataaaaattattgtataaaaagaaaaagaaaatagaggccgggtcacacaacacagtctgttcgatctataagcatggggtttgggtcgtttgtcttaaatgaaaatagggttggtcatgtgggattatggttagggtttggtgagcaacccaccaacactttaaattttccaagcccctcgatttcacttttgcgtgacttactttttatttatttattttttctttagtgtagttctgatcatctagagatatatacatataactaaatatgtataagtcgttgcgagtaattattctacagaagactactgtagctgtacataaaataattatatgagtaaaataaaatagaaatggagccatttctgggaattttcacaggtttgacccttgtactattaatgaatgctgtgtgttgttgtaatactgtttttgtatatacattacaaaactgtgtgccttctctaattttataataagaatgggaaaaagtcaacccccgcggccgagaaaccctcacctgaagacagatatcactttgatcataatcatcaattaatatctctttctttactctttttctgcatattggatcagctatccattgcatgtacaaatatgtgtgttatggatcatgaatatatgtgtactatacacaactatatatcgtatggtgcaactatttaaataaattaatataggagaatcaattatatatataaaataaaagtatccctagttagcaataactttttccttttaagtctatataattaagttaccatatatattattactttatgatcaagtatgtatatagataatttataattattgtatgtatctgcattccattactagtcaaatatgaaaagtgatgatatataaatattgaagtgtggtttgctatgcaatattattgtgtacaataatcgtgtaattaagagcatgcatgtgctcatcctcgatcgtttgataagctgctaactac

SEQ ID NO: 186146 - DNA, 2868 bp, Cannabis indica
aaggggagagttccacatgttgcatatttgaatgctttcaattaaggaaaactaatggtaaagttaaaatagttgtgttatactcagatgatgacaaacatctgtagtcaaatataataaaacttatatcttttagcaattttatatctttcacatttatcgttcttgaaattgattagtatgatttacctgtatcagggcagccgcttacactcaaatccacaaatatactgaggcagtcagcgattgccttaaatctattgatatcgacccaaattatagcaaggcatacagtcgtctggggttagcttattttgcacaaggaaattatagtgatgctatcgataaaggatttaagagaggttggtataggatcatttcataattacctatggaatagctgataccccaagatatacattttttttctagtttaattgatgattcttagtttacttatttatttttatcattattgtacacatttctctgggaaaatatcaaaatattggtggttagcaggctattgtcaaaggcctaagcacctagttttgttacaatatgctatagtagctggcataaaacctttgacagtgcttacacgttggcgtagttatgctaaagggcttaatctcatgtgtagtaggaatactaagggactcgccattatagtaagtgacattttttaactttaggaacatcgtaacttagtgccttgtttttggtaatattccaaactgttagccctcttctttttgtctcgtacatattttggtccccattgttttgcctctattttgttcttacaaagtctgatgaccatattttatgcttcttttggttataatttttacctatgctccttaaataaaatatttaaaaaggcaaaatcatttaaacttaacccaaaagaaaagaataaaaggacaacagacttgtagggaaatgtactgcacaactttgtccctaatagtgacattttttttgttttcagccttgcaattggatccaataacgaagctgtcaaggaaaatattcggttggttcttgacttggtgcttttatttactagttattacttcatttcatctttcaagtatttatatatatatatatttttatataattggagaattctttggtttgatttgagtatcagttttgcttttattgtaggggtatttttatttttggcatatcaagaaattataaattatttttttttaatttgatggtgtacattagagctatactggctttctgcttgtttttaaaaaattttaaatagtttacagtaccgaaaataattcaattgcacgcgtgctatttttattttacacgggtgcaacaagttattttgaactttattttgacgttgtaaaattctcaaaatttcttgaaaacggtcggtcgggaggcctataactacaatatacaatgtaatataaaaaaagagaaataatttcttaaaatacgaaaaatgtttacagtaggagaaaaagtgatgtccccactcaagatgcttatatatttatatatatgtatatacctaaggctacttcatctgactactttttcctgccataaccgtagatggctgagcaaagaatcagagggacacaacaagctgcacatgatcgggtaagcagtcacctatccattatgcttcctagacacgaacattttgtagttttgagtttccaactcgggtcatttatcacttttcaaacacgcccatattatttgagtttctatatgttgaatttatcatttttcattcttttgtttattataatttacttttttgcttgaatttttaattatattccccaatatacaccatacagagtgcaagttcatccagccaaagtgattcggatcaccataaccagtctgcaggagggccaagaagccatggtgctccacctccattcgcatctatgcccttcaatacaactggtcttcctgctgattttaccaatatgtttatgaatttggctacaaatgcatacccccaaggacaacatactcagaacaggcaaggaaacgatgataacgtcaatggatttgatgatcctggaatacaaattggtgggaacatcaacttgaatttcggcgagcaaatgccggaggatctaactggggctctaagatcagtgatgcagatgttctcgggtgcagcacctcatggaaatgcacatgatagtgccagtggagggtcaccgccacaaaactaaattttggtgtgtttttagctgcccaatgttctcactaatttttatggtattctcatttatatgtttttggaaaggaagaattaacatttttttttgcctttattctgtttatccgatgtacaatagttataagaaaaatttgcggcaaaagtctcaataaattcactttgatgtacattagtatctaatctcgagaaatagcggcaatagtaagtttcttgtaagttagtcttttttatagctgatcaaaataccacatgttaaaaaactattggtccaaattatagttttaatttaaaaccatttaaaattaaaataaattaataaataaataaattattttaaaaattaatattttgtattttttttcttcttccccagtccttctcattgcccagaagaaatcaaacctcagattggaaaagaaaacagtcatgtctctcctgatttcaaccctacccttccactcctattccattttcatcatcattattctctctatccatcttctcctttgttctttcatcaatctcactttacccaaaaattcaagtattatcataagaagttttccactgccaagcaaaatccatctcctcattcaaaacaaacccaaaaaacttccataaaa

SEQ ID NO: 186147 - DNA, 1789 bp, Cannabis indica
tcatatgttatctaaaacatatttaatctatacattatattatttataaataatattacatatacctaacacaacacaatattatataatataattttacactgtgtataaaacaaatccatatagactcagtagacagtagttaaagttttttgttttccttcagtcaaaaagaaagtcatttcattcatcaaatggtgcaataaatgcattttcttcttttgcttggtacgtttcaatctcttgccaattgcagctttttctttctttctttctttatttaattttccttttttatttttattgaaaggggcagctcttttttttttttaattattattttttgtttttaaaaaaaagacttgtagtatttaattgttttttcttctttttgtacagtcacaccatcattgtaattttttaaaggcccaacatatgaagtttgccatagaaaattcatgagaagagtttatacatgtactattttcaaattaataagtgagatgagataaaaacattactattaaggagataagaacattacaattcgacattattggtctcaaatattattttatggtgacattatattttgcatttaattatcaatttttcatgataagtattaaatataatgtgagatttaattcttaattacactagtaatgtctttgaattatgattttgtaaagtttttctttaaattttttcctattgcaaaaattctttccaactatgcaaattgttaaaaatattccatctagttacattctacttattttttacaataattagcttatgtgactatgagttataggtataattataacagaaaagcttatttaataactttaagctacttaaaatacaatttattggttttaaacatacaaacaatacctctaagaatgcagttgcaaggggacatttgtaacgatttttataaggataaatattattttggaccttgtattttgcaaatgttgccgattggaccctctgttttattaaatgatataacagaccttttattttctaaaatggtacaagtaggatcctaaattgattttttattaaaataaaatttaataataacctaatttagaggtgttgtgataaaattgtatacattttctacatctcttcatgttaggaattgtcttcaagttggttatattaaaaaaattatcgaaaattgagctcagagtcttatttgtaccattttagaaaatacagtgtcatgtaacaaaacggaagacgagtcgataacttttgcaaaagacaagtttcaaaattatatttactctttttataattcaatgggaattttgcaacaaaaaaaaaaaaaaaaatcaagaggcaaaactctacaagaatcatagtttgagaagggttaaatcctatttattctaaaacgaaaatagcatatgtttagtgtttaaaagattatgaagaatgggaagtgaaataatgtcttatatattatctatataagttttatgaacattatgctttcattctagctctttacattgcaacattttggctattatggcaacgatttccatatatacatatactaataagttgttcctattaatagttagttaactaatgagtttagagattgtttgtggttattctaaggatatatttatatatgccttatggggttatataattgtttgccacaaaatagtttgctactttggttataacattcagcaaagtattaaatacaaaagcaagacaaaaataaaataagtacataaagcaaagacaatgtctc

SEQ ID NO: 186148 - DNA, 8647 bp, Cannabis indica
agagagagttggagtcaccattgttgagttatagcatttgagaaaaggaggaaggccatggcagacttggaaaacttgctactggaggcagcgggaagaacaacaggagccatgagaaacaggcatgcaattccaccatctagaaggatacctgtggatgatgatggaagtgattccatggatgaagaagattcagatattgatgcatctgaatcttctttgcagaaaaggaaggaacctactcaaggcagtgagaaaggcaatggcgaaatcagttcagatgaaggtgaagagtctgatgctgggagtgatctttacaggaatgaggaggacaagaaaaggcttgcagagatgactgagcttgaaagagagatgattttatctgaaagagcaattaagaaagatgacaaaagtttaaagaagaaattgagattgaagttgcacattccaaggtcaatggtatccaagaaagataccttacctcctacattgtcatacaattcacgttcatctgcaagaactgttgataggacggctgcagtggatggtgctttgaatcagttgagagttaaacgtctgaaacagcaggattcaaagggtgttggaagctcaattacaattaagaagaaagctcctatttcagagggtttgagtagctcctcctctagtgatggggagaatctcagtggttctgatagtgaagatgacaaaagggttgacagtgatgatgagaggggatttcctggttcagagccaccatcatatgatgatataaagggcattaccattcaaaggtctaagctagcaaagtggcttatggaacctttctttgaggatttgattgttggttgctttgtgagagttgggattgggaagtctacaactggacctgtctacaggctttgcatggtgcagagtgttgattcatcacacaagaactcagagtacaagctagagggaaaaattacacataaatacttggtttgtttttggggcaatgaaagttctgctaccaaatggcagatggcaatgatttcggattctcctccaagtgaagaggagtttgagcactgggctagagaagtaaaacgcagtggagggcggatgcttctaaaacgagatgtgttagaaaagatggacgccatacaaaatgctcactcttttgtgtactcagcaactactgtgaagcaaatgttgcaggagaagaaacatgcctcatcaaggccattaaatgttgctgttgaaaaggatcgacttaggaatcggttggaagttgctgaaagtaaatctgattgggtggaagctgagaagatcaagaacaggctccaagaactagaagcatcaaggcaagctggagttaaagatgtcaaagctattagactatctgagatgaacaagaaaaacagggctgaaaatttcaaaaatgcctcagagttgaggccagcaggtactagtttgaaagctggggatgctggatatgatcccttttcaaggagatggaccagatcaagaaattactatgttgccaaggctgatgttgtggaggaagtaactaacaaagagaaccaagtaacaaaagaaattggcattgaagctacaacagcagcattagaagctgcggctgatgctggaaaattggttgatactattgctccaattgatcaagggacaaactcaaacatgttgcacaactttgatctgtcaatatccttgacgatgcttcagaagttcggcggacctaagggcgctcagcttggatacttagcaagaaaacagaagatagaagcaacagttggatgcagaatcccagagaatgatgggaaggggcatcctctaactttgacagtcagtgactacaagataagacgagggctcctctaaacatgatggggcttcggccaagtaaggtaatggttttggttttaggcttttagcatgaagaagttgaggccatctcaactcagtaatagttttgttttcatttttttttagaacagttctgtattctccaagatcagctagcaccacattttcataacaatgatgcttaagcatttacatgaaataatagtcagggctatattatggattaacaatcaatcaacattgaacagaaaataaagcaaataactattaataaatatgtgttactattaataaacaatctatgtacaaatcttacaccaccaagtccaggtgcacaattcagtacattcaaagtgaaactgagtattactaccaactttactgcaattggatcaactagaattttgatcgaatcgccaaaggatttattctagtacaaaatgtgtatcagaagtataattatttgaaaatgttaaaaattgttctttagcaaatcttttttataccctacactcgaatgtgtggcggctgtacagtaaagacattctacccttaaaaagtagaagaatgtcatacatggcaccattgttgctactacccatggttgtgtgagaagtctccaccagccaaatctgcagagatggtgcccaaaaaagaaaaaaagcattgccctttaaagaattagtgtcattaaacaagaatctgagacctagcagcaaccctggagcacttcttccttccagtcttgccaagtccacaaacacaaatctcgagaagctcataatcttcttcccagaataataaggatgccatctctggattatcaaggagcattttagatgtaaggtacccagcaatggtccatgtttggtaaagtcgggattgctttccgataaatttccctgttctggtgtcataatattcaggccaatggtcaactaaaagcctcttctcagccaaagcaactgcttttcgagctagatctaattttcgcatcttgatacaagccagtgtgaactgcaaacataaaaaaactatggtgagattatggctttactaaacacaaaataacaacctttctgttcctgcaaggtctctatctctaaagcaaaaacaaactatggatgcaagaccttttgttctcgcaaattaaaaaaccaacaaaggcaaatggttacataagctgttcatgatcaatatccagctagaggaagttaaaaaccaatggattgagtaatacaaatcaattgtgtatcaggaaaaattcataaaggtcccaatttctaaatccatctacaaacagaactggtctaacagaaacaaaatccagtcttacctgccacagaagtgttggccaagacccgccattgtgatatgaccaagggctgtatgagacgagcatatgttagtgtaatgaacaaaaatcaaagcactgaaatcctttagccgtaacaaatatggatatgatgccgtaagcttacgtgttcttagggtcactgccagttattatacgccagtcctccgactcgagggcaggataacaaatcttaaggggcatatgacacacaagatcatcccatttggcttcaattagatttagtatagcttcattctgcctaggagtacccaaagatgaaacaatggaccagagattgccaagggtgaaaaacctaaaatccatatgagctggttgtaaattgccaatgagatatccaccttcctctggaatccaatccattagccatgaaggaatttgttcagggtagatattgaacttattggtagcatccaagagtactcttctgttttgtaccgatatatctcattgatctttctcatatcgacccaataatattctctaatgtggaatgacagagcacttagcctgttgttgatggccctcaccaaattcttggatccatcattcacagaaagcatctcacgggagcagcgtagagctgagtaaaataaggcctgaaagaagtcatcatagaaaaaagtaagccgaaattcagataaacatcatttaaaggagtaaaaaatcgagaaagatatgttactgtccattacaaaggcatgattagtaataggaacaggcaatgcaaaggcacaggtaaacattgtaaaggcaataaaagtattaattcaaaatccattgccaattaccaaccctaagctccttataggatcttcatagagcaataaaaaaggaataattaaattaactgtaaaatcattggaaagaatagagcattttgtaatgtctcaaacagctaaaaatgtattagttagcagctcaaagtgaaagaagttacaacaatgagagtaaaatcagaatattaaaaagtgtggaaaattaacatttgaagagaacaagaacaagaactaaacccacttcagtccccagtaatgtctaacacaaactatctgaccatttgaaaaacaattcatacagaaggaactcacttggatttcaagtgggtgaccatgaatacccatgcgccggtcaatcatgcaggacccatcagtgaccaacagtgaaggaaacatgtcaaaaccatcagttaaacacaagttcaaaatcatttttaaccctgtttgaacatctaccctttcttgtaaagcatagtcaccagtgatttttccataagccctcaatagaataatccaccataaccctataaggacgtatcaaaacagaaataacaagtcaaaacacatccaaaattacatggtcaagtatatgttaaacaaaatacattttcaaaaagggcaatcttaatcagtacaaaatgactatcccattacagattgctgagaaaacatggtttgcaaatcagacaatgacaaaaaatagtttattagtatagcacacatatactaaaactcgcatacaccaacctgaatctacaggagcaacacgaccaattgcagattcaccaaaatctggatcaagaacttcttcaaaattattgccatcaagaggaacagttctaactttgaaacttgcaggcatcaacccctgccctgggctatagcagtcaactgttttttcccaactctacagaaaaaaaaaaaaaaacacttagaacatcagaaaaggaggaaaaaaaaccatgattgatataagaaagataacaatatcttaggcattaaagaattacctgcaattgcaaggtatggaggaggaagttcctaacaatctctccttctcctttgagcaagaaagcaagtgcagaaggaacaaaatccctaataaagacttggtcataattcaatggcagcttgtcattcggatcatttgcagccacagttcccacagggctcccacaatatgtaacaaccgcatccttcaacaacttccatgcttccttctcaatttgagattcctccctcttaggactttcaaccttgagctccccttcattctctacattcaatttttcaccaacaacttctgtcccagaatcttcttctcctcctccaacaacattctcatctttatcaattctttcaacacctaaaggtttcacatttacaccaccctgaacataaatcctctcaaaattggattcattaacacgggtttcgaccgatgttgagaaatccctaaacctagaagatgaagcattagcaataacagaaacaaccctatttctcatcccaacatcattagaccttgatataataaccccagattggccaaaactccaattgggtacccgaaactttttgcgggcatcatcaacaatacgtcgaaaaccagaaaaactatgataaggactggtgtgaaattgggctttccgctcaaaattgaggcataacttggctgaatttccattaacgcattttgctggcgggaacccgaaaatggcggagtttcgacaattaaaaaggattctacaagtgggtttcattgttgaatgtccaagaaaactgagagtactcataaaaagaataagaacaaggattactcaataaaatcgaatgggaaaacgaggtaatgggtgctacaaccatacataaaagctatacaaaattattatggaggattgtaatgagaatttgaatctgtagaagaattgaaaagagcaagaccgttaatcaatctgagattatagtttataaatagaaagaattgtgcgttgagattttggaaaagcaatgaaacaatggcttcaaataaaacgttaggcgctcgctgcctttttcaattgacgcgcagaagaagaaagggtcagtttggtaatttatttttggaaattgaccctcaagtccatctagaaaaaaaaaacatgagataattagaatttaaaagcttattacaacctctttcttaatatttttttaacaataaaaaattttattggaaaaaaaaaattagggttgaagtacaacattaacaagagatggaaaattcttcatttatattagctcaccatttattctaagtgtgtgcaggtaatatacgtatagctatattgaccaaataatttacatgaataaaagacgtcttaagaaaattagaccataaattaaaaaatacatcaaatagagagcctaaatcattacagaaagaaaatctcttaaaaaaagtagaaattaaatctaaacaatcaagctcaaaaagagagaaagtttacttctagcaaccaatccaatgcaactattattagaattacaactttcgcctgaataactttgagatttccttaagtctatcttaatccaaccaaaaaagtaagaaccggtactagaaaagttgatacctcaaccaaaaatactaaataaataaatttagtcacttttattagtgtagaggttttaaattatttaaaaaattgctaacacgaaaaatttataaaaacagtcacaagtatgactcgcatgaattttatattgtatttgcaaaaaattttatcgtgtttgtattgtattgacttgttgtaagataaattattatttttagtattattttattgcattggcatgcattttataagccaaattatttttagtgtcattatattcgtatttaagttgttgccacacaaataaagtttgtgcaaaatcatttcctatatagactccacaccaccattaggaattagttaatattatcctaggatttttttttttttatatttttcgtgggacagaattcatatgatactttattatgaaatctagtattggactacaatatattttgggaaaagaaacttattagagtgcaatgttagattgaaaagagacagttaattgtgtatgtggtggtgtggtgggtgctatggattgaggcaataaatatctagctatgtttaacatacatacatatacatgatttattaaaatagtacttttgactcttttgttgtttattacaaatagaaatgctaaattgtattagggatgtttagctcattcttcagtatttatattattattggtataattaagtgaatcttatacaatttaagacaataattttttaaaaatattgttaacaaattatagtaacactagacaagtactaaataccaatattctttatacatataatattattttggaccatgtactttgcaaaaattattaattggactttttattttgtaaaatgacaaaatagatcttgtattttccaaaatagtaaaattaaaattctgagcttaattttcgataatttttttaaaaaataattaacttgaagacaattcttaacatttaaaaaatacaaattaatttattacttaataaaataaaaaattcaattaataacttttactaaaataaaaaatttaaaataatatttattctgaaacaatggttttattgtatgtatattatccttccacgacaaaaagaaattggtttctactagctcagccgcacaagtaattatagttttttttgttttttttttttttttgggttagaagaaaaatgtgtgctaaatttgaggtataattgtggatagaatgcttttgatatttgaagtgtaacaatttgcacgtgcggcagaatgaacggaaagcaagatagaggtggtgacgtgtcagggctttcttatccatacttttcatgtcccaatgcaactttcttttcttttctttttctttttgtttttcttttttttttttttgtttgacaatgaattttcattcaatataattaaagtttagtacattatagagaaatggaggaaaatcatccatccaaactaattcgtcattcactctgagtgcacgaactgctaacatgtgcaaccatattggtcgagcgacgaacatgaattagagatgcctcaggaaaattggatagtaaactagcaatatcaactaaaatagagccaaattcattacagaaggaagatcttctaacaaaagctaaaatcaaagctaagcagttagattcaaacgaactaataggtaacccaatagtaagagtccaatccaaagccaccattaaagctacagcttctgcttccatggctgcaaaagtccctacaaaaccataaaaaaacatctaataagggcattatagtacaagaattattcctttaaaataaattaataataataaaataacctataaataccaaaactattataatattattggccataaattatatagggtgatagaataaggttgaaataatcctattgatactatcatttactcagcccctaaggctgaggaaatgatctctgttcaaaataaccttttaaactcatacctcaacaactactaaaatattggatgattgaacatactg

SEQ ID NO: 186149 - DNA, 2182 bp, Cannabis indica
caaaaaacttcatttgtgtgctccctttacataacatacaagagtctagaccaacgagcataaactgaacagaaacaaagagcataccgtaaactgtacactcaagttaaaacaaaactcccattcaatttttttctctttccagaataccaacttgtcaagcctcttcagtaagagagaatgttccaaggaaaaaagtgttcataggtaccaacaagatcagacagctaaaccatacacaaatgcacaagaaaaattagccctatgtatcataaagattctatgatatttgtctctgcttactacaagtattggcacctgtttagtaaaagaagcattctttttgaggtcattttgtgacaaacggaatggcatcagtagcttcatgcaacttccaaccaagtgattgacaaaagttttgtatagctattatcttgacaaaggttattgaaatttcccaagtgattgtgtcaatcgaagacagtgactctttgttttttgttttttctgaaactagagtccccgcctaaccctacaatattttggggacgaggaaatcgaagacagtgaatttcattatctgtggatttctattcttccatttcttcatctttaacatccctgcaacgacattagcaaaaaggtaagctttacgtaagagatgaggaacagttgagatgcaacttggtaatattcaactccatagacaagtaaagactaaaataacaagaagaatgcataatacaagctaaccatgccaacgagaaaaggcgagaaacaacttacaaggcatggactataacattaaatctaattccaagatggagaaaggaaggtttcaacattaaacataactaggtatgaagaagggaagtaggtggttcgaagaagagattgtttatacgctacttaatggccaaaggatgacatatcccaccacagtgaaattgtgaaatctcatattgtcaacagaacgatatacaaaatctagcccgtgtcatcaaatacatgcatagaattatcttatcttaaaaggttgtctggaaagcctctcactgtcaattttcaaaagcctcaccaaagggagaaacatgcaaaccttccaagtgataatttataggaaaaagaataacattttcttcggatgtacaaagttaatgaaacattgaaacctcacctcatctcatttttaaccacaggagtaacattactgaagcttctattccgaggaggcttctcctcatcatcttcatcaggatcagaatcatatttttcaccattccaaattcggtgttttggtctatgatcaatatcttcttccacctacaccaacaaatctcaaatttaaggtcactataaacatataaaagaggtaccatcttagggaatgatggactgatattactaaatactcacttcctctggaacttctgtggtaggtggtgttgtctgaaaaggtacactaggggcatgtggtaatctagaaagctgttccagcaaagtattcctgaaaagaaaattatattataatagcagtaactaacaggaaaaagatattgaactggtttctacctaaatatgtgtaaacattattggaaaggagacaaactggtgagtctactccaacaccaaaaaggaatcatgaatgtaaaagtaatggtattggaaaatctaatctttgaacattataaaagagggaaataaaacttattggtgatgttgggaatagaggaagtatgctacacaatcaatgagatggaaaccatctgacaacaactaagttcaaagtactataataaataaataaaaaaaaaaaaagaaagaagaattcacagctttaatccaagatcacaagatccaaataccctctttgcttaaagacattgtttggctttattaaagtatacactttatatccagagaaatggttaagtcaccgcacaaacaaaaaaaaatgatatgtcattaggaaacctgcaaaacttaacgttcttgcttcacagtcacaatgatgcacccttagacatttgttattccaaacttttgtttacccctaaagctcttttataaaataatattaagttactaaacaagtgaaggttataacttttattaccttatcttctccatatctttgagagtgtttagattctccatgttgcacggttcaacatgaagcgtg

SEQ ID NO: 186150 - DNA, 1816 bp, Cannabis indica
tttttttttttcaaaataaatataaaatagagttggacttcatttttgttccataggatataaaactctcatctgaagtgaagcaagaagaaaaggaaagggtttctttgggaacaagcagagttaggttcttcacttcttctctgaaatttgaacaaatttcagcttgatctttcattctcaaacaatggcggccgccatgttagaagatacgagttttgaagatgatcaattggcttctatgtccactgacgatattgttagggcctctagacttctcgataacgaaatccgaatccataaggtatacccttttacttcttatcgcgctagatgtagctaagtttttctttctgactgtttaataattcatatctatatcttcggtttcagtctgcgcttttagggttttctatggcgaccattctttttttctgtcactttttagatctctacccgatttcttttgtaaatacgggatatttgtactgtgattatttgtttatccttgcttatgatttttattattattgtttaaaggaagaattgcaaagaaccaatctagaattggattcgtacaaggagaagataaaagaaaatcaggagaagattaagctcaacaagcagttaccttacttggtgggcaacatcgttgaggtaatattatgattcccttgaacatggtttcaatgcttttcttatgttagtgataagttagtttcccaagttgcttacaagtttggtttgagctgtgttgtgtttgtatgtttgatatatgaatttaaaggaagaacaaagtgttaccaagtaaaggggtctgtgaggtattgatgttattatgaatgagggtctctgctagtgctactggcgggcgcggttatgtactaattatatttaccagtaaacacaccatataaaaacaaataacccacctgctatgtcaaattatggtaggtatgtttcttgtttacgcaccatgaaatgaagagtagaaaaactaactcttatttcttttgagaaaggtttcgtcttaaaatttactggaggtagtcatatcccaaacttatgtgcttgaagttccgaggtttttttcctttacatttatgttttggaagtcagaactcataggattatcatattaactactaaccattcactggatttagattaaggaaattatgattattttgatagatgtataaattttgagttaaccgggtcatctatgccatttgatgtttattatggacaacatcacctgttagtattcaaccatatttactaattccttttgttttcagattttagaaatgaatcctgaagatgaagccgaggaagatggtgcaaacatcgaccttgattcacagaggaaggggaagtgtgttgttttgaaaacatctacccgccaggtaacttagtatgcaagtcctttgttcttgtgttaaactgatagagttatagaatagagcctacttaatcagtcagttgagctgtgccaaatttatttgcaaaagagtttctaatattattgatcatgctacatattttggttattattaggaaagagtagctatgtttctatgatgatgtgtattgtgcacgtgttgctgatacaaatgaggagacatttatctttcaaatggaagagctagaagagtcttgctgtgcaaaagagcttctaatattattttgatcatgctacatttggatattttggttattattagaatagagtagctatgtttctacgatgatgtatattgtgcacgtgtttctgatacaaatgaggaaacatctttcaaatggaagagctaga

SEQ ID NO: 186151 - DNA, 3847 bp, Cannabis indica
tcaaatggaagagctagaagagttgttgtaaattattattctatgtttgctcatatctgattgctaatttctgtgttaactattgattgcagacaatttttctacctgttgtcggacttgttgaccctgacaaattaaagcctggtgatcttgttggagtgaacaaagatagttacttgatcttggacacgttgccatctgaatatgattctcgagtaaaggctatggaggttgacgaaaaacctactgaagattacaatgacattggaggactagaaaagcaggtaagtaaaaggctgatgcatgtcctttgtggcacttcaaattttatgttctcaagcaccacgtgcttacttttgtactcaatttggttattatttcacagatccaagagctagtagaggccattgttctgcctatgacacacaaggaacggtttcagaaattgggggtccgaccccctaagggagtgctattatatggacctcctggtactgggaaaactttgatggctcgtgcttgtgctgcacagacaaatgctacatttttgaaacttgcaggtccacagttggtccaggtattgtataggatagattactatctttttcttttgtgaatacatactcatattctgttcttttgtaagttttatgttaattttttatattgtaaccttgaagatgttcattggagatggagcaaaacttgttcgtgatgcttttcagcttgcaaaagaaaaatctccatgcattatttttatagatgaaatcgatgcaattgggacaaagcgatttgataggtaattaatgctctacaattttttttgtcagtgcattttgatagaatatatgttctaatatataagcatgaataagtctcaagctggtggatgacatttttgtttttgtttagttttgtccttttcaaatatctatatataaaaccagcttaggcggcaataagaatcctctctcctaattacctattttccttatttctccacccctaccaaatatattattacttttttgttaaacacttacaaaagtgattattgttagctttttttttggcgtgcacataatgcaaatacaaatgatctttattttattttttttttcttccacaaattagtagtaaaaataacctttttagagaaaaaaaatctaattcctctgcaccaatattataatgtttatttttaattactatataaatatttattattgtaaaaagtataatattaatctataatctatataacaatatctatactaatatatagaagtgtggaatgtgaatgacttttgtactattctaactcttgattttttgttattagatgttattaagttttttcattagtttttaaatatgtaccaggtgtcttttacttttcgtcaattattttttattaattaaatgttattattataataccatttttttttttatgattatagacaattctatataatttttatttatattaatactcactatttgcaattcttaataaatgacaaataataaataaattgtgcaccttcatttattgagcaaaatgctctttcatttataattcttaatagataataagtaaaataacaaaatatatattttctgcttggaattgccaaatgcaatacataataagttctttaatctattttactacagtgaagtaagcggagaccgagaagtacaacgtactatgttagaattgttgaatcagctagatggtttcagcagtgatgaccgtatcaaggtaacatattggatggttatttttttgtgcatttagaaatatagatgcagtctgccaatagaagatattatgctaatttctaactatccaataccattttctttttatcatttcaatataggtcatagcagcaacaaatcgtgctgacattctagatcctgctcttatgcgttctggccgtttggatcgtaaaattgagtttccacatcctactgaagaggcaagggccagaatcctccaggtatatagcctttttttttattaacttctcagttcatttgtttttggttttgtaacagtattactggatctttctactacaaatctgcagatccattctaggaagatgaatgttcacccagatgtcaattttgaagaactagctcgatccaccgatgacttcaatggtgcacaactaaaagctgtttgtgtggaggcaggcatgttagctcttcgccgtgatgcaaccgaggtaccaattctttctactcgataactctggatttcacttttagttgttaggataaatttattcaaggcctcctgttaataggattgtttgagttgtggcataaaaataactgtaattccatggcaggtgaatcacgaggactttaatgaaggtatcattcaagttcaggcaaagaagaaggcgagcttgaattattatgcataaggtgggatctatggagatgtttagcaagctgactaagaactgttcgaggactaaaggcaaaagcttgtttctcatataccattggagtgcaaaaatgttaaatgtctgcagcgtattgggacttgggcatttatacttttagttcttctattactcccagctgtttattggagctctctcactgtctcacttcaattttcttatattgccatttttatatgaaattgttgcgcaatggttctctcatccctagaatagctcatatgccacaaaccattacattatacggtagcttctgttttaaggaaaaaattctctggattcctcttgattacaatagagatttctaaacgatgcaaagtaaggttttgcgttatgaaatgattactacccttgagtaagaaatattagtgaaatagagaatgaaggtgaatactgtgcacaactggatttggaggaatagaggattgatatttgaaagcagttagttgcttctatgcctccaatttttaatgtcatttggaaaaggcttttccaagttaatccacagaattatctgtgaagcatacattgatttgatccttgaaatctagttcttataggcacatcaacaaagaaaacgaaagtctattcaaatgtaaataataaagtagtaaacttgctagttataactgtgaagtagcagaagtttgaataaatgaaactaactgggaataataaaaattgttgtgattgtgacccgtcttgcttggaatgccaatactcaaatcacatgtcaccgtatccaaataaaagatattcgtagccactttgctcaaggaacaaatgattcttcacttgatagatttgatgatgttaggtatgtcgttttgcaaattacaatccattttaattgttaacgtttagtttaattttttttttttttttttttttttttttatttgatagtttatttgtgtattgttctttttgcaagctctctcttttgggagccggataaaagctcgaatagttcgggccaaagtcgccccatcgggctggaggcccgactcggcctgcgaaaatggccctaattgtcatccctatcaggtgcccttggtcgacggaagctctcttggtctgaaagtcaccttttggccagtcagcttgtgcccagatcctagccgaccatacaagctcttccaagctggcctatagacttcccttggccggtcagacatgttggtacagctccttaacgactcgctcaactccttttgcttgttgcttggtggttttgccataccttgtaaggagacattgtcttgctattggcaagactctattctacctgtactctgtcttggcttacatggacatgccacgttaggtggaaaaaatttaggataacatctagcaaaaat

SEQ ID NO: 186152 - DNA, 4578 bp, Cannabis indica
aatccattattcaaaaatctacagcttcctttcttactttttttaattcataagacttgaacatataagtaagaagaagcatatggagtaatggaggttagaacgaccactaactgttctagagtactaatttcctagacagtagaaaagaagtttaaagcataaatttggcttcccaaatataatttcttggaaccatagtttcaaagttcatcaaacaatactcattttagtatataccaaaggaaagaaaaaccccacgggtaaaaagcagttagtactttctccaagtgattacaaaaagccaggtcacttggaaaagctctatatctcatttattccaaagaaccaaaaaaaaaaccaaggagttgattttaaagtccttactgtttcggctaggaaaaagctctccatgtggtcttcctgcttgtgaaactctacatcagatatatgacaatatccacaagcacatcttgcactgtattgcaagctagccaccatgtcccgtccagcatcaagatatctttaaaggaaaaaggtagaaaaaaaataacacgcaatttattatgggcacccatgtaaatctcagagtttgtttgcatcaataaggctgaggattttaaaagacagaaaaggatagaaaggaataacacctccaatggcatgatcaataagtcaaatcaccttcaactggaaccatatgaatataataacaattagaataattcctactaccaagaaatcactgtcctaacctgggatctctggtagctttgtagagccagtatgtgctctcaattaactctggacgcaatggataacttttttgcccgtgctaaaaatacataagagtaagaagattagaaccaaattattgattaatagcctgaaaaccattgactactagttttttgagatcatacatttctgattagaaatgaaacttttggaaaagaaaatcaagaaaaaactaatagaacagcttataagtaacaataacaataaaaataatgatatataacactagcatttaagctgggttactatgaagaaataggtctaaacttcttcactaatgaccagttatttttaacatgcaacatttcatcaaggccaaaagttcatacaccttaaaaacataaatcattagaggttgaaagcacaatgacagtactaacttacaaaaaccatgcataaataaaaaataaactaggaacaataatagccataaataaaaagattcaccttatggcactgaagtttgaatttttgaagaatcaaaaaatcttattctatagcagcatgctctttttaaaggcttaatatcacaaagagaaaaatatgggcagtaaatgaatataattaaaatacctgaacgctgagtgtagcaagattgaaaccctctggggtgaaaccatatcttttccagacactaaagaaggcattatgggttcgaatggcagggccaatatccccggctaaaacctgttaaaagagtacaaaatcaattatgatttatgaaagtagttgacaatgagctatccagtttcaaacactcattctagtgtaatatagaaaaaacctgaaggccaggccagaaagcctgcaaactgttaaacaatggccagacaagagcagcagaatccatgtttacctctacatacctacaaataaaaccaaattcaatgccttattgaatccaaatgaccaagggaaagtaaatacaattttcaccactaacaaatcaaaggctgcaagcagttaccaaggatcattgtaaaggtagtgcatagccgctgcataagcttcttgaaatatgaacaaatactcttcatctccaaataataaataagcctgaaataagagtgtcttagtaaatcacaatacatatagggtgtctttagaatcctagattagagaggttgagatggataatttatcatgtgctttggtcatgtaactatagaagcatattaaaaagactaatcgaactactaaattaatctacgtacagttgaataattatatcatatgcccaatccttcatcttcaaatctctctccttttctcataatctgcaaatgagcaacttgcttattctttttcttattcccatccaatggtatcctatcacactcaccaaaaaggctataactaaacacactcaccaaaaaggctataactaaataaagatccagcattatttaatagattgtgcatttgtttacaatatctatcggcataaacatatattagtctaaactgagctcataactgatagtaaggagcaaggaatgatacaattatatactttttcatttgatacatatatttcaagcattctttctaggactagacctaacacacctctctttcattttaaaaagcttaatccaagtaaggcaggattaagtttcaggactgtgagagaattcagaaattgatagactaatctaacacaaaagacatttattggaagacttcttactactcaaattatcagcctatctcaatgattccggatgacagagcaggaaggaaagaaaaaatcagtggcatacaatatatagctcttttggtgtcttaagaacaaagtacatttcatacatgctgagttcaccaaaataacaatcagaagattttaacatgcaagtcaaatcacaaacctttagaagatactcatagaaagagtcaatactggttccaattccagcatcctgcaaagaaacaaagcaaattaccacagtttatacacaaaacaaaagagggagggaagagtgatagcatattggatcacttcgcaaaatggttaccttctgcgtccagtcacctgtaaacacattaatatgagcacccactaaattaagctttgagcggcgagcccagagtccacgcactgcattcctggtagcttgctcaaaaactgtaattttaaaagaaaggacaaaaacaaacactcaaaatgttccccattccaaacgaaataaatggaaagaatgaagcaaaaagcacgcacacatacacacaaaaagagagaaataatgaaataaaatagtaaagaaaggggagctgctgcggttataatgatagatggccctgttatcacaatctcctctacactatgaaaaagttaaaggaagatactggacaaaatgcaataaaaacccatatcagccatttattagaacaatcaactccaacatagtaaatagattgcatcccctgaagatgcttaattatgcatttcattatagctgaatgatatctgatattatttcatttaatttactcactgaaacaaaaataaaactaaaactaaaacaaagcatttccttgcagaacagaattagaaatagcttggacatactaaaatctcaacagaaatatagtgacacgtactgggatcatttgtcaaacgactaagcactccaaattccaatgtcaaagtcccaccaccagctgttgatgttatctaagaaacaattgacattttagggaagataaccagccaaaatttacttaattgatgtacactactttaacaatcaatgcatgttataatgcttgtctgttaataagtaatcatgaaaatgaaggttgcacacagcgagaaagtgtagtaaaagagtattgccttgctttcatgttcatcaactccatgcaagagattgacagatccaaacggaatccctgcaacagaaagtaattagaagttaaaaaaaattacttgatgcctgcatataaataagatagattgactgtgagccaacaaaatgtgtatttatgtacatagagtaaaaggaaaatctggtacacatacctgtaggagtgtcgaacgcaggtaacaatctccgtgcaaggtcttcagctaagttaagcaactgattgtcataggtcggaattttcatcccctatagcgaaaaataaaataaaataaaacttcagaatacaccacacactagctataagcaaagcaaagcaaagaaagcttaaaaacaaaaattactaatttttgttggcattcttcattgtttcagaaaaaacaatatagttaattcagtatccaaaccattatcaagcaaaagaaatgcacataaattgtcatatttcttttgtgtgctccgtaacacagcttaactacagcctcaattattcaaaaaaaaaaatcataaggtttacatgattattgtaaattttcttaattctgatatctatttttgataaaataaattgtttttcgaagtaataccgtagcatagtcacttgctataagatgtgcagatagtaagccaccaagaacacggatggtagtctcaaaaacagaaactgtcttattctgcaaaaatgttaacaaataactcaataaattaaaatttagaattttataacaggaaaatatgattgatactaaccagagaagcatattcaaatatctcaacttatttataaagagaataaaaaaatatccatagacttagccaaagatataccaaaacacaaaaactctgaaagtcatggatgctgatggaaatagatcaggttagaaacaaaaaaaaggaattccaaagtcatggatgc

SEQ ID NO: 186153 - DNA, 1404 bp, Cannabis indica
atttaattaagacagtttatttacaaccttgaaattgatatacatgaattactatttgttttgtttaaagaaaaaaggggtacctttaacttgaatgtttctttagcgaatgaccacagtccctataaagaatatgaatctgatcaacaagtggttaattcgacatgatttgcagtaattaaaataaatgaaaggatgatgtactaaacaacatacaaaaattatgtataggacattatgagagcccaatacagtataactacagtgacaaaaaaagattttagaacctaataataagttaataataataataaaaaaaaaatatctatttcatagagataatgtgatataataaattagctagatttatgtttttcttttaacactgaaagtcacttgcaatatctataaacaagagatttaggtaaggaagttatactatactggtatgttttgagtacattgttatattccatccatgctacaattggtttgaacgacgatttcctgcttgaagatacattagtcaagcataagtaattttgtttaatctgcaaaagagtaaatcatgtgtgagtacatataataaattgaaattattttccataattaatattgtttttacatctattttttatgatgggtaagaaagctgccaaaatcttattacattttataatttatgcatggcttttcatgttgtcatatgtcaaatatggggaatcacttattgataatcttctttgatctctagctttattgtttttacttgtataatataaatcataaaacaaatatttacctagaaaaatttattattggatattattctctcaaatactattttttttctgaaccaaaaaacttcattacaccaaaattattttttacaaactaaagagactttacaattagcctcaaagtactttctatacaaataattttgcaaaataaacaatatttttcatttttttacaatgtctcaaaccacactgactctgccttggttatcttcttagattgaacacaagttattctatattttgtcaccaccttaactctgtgtactagctgatctaccaattgtattagagaaaaggaatcgcacgacgtatattctcgtctataaataggagactccattatttaaaaaatatatggattcttgatcataccataccagtcgaaactctgccagatttccaaaatactcttgagcttgtgactgccaatcgaaggaaagaagagaacgacaattcatttaggagaaattgtgtaattttgtagagttgtaatctttgattagatcaatcctggtgtattgaattgtaattggaaatacaaatttgttactgagctaattttcaacgtcaacagctggcgttgtctgtggaaataatttga

SEQ ID NO: 186154 - DNA, 2875 bp, Cannabis indica
cttagtaatttgagagtactgtgggaataaaccaacttgcagtgattcatgtacctgagttctttgctcataaaagttgaggttacattttctgtgtgggccattatttgaacctaatgtcatgaaaatcaaaacaatgattatctaactgggtatcactaccaaaactaagattctgttttgataacaatgagtaaacagcaaaacagaactagattatttatcataatgattaccctaaagaagattgaattatcacggttttctttagcttcttaactttgatgagttcatcaatcttaattcttgtttatgtgagtcaaaacagtatcaacatatagtggaaaaaatgaaacatcgagtattgacctggatcagttagccatcccagtggtagcatatccaagtcgggccatgacttcccaagcaatccctttgctcctaccatattagaggttgaaaagtccctgatagagaacaggatgaataatgttacaggctaatcactaaactttagttctttccttggaagaagaaaccgaatgggaaagagataactctgctctgaaatcaagttttgaacaggaaaactcgtcacctggtaacatcaaaatgggatgcaacatctcgccatgtatcccaatcatccccagttatccgatacatgtttaccaatctactcacagccttggccatggcaggtgtcacactggttccaggagacaaagaatacagtataggacgatcaagttccttcagaacctgcacaagcaaatgaagagaaaatattggtagcgatgacattactaaagacataaagaataataaagcaggctagcttacctctgaaacaaagcttatttcattcacatccaaatcatcaccaaatacacagtcatgtttcactgaatgaaaaagagaagtaaatatcaagataagtttaagtgatgctaattaattatgtcatagttctgtatgtatatcatttcagtgaaaccaataatgaagataagtttcattcatcagaaggtcaaattaccgaaatcaacaccccactcggcatactgttcatataatgacctgaggaaggcccttccggcccctgacttggtattcacactcatgaaaccatgtgacatccatgcacaagccctttccttgatacctatatcttttgcagtccatttttttccaccttcttcataggcgattccctgaaattaatagaaagtgaaagctcaagcattgttaccgctttccaaagagtttacggttgctccacaaaccaaatgatttggtgttgtgttagctaatgattcttacaacagataaactacaatgaataatgcatcattgacccattgcagtacaattcagactaaaggtaagagtttttaccttggttgtgtccaagataggagtatttgcatttacagcctgtgtactaattcctctcatgacatgaattccaaacttcaaacccatgctatgtactttcttagctacttcactgaacccttttcctcctttggaagaaggccacctaactggatcagggatcattctaccccatttgtcaattacatcaaatccaagtgagtctacataagccccaggtacctttcttctataccaaagataatccacaaccacatactgcattcattgcaagggaaaatgaaagcactgtcaaaataaatatctcccactctcttacagacaaaacaaatataaacaaataatcaatataggtaacctcgtatccatgaggaagtagcttcttagatatggtttcagcactttgcagaaactcttcctcagaaactgtccagcaaaaagaatcatacgagttccaacctctgggtggcaagctagcatgctcaactgcttgcactctgaaattgaaaatcacatcacatcattgcttaatgagaatgaccattttctttcagatgggatgtaaaatgattttgccacataaaagcacaatttcatttcgaccaacgagtatggtgcaatattaccttttgcccagaagctaaaatttggtaagtataacaaagttcataactttcaaaaatgggtttaacagatgtaacgaatatgcttgaaaaatcactgaaaagtcggtattttaggaaataatgaagcaaaaatagacatagttctgaaatgggttttttgaattatcaccgaatttcctattaaaaggaaaaaaaagaaattggtcaacaatattcagtcatcatatttgaatttgcaacaaaagacaaagtaatttaattcacaagcaaaattctcacttcacaattatgatgacgatgataagatgagcaagattgaagaagctagagagagaaaaagaagtacctgtaaaggataagagaaagggaaaggaagaagaagcatatggagcttgagaaaaagacctgcaaattcattgttagagtagaaactattgaatttctttggggtatgatataatgaggaaactgacagtgataccatccagttaaaccttcttcttattagcgggtaaaaaaattgaaaaaaagaataatcagtaacagatgggtgcagatcctatgtttcatcaacggttcgtaaggtttttgcatttatttattttaggatatgtcttgaaatatgttcttatctgattaatatttttcaaaaatgtattaataatacaatacaatattgctgtactatgatatcattaaatgctcaaactgcaatgtcctgctctctgtcgcaatcataaataagtaacaatgatatgtttctaaactcgttgaaaaaaaaatccatctagtgtacatggtatagaaatagaatactgtctatgccttatgccattttctatatttttttt

SEQ ID NO: 186155 - DNA, 1001 bp, Cannabis indica
atattcttgctttggtctttaattttattgacatcatgtatgtgtggtgggtttgttatgaagatttaccattggtgtaaaagtaaagtgtgtataatgaaccaataatcaacaacacaaatcattttgtttcttctttttaccatcaaatttctaatcatgtcctcctagtccagggtaataattcatgtgtttacactcttaactagattataggaaaagtagagtaagtggtggcattaagtcctaactactaagtaatagctttttttcatgaattttattttaaactccatcccttttaaaaagaaaaatgtaactaatactacattccccgaattcctcataccccattgttgaatttgaaccaattccttcttttgagtaagaaaacagaaccaaaaaaataaggctacctttaatgtgagagaacatagtgaaaacatgaagttgatgaataaagggtaactactcaaataaaatgttcatgagctatgagctactcaatataaacacagcctcttttgaaataataataataataataaatattgattgttaaaaataataataatagaaacgcagcattaaattgagggaaaattattatattttattatgacttatgatttacagcaatttgattggttgattttgtttatttactaatataatagagcactagaggatgtcaccaatcaaaagtcctatgaattgtaaaaggtaataaacaaatattatagtgattagaaacaaaacaaagtaaattaaacacgcgagtttgatcaccgtttgtaccgccgaccaatgatactatacactatttacaaaataaacttttcactttagaaaagtaaacactattcactctcttactactactttacccaaaaacaaactattcactcactctcaccacttaaaacacagttttaaacataaaatttccctaacactacacaatactccattgagatatgtaaaaacacacacaaaaaaaa

SEQ ID NO: 186156 - DNA, 2737 bp, Cannabis indica
aaagagagagactatgcatgatacagtagtcatacgttggatatctagttatttgaaatgtaaaatggttaaagtggctatcgatcttagtctatatatatactctgaaatgattcttcaggtataagttggtgagaaccttcatctttagtggctcaatttcatcaccttatttatttgtttatttatttttctccttttttgtgatgacatatctagtggcatcattcttgtaatcatcatccacaaaattcaaccacaacaaaatgttgtaacatcaacaaccatatgccaattttctagccatatacataaaagtaagaaattgagagggaaaatatatcagaacccactttgtttggaaagaggaaatgagattcatcaaatgaatgatctattatttgccttatacattaactttattccttccaacttcatcatccaagtggaggaatcataattcacatgctttttgggtatagtactcttttttatattattattttatttctccccttgtaataatgatcctccaagacttttgtgtgtcttaagaagcttcgtggtgacacccataaacatattgtataaaagaagtggataaaaaataaaatacaatcaatcatatacccatatatatatatagataatagcaaggccaacaatacattttagatgagttgttagtcaatttaatcacgggcctcattatgaagcaaaagaagaattgcatgatatactaatgcacctttatatgtgtattgaattgctaccacttcccctccaagcatcttatgtttttggattaaattggataagaggaatttccagttttctcttatctaaaataagagatacacaagaacctacgggtatcctatgcttaccaaattgattttataggcactacttactttatatatccattttggcacctatcttttctaggtccttttttttttggcaaattaatatagtactgcccctctaaagagggaataagtataaagggaggggagcgcctttgacagattcgctccgtgattttgtgacttttattttgcctccagttttgaagccaaaatggaatatacatacatatatatacacttagcaatatatatgccattatctgatctgcgtacccatttactatacttattagtagaccgtagaagattgtggattagagagtaaaaatattatagctttcatcgactttgttgggcttcatttactggaagagacccataatccacatccacatgcaagaggaaagatttacgacccaaataaggtggctaaaaatactagaccagaattatatgcacttttgaaaatgacgttcactaaacccatagccatggcccatggagcagctatatttataggagccataaaaaaaccataaattgattgccaactgatacatagcaaaatcctcatattggatacaacaaagaactacattgagaaaagcaattaagaaagaaaaaaaaaaccaaaaatagctaggattcatatgcattcaagattaattattgcatatttcatttattattatatagtatatatagttgagcattggatgtggtctcattttgcagtaccacttacacaaagccattggccaacgaagagagtggtacagttgagattggggttgaggctgttaaaagtttgagtggccaagccaaaaaattgggctactgcaaagcaagtatcaccttgccctatcccatacacttgattgcagtccaccttaggggtcctcaactgcttcggctttcccttgctgccaaacaccgctgcttagacaaacaaaataagtttatatataaataataatgaaaaaacaccaacacaattatatttctagctatataatcatatgtatatatagataaataagctaaacttacatccaaaaagctttgcgtcagccattgacacgatgaaaatgagtgagaggactaaatacaggttaaagaacaatattgcgtgagcattattagtcttcgccatattataattatctttcgagttgttatcttatttctatatatatcgtctttgaatatatataattataatttcaatttatattggtgagattagttacttcaattcttcaagtatttatagaaataagggttatagaaacaaaaacattgttgctccaaactgtagtggattgaaacaataagaattttcaattgtggcgattattataatatatcataaaatatatatatataatgtaggatctacttagcacatttcacataacaatatcatattgttacatagaccaacttatttattaacacgatatggctgttacttatggataggttggtgacaaatattcctctatattttttttggccaggtagagaaattaattgactttctatcgtacaatatatatggccgtcttaattaaataattaattaatgctattattgtttgcttaaccaatggaatattagtttttgttaaactcagatactatggaagataaaaaacttttgttgatatcaacggtcaagtttaattttttttttttttttttttttgtttagaaaatagtcaaacactaataaaataatagacattaatacaaaaaatactaattagcgggttactcattcattttatataaagtattttatttacacacattaactctaatttgggacttactctactaaattaatttagtccaactccaac

SEQ ID NO: 186157 - DNA, 2306 bp, Cannabis indica
ttttccttttcaaattaaagaaaaaagttgagaaatacttttatatagtatacttttaaatttgaaattaccttagtttaattaattcaaataattcatataaattttttaattttattttctatatatccatatttttccattcctggttattttctttacttttcaaccatacatagagtgctacatagtgtcaaattggtatatgatgtggctctttttatatattatttatttccaatgagtttactatgtgattaattcaaagacatggtaattaattatattatataaactattaggttacagttactacataatggtaactaatgtaagaaatagcacttggtacaataatgtagtacgtttgtgtgaccacctgatttttcgtcttcttttggattaggtgtttgattttgctgataagaacaggggatcctacaatgacactcttggacattgggtttgtcccttctattgtgatttcagtggctatcaggtatccgaattatatattaaaacattaaatttaaaaaaatggctagttgttgaactttatatttattgatttctatgtcattatataataggatgaattgttatggggagcagcatggttgttcaaggcaacaaatgaaccttactattggaattatgtcatgacaaatagacaaaccttgaaaagtagtactattgtgaaacatatagacatcgatggtgtcaaatactcaaatgcttattcctttgctgagtttggatgggatacaaagaccgctggaataaatgtactcatttccaaggtaaccaattgatcgaatttcctctactataaaatataaaatagaataataaccaaaaaatttcttcttgttattattagtttctcttgcctagcgccagtgctagctcttccccattcattgccgacgccgacaatttcatttgctcagttttgccagaatcgccaaccaaatccgtatcatattctccaggtactactctattttccagaaatttgtcacaaataatataaattttttcttaactaaattttcatgtgttttgtacaaatttataaggtgggcttttatttaaacctggaggaagtaacttgcagcatgcaacagccttatcatttcttctagttgcatattctcgttatttgaaccaagccaagagagtagtccactgtggcaatatcgtggcctctccctctaggcttattgcagtggcaagaagtcaagtaagttttctgtttttttttttcaaaaaaacttgataattgatttgtaatttttataatccctcttactaatttttacttatataatgatgatgcaggtggattacatcttaggaaataatccaatgaaaatgtcatatatggtaggttatggtgcaaagtttcctcaaaaaattcatcaccgtggatcatctttaccgtcaatagataatcagaaaggccacattgattgtcatggtgggaccacatacttccttagcaataatcctaatccaaatgtgctaacaggagccattgttggaggacctgacatttccgattcttactctgattctcgatctgattttgttcattctgaacccgctacatatataaatgcaccttttgtgggtgttttggcttacttcagatcacacccatctaaatagctagctttgtaactttttttctttttcttcattcggttttcggtctcaaaggtgatgaattcattgtacgtactttttagaatgacgttttgtcgaaaagaaatacaagagtataataaaagttagatatgtgattgaattaataccatattgtttggtttggtcaactcaccccctaatgattcttagctaagggaagagaaatgctaaaagcattagtaatatctaccaccgtcctatgtattaatatcgctattggtctagttaagtattgaatctcataattttatataataatttttaaaaagtattgctagtcaatcgcaagacgacaaatttaaaaatactaaataatatattgatgcccaataacaactcctaaaacaaaggtcataattaattggggtgtacatcgttcggtttggtcgggttgcaaatatctaattttaactcatctaataaaaaaataaaaataaaaaatgtaacatgcccaattattttagtcgctttggtcaggttaatccgtttaaatcggtctttattttatttttaattgttgttagtttttgtgtttaaataattgcttaaaaaaatgaatatatagtatatgcctttcaaaattaaataagttatag

SEQ ID NO: 186158 - DNA, 3592 bp, Cannabis indica
ccaaattgatgtgttccctccaaggaattcccctttcataataaaatgaaccaaagttaacactgtttgtgcaattgcagtttattgaaaagttacagcaagtttggttgtatatgcatacgaaagtgtagggtgttaaatattttacctacatttttttaccatgtattggatgaccaattttgttctcttagtacgaagaaatcataatcatattttggtgaactagtaatggaaaatatactgtctatgttatcctcaagccaaaattgatataataaacaatgattttcatcatatcataaacaaaacaaaagtgattgggcaaaataatagttgttcctttagtaatcttgcccaatttaagaaaccaaaacaaaaaatatactaataatacttactggaaagtgcagcacctaagttactaaaaagttcatctaatatcactagaaagtagcagccagcccagattgaaatacatatatctgaacattaattgcatagcaaactacattagccaaaaaaattactcatctccaccctttgacttcttctttttcttcttcttttcgcttacagccacagaatcttctccgtcttcacttttactcttcttcttcttctttttggctgttccatcttcaagatcaccgttcacttgctcctccacctcatcatcaacctttctcttatccttcttcttcttcttcttttcagatttggaatcatcagcagccccatttgtagctggttcatctacagccatagcctcaccgtccttggacttcttcttcttgcttttctttgcagtaggcacttcatctgtatccatcgctgcatctgcgaagtgcaaagaaatctaatttagaaaaataaaattaagaagactatgcagatgggtaatacaaaagaagatttaggcctgggaaaaaagaaacccttttttcagttctttcttgcacatacctttgttttgatcactttcaatagcagatttcatcacatcaatgtttttccttggtgcaacacccttgtcataaaagtcgagacgctcctcaacttgttcacgcaatttctctccaaaagtagttgtactagtatctgcatcgcaagaggatacaagagaagaaaattagtatctgagcaacaaaacaataagcaataaagcaccacacagcttcacagaagttttaccggcaaaacagtcaatacgggatgcaatagaacacttgtttgcaagataacgagccattcgacccttgtttttggcagaagctcggccaataaaagatgaatggaatataagtccatacttgggtgtgtttcctttggttttcaatgccctgaaaggaaaagaaagctaaagctaatgtgcatataaagagataattgaatgggtactagacattttctgcaccataataaatcaaaacaaattagctcagccaactttgaattcatcttttagaaaatgtttgaaatgcaaattaacttagcatactatcaagtttgacttttgacataatcacaaaacaattttggcaagcacctgaagagagccttctctgcaccgagaatttgaagggttgaggaagggcacttggccaaatttgtaaggctaccagcatgggaaatcaaacgagccccaacaacttctccaattaaggaggccagattgggtgcaatgtcattcattttagtaactagataatcatataattttctcctgtagtcagaaaggtccatgaccctctgagcaaattggtggacattaatcaagtcaattggagacaaatcttgtcctgtgttaaaaaaaagaaaaaaatcacggtcatgttaagttggtcgcaataataaaccagtaaaagcataaataaacatgcttgaagcaaacatattaacaagtttacccatggatgccttagcagcttcaacaatctcctttgccttgtcttcatctccaactatatcagttaattctgggatttggtcttctgacagctttgacttgtcctcaataaacttggtgactcgggcatacagatagttgtcattgacaatcttcaccaactcaggaaaatgccaggaataccattccctatatcaagtcaaaacaatgaatacaaccatttttacttaatcttcttcttataagttataaagcagtgtactcttcaccaaatgaaaaattctcattaaaatatttagaacaaagatttatctatacaacaattaaagtatggaattcataagatgcttttatataaatttcaccacagtacctaactctcatggagaaggaattgatatctttatcaagagtatccaataggaaaatagcttgaatgaccatattgtcgactctattcacattgaatttcactttagccctgctgtaactatgtgccagaccaagctgggccttgtcaaggtcaccaggctaagtaaaaagagccagaggaaaagaaacaaacagaactttgtaagaatagaatcatcaaaacaaaattacactacaaaactgcattgataaaaaattacaattataataagaaattttaaaataaagaatccaaaccttcaagtccttgataaacctatcaaaatgcaacctcacacctcgaatcagctcaagaacaaattcattacattggcaaggaattttagtagattcaaaaatgtttgaaccaagctttggttcagataatcctaagctgaactttggctttttaccttccttgacctttggaagattaagttccaaaaagcttctcaactcatcagtcataagccctgaaaatcaaccaaagtatacaataagcaacaaaccgacataaatccactcaaagctaaagtttctgaaaaacaaagagaacaaaacagaactgaacagaacaacataaatcaactcacactgaaagttcaaactaaacataagaaaaataaaaactagtttaaatggcaaaatcagtaaatgagaaagaaaaaaaatcaggtatatttccattcatcacactccacaaatccatatgaagcaaaaacaaaaaaaaaagatagccacatgcacttgatactgtattgaggattaaaccacaaagagaaaaacaatgaatctccaatcaatcacttaaatgaaaacaaaatagagatttcttcaaccaagtacgaaggtattagactagggcaccagatattaagtcaaaagtacaaaaagtatgatattttgggtttcaaagttttcaccttcagagatagagttagactggttgagggcatcaatggtcgactcgaatggctgaaaagctataagctgaaccacctttccaaaacggttcaagtctgagaccgagttccgaacggcctcaatactctgaccgatctcatcgagtccctcagcgtgaaagaggccataaccggcggcgtgctcgtgtaaaaggtaaagcgccatggaagtccaaaacgcagagacactactcttgagtgtaaaccctgcaatcggctgaagtaaagaagaagaggaaaatggctagggttttaagaggttttaatactttcatggctgcctcctttctctctctctctctctttctct

SEQ ID NO: 186159 - DNA, 8167 bp, Cannabis indica
ttttaacaacctttctaatatcaggggggaggagtggtgtatttctgtcgtctaagaaagcatggaaacgcctacttgcttcatcgagtgtcaaatcatgtccatacattgcgagggcagtcaaaacttctcctcttaacatggaatctaaatggctctcacccgctttaggttgccaaccaagcttcctgaattgttgcaaaacatgttaaatcaaacaacaaaataatcttaaaggaaaataaacaaagaaccgaaatcattgatgagctgagaaagtttgtaaagaactccatttaacctataacttctttataggatcactaccaaagtccaacatttactaatcaaatctttaataagagaaaatgaataaaactaaatttcatacagaaaatatgtaacataatctttctcaattgaggaagcaattgtcattttattatcatttccgtacacccttaaaagattgatacagcaactgacttaaggagataacacatgttaaattggaaaaaggcagtcttgactagtcagtaaaaataacacgtgtatatatatgccaatgtgtcaaatacaaagagcttactctgctgcattttgaaaaagaccaataaagaattgtttgattaactcccgcagctcaggtacagcatcagctgcaatccttactatcttataactcacctgtgtataaagtgggaaccagcataagaaataagatagtacctaaagtaaacttaacaggattagagagcaggagattacagctattaaattggagaggacagtgtattcaagttcttccttgtaagaagacatcaaagcaagcaaagagacaaaagattgctggcgcgccatacaaagggcaaatgaatcatccaaaatgcctgtaatataaataacttaagtaaaccactcataaaaaaaataccattaaacataaaatgaccaagtttatctctatcgataatataagataagataacggtaaccattaaattaccgaatctgtcagttgcagacaagtagttcttctctattgcgtgtctcagtctcgttgcaagatgctcatcatatttcaccctgtagaaaccagcctgatcaacattaagttttatccaagtgcaagaagcacctgttccgggctctgcatggctgtttgtaacagaacaacctaggtattcgggcatgtcaagtgattcagacttcttttccagtaggaaacttttgcggttttcatatgagccacaaactaatgttattgggacaatccattgcccatccccgctggaaccacttgataaaaattgtgactgcaatttatttacattttccccacaagctaactgtaagttttcaaagatcttaaaagaggttaaaacccgttagggctacggaaatcagagataagaacagacctgctcaaactccaacttctgaccattgactttgacagaaacaactgggtatccttgttgttttgtccaagaattcattagtttgttcactggttcaccagatccttcctcaagggcagcccataaatcttcggtctttgcattcgagtaagcatgcttttttatgtacgaggcaagtgacctctgattacatgaaaatgtgtaattagacacagcaaatatttgaaaaatatggaagaaaaaaaatattattacacataaagcatgaacatataacatttttaaaataacacgagtcaaaaagggaagaaaacctggaaactttcggcaccaaggtagctttgtagcatccggataacagaagcaccttttctatagcttattgcatcaaatatttcatcaatctcagaggcatgatttatctccacctggaaaagataagtgtgtaatcaaatcaacatatactcttctgctgcctttctttttttcttcaatctgacatacttttatactgaccattaaggaggaaaaaaagatctacacattatgagacaaaaggatcattgaaaatttggactagtattcatggggcgtggaaaatcaaatattaaggatctttgtatgtgaaagaattcaagagtttgatgttttctgacttttcaagggataaaaaaactttattgtaaattaattatggggttgtacctcattattaaaaaggaaaaataagtacctcaatagggtgagattcctcaagcccatcaagtctaagaccctcaacagattcatcaagaaattgagtccacacattccactcggggaacaagctatcagcagctaagtaactcacctatcaacaaagaaggcattcaagtaccttagcatttgacatgacacgtaacacatagagacaagtttttaaaatatagtaactaacccatgttgcaaatccctcattcagccataaatgtgtccaccattccatagtaacaagattgccaaaccattggtgtgcaagttcgtgggctacaacagttgcaacctttaaaatgtgcaaatgaattgatcaaaacactaatggttacagaatggctaaaactaatttataaactatatgacaatcaaagtaaagttcagaagaacaagatttaccctttgcttgttggcagcagcagaatgttgttcatcatagagcaaagctgtttcacggtaagtgaccaaaccataattctccatggccccagcagaaaaatcagggatagcaatcatatccaacttgggcaaaggatatggcacggcaaagtatctgaaggacatgtcaccattagttcaaaccttaaaatacttgcatataaatttatatatacacatacatagttcagatcatgatcatgatcaactctagcttttaatttgagaactaagggatacaaatgatcaactttgaatgttcaacatactctttgtataattcaagggtcttaacagcaacatgcaatgcaaattttccttggtttgctttaccaacttgaccatatactcgaacattgatccctgtgatgaaaattgacacataatttgcactattaataagaatgaaaattgcattccaaaaccagaaatggacagaatgataattttaccatcagatgtatggtcttccacaaaatcaaacaaaccaacaacaactgccaccaaatatgtagacattatcggtgactcttgatatgagaccgttttgacttgtccattaactttttcttcaatgactggcatgttggaaagggctactaattcagatggtacatccaatgtaattttgaacgtagcctgtaaatcaaggtaccattagaagaaagtgagagcaagccatgaattagtagcccctacaaaaaaatgcgaggtcaagctagaccatgcatgcatgacaaaacttgagcaaaatgcagagcactaacagaaagcatgataagtcttaaatcaaccaagatagcaatagtgacacaaagagagaagggattgaaaaaaccttgcaagcgggctcatcccaacaaggaaagcacctcctagcatcagctggttcaaactgtgtaacagccatattcttcttctcgccattatactcgtaagtacttcatacagaaagtaaatagtcaaacaaagattcaatgaatctaacaaatcaatcaccacctagctatgactaccaataaaacaggcaaatggaatttcaattaccatatccaatccaatcttcttaccttctataaaaccccttcattttatcattcaaaatcccctcaaactcaatagccaaaactccaactccaataggaagtgtctccgcgaactcaacaaccaaaatctcatcctcctcaaaaatctctacacttgaaggcttgaagacctgtctcaagaaattgatccattcatatattagattgacaaaaatacacaatcacacccatataatcttttccctactacctctaaacttctaagcaaatttaaattccattcagtcacatggaaatcccaacaccacacagcatttacattatactgtaactaaacaataatcgacgcttaatcagatagataattggaaaatcatcatttaaactgatcacaacactcaatctgatcttcgaatatccctacggtacaattccatacaaaaacacttgaaaaataataataaagaatccatttctctactatacaaataaaagaataaaatcaagaagtggctggtggcttcattcattcattagattcataaaaaatacacaatcatccccatataatcttttctcttaattccaacactaaagaataattgaggcttaatcagcaaaattctcatcatttccttcagttcaaacaaaatagtcattcaaattccattcgttcattctttaaattcacaaaaatacacaatcaacgcagtataatcttttctctactttacttaagtttattaactttttataattatactgtacactaaagtataattgaggcttaatcatataaaaattctcatcattttccttcgattcaaagaaaaaatcatcatttcaactcatcacattcacaacactcaaatctgatcgttgaataaataaacaaataaataaataatcgatttctctatataaataactataatctacactaacaattaattgagccttaatcagatcatttccttcgatttcaatgaacaaaaatccgtacagtacactacaaattccatacaaaaacactttcaaaaaaaaagattagatcaagaagtgattagtagtggcgatacctttgaggatttcggttcggagaatgagacggaaccggaatgaacggttaggtcggcggcattgagaacgatgaatctggtatcggagacgatatcgacgtggattgaaacggagccggagaatttgcaagattgaaggtcgggaacgagtttgatatcgtaccgcttaggtgcggcgaatttgggaagacgagattggcctttgaactcagccatttttcaaaaggttttactgagtcaactcgttaactcgactcgttcttctttgtctgtgaaaagagtgagctgagaagtgagagaatgagaaatgagttattacagagatgagatgagaatttataggctttgaagtttcaagcttagaactaaaaaaacgacttgtcgtttatgattcataaaacgacttgtcgttttgattcagaaaacgacttgtcgtttcgattcgactttgatttggataaagttgttgtgtgatgatgttgttacctttgtttgcacgcaataaaatttaatatttatttaaaatagattaattccaccttaatatattaaaattaatttttttaaagtaatttttcttttgttggtagaaaaaatctaaaaaaacaaaattttgataaatcattaacaattttgaaactataaaatatatttttggtaatattttttaaaacacaattttttttttaaaaaaaaaaacaaaaaatcataataaacaaaccctaaatatttacaaaaacataattaatagggaaactaagatttaaaactattagagttagtcccacattgctaatgtgtggaaataaattatcaatgaatgagctactctttctattgttaattgattttaagatggaacctcatccactttatcctaaattctaacatggtctcacagtcgtcgaaaaagacgagctaaacttaaaaaacttttgctgtctcctcctttaatctctatttgagacttttcggctaatgtgtgccaatttctagtgttggggtctttgacctgttttaaaaacatacaaatttctcaacgtgtacactcataaatttcacgatatttagtcttgtgggattctttcaaatgtcaggttcggtcgtgtagtctcttaagatcgtttgttatacccacactttcaaggtctattcatcttatcttaaattctaataaaaattaattttatacaaaattataagaagctaaaactcataatttcaaacttttgagaaagttaaaaatatctaattagtttttatcaaactaacccgagatataattccatcaaaatgtttaagacttttcactagaaaattgtatgaatttgtattacttaagctaattttgaatagatagataagtgtgtgaaaaggtagatattcaatgtctaattgtataagttataaaaacagctaataatactactttaaaaattacaaaccaaaaggttatgtttgtaattatctaaaaatgagggtttaatttaaactcttattgaaaagatttgatgcactcaaaattggtgtaatttttttattttttctattgtgttgaggactaaactaataaaagttttgtactattattctaaccaacattactaataactttcctagaattttatttttaaaatattctattatctataatatcttctcaaaaatattcttttatgtggatttgattcttggatgcatcctttaaaaacacaccattacaaaattacacaactaacaatacaaaagagacaaaaatggcacaaaaaaacaaaaactcatggaaacaaaattaagactaaaaactgttttttaaccttatcttttgtgtcattaattgtttgaactttttgttttaaaaaattaattgtcctaagacaatgcaacatattcacctttttcaaccaaaattatttaaaatcaaccctaaagaggaatccaacaaaacatgattattaaattttaataccactaagacaatcacactcaaaaataactttataaaaaccaagtataaaacattggttgccaacacatctaagagctaaagcttcagctatttttggtggatagcctccttccaagaaccaagaggtcgataccaagacctctcctttttcatttctggcaaccatccccaagccgtagcaatctgagaataagttcaaagttacattagtgttgaccttaacgaaacctaacggaggcggcacccaatgggtaattatctcttgacgaggcatgtgagaaaccgacgaatcgccagtcgacgtcttttcttcctccaaactgggtaaatcattattgtgttggtagtccaacattaaaatgtgagcccagttaatcaccaactcagaagaaagaatcttctagttatgtacccatttgtttctttgaaactaacatcgccaaagaataaccaaaacctgcccaatttgtttcgtatggagaggatcaataaattggtgaataaaactcaaaaaattcgtgcacaacgcgagggatcaccaatcttgaaaccattcaacttttgacaaagagtaaaggaagaacagccccacaaggcatggtgagttgtttccaattaatcatcacataaaggtcataaaccatcatttaaaagaccatggctaatgagattaccttttgtagagatccaattcaaggacatttgccaagcgaaagatttgatcttaggatgaatgttaaactcccaaagtttcttccaccaaccagagaaacctgtagagaaaaaggatctatccaaaccctccaaatgaagagccaaccaataaccacttttcacattataaaagcccgaagagtcatggccccaaactaacttgtctcgagtagggaaaatgggccacacgacggagagaatggccaaaaaaaaaaaaaaacttcatcaggaaaaaaggactcacaaactagaggcatattccaacctccaaaaggggaacaaaaactagccttaacattatcaatgccaagggtcaaagaggaaaaaaattaattttgaagctccttgttttgtaaaaaaattcaggtgaaagatttttttagatctagttacattcaaaatatttttattaaatttggttccgaaaaagtttagttttaaccttttgggtaaacatatattttttgttgaactatgagtcttgtagagttttgtcatctattttttttttaactaaaactcccttcaaatttttttgtgtgcccaaaatctcttcggcctaagataatcactgcaaaagcaaacatgtttgatttgttacatttcattaattttttatcaaataatttgttaataaagctacaattcactaataattatagtgtgaatgtctatttcactaactaaagttagttaaataataaccgtgagatctaagttatgttatcaatcaacgttttcatttca

SEQ ID NO: 186160 - DNA, 2912 bp, Cannabis indica
aaaaaaaaacacaaaccccaatcgttacctccatttcaaagtcacttgaagtagaaaaaatcttcacatcattgtgatctctggaccttttgaggccactgaatgctgattcatcccaagaatccgttgggaaacttgggaggtactcaccaccattttcaattcccacttcatcactcccattctcagaaatctgaggcatacgccttgagcatgaagctgacccggatgagaaattcaattgagtatcgactctagagccacctctcatcgcatcaaaacctattgtgcatcaaaattaatacagatttactttagaagaagagaaaacaatgaaagcatgaacaaatcatcaaacgagtaaaataaacaagaagatattattagatataagacatactattctcagaagctagagcggagaagaacccagctggagagctactctgccgaagaagatttgagcgatcatcatttggaggacccatcttaggttgaagcgaatttaccagtcccttagagttgaaaacaccgaacgaactctccaaattagagtccactgaattaaggcgatgtatgctatggatttgcggagcttgagaaccgtttttggagtagtccttaggctcctgcttcattgaagatctctctcctatgttgtcagatccattacaagccgaaatgaatctctctaacatggtctccacttcgggactcgaggatcgcaaatcacggtaatcctcctcagatccaccttcaacagcagcatcgttatcattattaccactgttttccataagggtcgccagaaaggagcccggagctgagcaataacgcgttaaagtagagctctcttcctgattttggtcgaagctcaaatccatgaattctgggtagttctttcccatctccacctctgaacgcttgaaattcggactgtataaaagactcattgaagtccactctttcacttagatgtataaatagaattacttgtgtataaatacagtacaatttcacaagtcgaaccaatcaagttattgaggttagaatctctcttgggctttgtttcaagaaaataaaattggcaaacagaaaacagatgtgtgccagtgagacgcgacagaccaactatgaattttaagctttctggctatggaggtcctgattttgtgtattattttaatctaattttttgaaaaatatattatatgtgttcagaaattgggggaattgacattaagagttttgagttggagaacagtaattgcaaggaagtagtaaaataaagtaaagtagactacttagtaacacccaacaaacagccggtgtttctccactccacatccacaatccacatctgaatctgatcgtcatctcctcttcctattttatccaccccacattaaaaaaccgacctcgaaatcccactgtttttacggaaagagccattggacagtgacgtactctggtcgatgagaaagttcgtcactcatttgagttgaccaaattatccccgatattatttcccatcccattgcattcctatttttctagttcttatttatttttcttttttttcgtttaataataaatcatattgtttatcttaaagcccttgacaacgccgatatttatgtgtgtttttgtccgaaaggaaagtggtactgtgtttaagccttaaatgtgttatcatcattaatataattaagaattgctatattgttttaatttcttttagctaaaaaaaaacttcttcctaactacctaataactactttgaaaaaaaaattaattaatttaaagtaattactatttaattgatttttcttagaaagaaaaaaaagatagttagtggaggttagacatagaaatagcatagaaaacgtagcttaagggccaagcgactctatttcaacgcggagaggtgatttgggattgtattattattatttgttaatgcaattgtacgggggctactcagcgtgtccaatgcggatgtgggatgtgggtggtctttgggtcaaggcaagaggcaattcactctatactttaggtgcatgtattttgtcacacacctttcatatcttattttctgtccttttcccgactactcttctttataccacagatttctcaacttgccctagtccgatcataatatatatttttttatgaagattcacagaataagtgttgctcctagtagaaacatggtacttctttctgattattagtacctttcttcttcagataatgattattattgccattattttatgtcacttttctcttattttttattttaataaaatattaatggctaaataggacaaaattttgatttttttaacgacataaatttatagataaaagataatccatccagatcattattatcttttaccttaattaattatagttgtatttttacaccataaactacaattgatggcaattaaaatgtatcagtatcatcaataaaattaaaatgtaaccattatatgtccagaaaaaaatagtgataataaattttggttggtcctaatgtttgacacaaacaaaacacaaaaggataaatggatacaaaataataataaataggtctgtgatgtcaaaaataaataaatcaataggtctgacatttatttagaattcttaggagacttttcttccgaaaaatatgatacagtatttatatatgtcaattatatatatatatatatatttgggttgaaatcgggtcgtcgttcaaactactgcagcgcgagggcaaaaggagatcaagttttatccacttggagttttaggtcaacgagtgaatgagctttaaacaaaaggaggaacaatattaaaaggcaccaattgtgccaagcatcctcctacgtgtcaatattattattggtctaatt

SEQ ID NO: 186161 - DNA, 2158 bp, Cannabis indica
tctcttcacactttctctctctctcagtcccatccttgagttatggccaatccacttggttttctctgataccctttatgtattttccctctgcgcctccattttcatctcaaagtttcgatctttcttttctgggcataatcaaaaacccaatctttctctatcccaactaagttttcagcttcaagatctcttcttttcttttttttactttacttgctgagatgaagttttgaagatcatgatgaacggctgtgattatgatgatcttctggtaagaacaataataatcatcattattagtacagatttttcaatcaagaaatggtgattctgattcaagttcggtcgttaatctggttgagaaaaagaaaaaaaagaacaacaagaaaaatcccattttgttaattactccaaaaaaaaaccccatatcaaaatcctaatctttttttgattataaggtgtttgataatattcctcagtagattttgttattttgaaaagtggctaagatgagtttaagcacagctgaggatgattcagcttctgagattcatatcccatctgatatagattggcatatgcttgacaagtctagatttttcttcttaggagcagctttattttcaggtgtttcagcagctttatatccaatagttgtgttaaaaacaaggcaacaaatctcaacaacaccaatctcatgtttcaacatgtcatttgctatcatgcgccatgaaggttttagaggtttctacagaggttttggtacttcattaatgggaacaatcccagctagagcactttacatgacagcacttgaagtaaccaagagtaatgttgggacaatcactgttagattaggttattcagatacaacagcacttgctatagctaatgctgcagcagggttaagttcagctatggctgctcaattggtttggaccccaattgatgttgtaagtcaaagattaatggttcaaagttgcagcaatgttagtaatgttaagaactctattcctagtgtgagtagttatagttacactaatggtttagatgcttttaggaaaattatgtactcagatgggtttagaggattgtatagaggttttgggatatctatattgacatatgcaccatctaatgctgtttggtgggcttcatattctgttgcacacaggctaatttggggtggtttcggttgttatatggcgaagaacaagaagaaatatgatgagaatgagaatggttgttttaggcctgattcccgagcaacattggcggtgcagggtttaagtgctgcaatggcgagtggtgtttcggctttgattactatgccacttgacacaattaaaacaaggctgcaagtgttggatggagaggaaaatgggcaaagaaggccacttacaattgctcaaactgtgaggaatttggttaaggaaggcggtttcggtgcttgttatagaggattagggccaagatgggcttcaatggctatgtcagctacaactatgatcactacttatgagtttctcaaaagactctctaccaagactattgattgactttgaatcaacaagaggatgatgatgctttgcttttcttttttctttgttcttttattttatttttcatatcttcaaaatttgttctactttttcttgtattgccttgttgccttggattaatgtacattctttgttttgtttttgtttctgttttcagccttttatgttattaactgtggaaataactgcagatgtaaatatatatctatatatataagtattttctttattgtttttttaataattagtatttttgtttcataatgttccttaataatatctcttaaaatataacttttacagtaatatggttataataatgcaatagataataatgtaagttaaatacatttcttttttttatttaatgattaaaaaactataaataaatatataaattattataacaaaaatcttttttctattatttattaacgtaaaaataatgaaagatatataatttacatttatttataaactattttttactccttcaaccataaaattaaatataatgtgatgaaagaattatattactctaaaaattatatttggaaaagtattattagcaattattattttttttaattttt

SEQ ID NO: 186162 - DNA, 3113 bp, Cannabis indica
atatatatacatatttatatagatgatatcctttttccttgctgcaaatttgttttgtttgtataacaaaacaaatagtttctgcaggaaggatcctttgttgagtttgaaaatgagagcctagtgagtcccgagtcactttctataaagaaacaatcttttcatgatcctgtttgtagatctttgtcttcttgcggttcagaaaattgttctactacatacatggtcatggggaatagtgtggctgaaagcatcaaaattgtggtcttttctgccaaaatcaacttactaataccctttggtcctttggcaattgtggttgataaattttcaggtcataatgtaagttttattacatatgtatatatatatacatacacacatatatgtcttcttctggggtaataaaaatagttatatgggcccttttcatttgtgtatttttgtgtttcagggatgggtttttatcttaagcttattaggcataatacctctggctgagcgtttggggtatactacagagtaagctttctctaattagtatccaacaccatgtttgaaaaaaaaaataagacaaactctaaattgcaaatatgtccttaatgagtatctaatgctggtttgactttcctttgatccagacaactcgcttgctatacaggacctacaggtaatcttactctctatagttctacgttttaacaacactgacttttaaggagacgacacaccaactctgatgatagattattgtaaattagcctttgaattttttggttgaggattataaatgaatttttcatgagactaacatacttattttgcttcatccttgcagttggagggctcctaaatgctacttttggaaatgcaactgagttgataatttgtgtttatgccttgaggagtggcatgattcgtgttgttcaacagtctttgttgggttcaattttgtcaaatatgttgctagtgcttggatgtgctttttttgccggaggacttgtaaattctaagagggaacaagtctttaataaggcatgtatgtttgaatgtttctaataaattgaagcacaatcgatccatcaaactagtttgatttaactcaaattgtagtatatttttcccagggagcagcaacaatgagctctggcttgctattgatggcagtcatgggcctgttgttcccggctgtcctccattctacacacacagaattacattttgggagatctgagttgtccctatcaagatttactagctgcattatgcttgtggcatatgctggttatcttgtttttcagctgaaaagccagagtaatttatatcattcagttaatgaggttagtaccaaaactatttatttaaaatgtttacttttgtacactataccctcttaaggttttcactgttgtttacagttttcatattttgaaatgaactatgatgaaagaacaatcacctttcttttttctttttacttcattaatcattttacaaacaaacattacttttctttttctttgcctttattatctaattaagtttacaaattagaagaaaattcttatatttgtacagaaaatgctaacttgtttttactttctatacttgtgtggtttgataatcaataagtgggaaagtctgatactattgggcaaaaactgattttagttgtgaaaatgaataccaaaccatatgaaacacaaatacaattgatttttcaaacagttttaattttgtttatggttccaattttccaaatacttttaacattaagtcattgagagttgtattctctgcatctttatgtttcactgatggtgatgagcatcataaatcagggaaatggagaaatagatgtgcctttggatgataatgaagaggctcctgagatctctaagtgggaatcaataatttggttatctattttgactatttggatttctatcatctcagaatatttggtggatgccattgaggtgaacaaattatatatttttagagtaatgaggcatttgctccaattttactaatctacattctgtgccacattctcttcattgtgggatttttttttcttgcatctgaaactagacataatttcattttagggagcctctcttaaaatgcacatcccagtggcatttattagtgtcattcttctaccaattgttgggaatgcagccgagcatgcaggcgcagttatgtttgccatgaaagacaagctggtagatagttctcctgctaggaagtgatttaagttagcattttgcatgacattcagtttggctttaatgaaatttacctttatattttatgtaggatatatctttgggagttgctataggctcatctacccagatagcaatgtttggggtaagtatcttatactgtgacttttttcaatgaatataaaacatatttgcctttttaacatgatgattgacttgatatatgcattggcaatagagtaataatgttggttttatcctctcattctcatgttcattcaactcaaaatatattaatgcatttttttaggatagtaaaggtgttttactattagaaacttcaacgtttcatgctttatagaccagaagtattgaatattgcatcacatttatcggtagtcaaacgtctctaaggaaaagtgaatgtgttatcagctcatcactaagatatattcaattcaggtccacaatacaagagagaaacttcatttgttctctctgaggggtagtaatttaatggctttgcatagaatttgcgttgtggtgcacttacacagttaaagtgcttatgcaaccatctaaatccatattgtaacaatatatagcttcttttttcattcactttcttaatattatttattgtatttttattatttttggtttccaatgtttgtttcttctctaactattcactattgttatgggttcagattccattttgtgtggttgtagggtggataatgggacgtccaatggacttaaattttcaactttttgagacagccacactttttattactgttcttgttgtagccttcatggtgcaggtttgtctaatgatgaccaaaacttactaatattcatcatttaaaaaaaaaaaaa

SEQ ID NO: 186163 - DNA, 2928 bp, Cannabis indica
  modified_base (12)..(12): a, c, t, g, unknown or other
tattcatttaanattaaattggatcggttatattcactgaatgtattttcttatatattttatttaattttaattttgacttttacccaatattttgacactttagtattttttttgagacggatcagatctatccaatatttttaagtctagtatgtatttagattagaatggatccatcccatccaaagaaaaaaagaacagaattttaatgttaattttcatatatacatatagattttatgtaatataattacttatttaaactaaataaaaatctaattatttcgattggatgttgaatgtattggatttttgcacacttcatctaccattcgattcgatccagttggatatttaaaaataacatccaatctgatccgatcacaattagatattcaatatttggcggtcgattctcattaaattggattttctaagtctaaagtgatttcaaagtggttataagtgctatcaagagtatcatctctataaaactagattactgtttgtttgaattcttccaaattgttgttgggatgtaatttttgtaagatatctcattcctttaataatactaagactagatatcactgataatattgatgtcacatctattccgatgaacttgatttttaacaaccaattggtgtagttgttattttaatatatcaaacttaaattaaaaaaataataagaaaaattaagaaaaaaaaaaaaaaaatacttttttgacaaggataggataataggaccacattgggtcccgggtgcacataaatccatatggtggaaccacagtgaaacccaacccacatgcccatccacttgctcaacacaagtgcttattacaataataagataagtattaaggaattatttaatgttatgttatatacttgtgttgtctatatacttttctatttaattatttaactcatctatacaaattcaaaaacattaaattacaaaaatctcaacatatattattaaaaataaaatagtaattttataaattaataatgatctatccttcttaccaaacaatgaaagaattattactttccttttgcttctttataattttttttatcttattctcttttcttcctacctaacataagaagaattaatgcaaaagcatccataaatgttgcctagacaccaatatagtgatcaactctattgctagctcttggaatttaaataaccttaacacagttaaaaacatctaagctactaataagttatagaaaaacattgtaaaattttcaggaaaaaacattatgagcactaacaatcaaagcaacaacttgataatcagtaaaaaaaccaaatgacgaaagaagaaaagttcctttagtatttctcacttttggatacatttgttagccttttattttttcttcctctattgttttttttcttggtcaataaagtattttatattgagtttgatcttcacaagttttagaggagggctaatatagtttataaaaaaaaaagtcctattttcaattaataaaaataataattagaagagggtaccctagtaatacaattatgaagtgatttgttaggtaaatttatagaaatggaccatggtattagaaataatcaacataaatttttccaccatttcttttttaattttttactaaataattaggggtatcatccaatctaatctgcactaagtgcacatttcatattcttttaagagttttttgtagtaaaaccatccaaactcaaattttgactgtaaaatcctctaaactattgaaatagtagtaaatttaagatgtcattcgttaactgtcattatggattgcttatgtgtacactcttgtacacatgacacatttatattggtctacataatattattatttaaaaaattatttttaaaatcactataaaattaaataaaattataaaaatataaataaaatatttaaaaaaaaataaaaattataaattttgaaataatttatatacttttaaaataataatattagatgtaccaatataaatttaacacatgtacaaaagtgtacacataagcagtctatattagtaattaattgtaaaaaataaattacaccttaaattaattgttgggatgttatttttaattttataaatataaactaaaaaatacatatacacactccatcattaaagatactcttatatacatctcatttttattgtctttctattttattttttatgaatgaaaatcaaataatttcattaattattaatattagataataaaataattgtcaaactaacaagttcaaactccctattagaaattggattaggtaaagagctagtagatcgactaaccaattacaatagaaatttacaatcataaatataagtccaagggtgatagcatagaattagagagctttctaagacttatttcatcactaaacaatcattgtgtacactaatttgagtgttggtgaagatgccaattgaagtatccaagttagcaccctctttgattcaattaagtacctctttcaaaccaatagcttaagcaagatgtggttctacactcctctctttcaaactacataggacacacaccaccaccaagtccaactagtttaaagtgagtgggcctaattttgtttgtaagataaagacaaaactaaacttaaaaaataattaatagataggatttgaattcacctctattatatatatttgtaatgtacttaattatttgcacttaaaactaatattatacctataaatatcatattttattacaaatatatatcataattaattaaaatatatatatttttaactttttaaggtacaattgtttcttcatttttatgtggatctgctcttggataaattgatgcaccatatatcattttttttatggtcttgtgcgttatc

SEQ ID NO: 186164 - DNA, 6135 bp, Cannabis indica
caataagctcttaacagaatcaaataacaatcattaactaacctaagctaacagaaaactaactaggattaattaactgtgttaacacatggaatttgaagtaatgagttaaggaattcaaaatcatgtactctacaaaaccaagcaatatctaaattctaaacatgaatataaattatacccaactggaactttttaagtaagaaataaaaattaaaaagcctaggaagacattacaattatggaaaaagaattattactgataatgtacaaagtatactgcatttagctcatatatataatgagcatcacaaaacaattcaatacaataaattatgtgcagttaacgtcaagccagctaccattataattacttcagtggagcgggctttacaaatgaaaagtcatcttcatttctggtttcctgttctctgtgtacattcatttccatttcgtcctcgtgatcgactcttacaatcaagtttgttgtcgcagagggagacatcatatcagattcaatatcagatatctcattatcgtcatagggcattgagtgagttgagtgaccagtggttttgaatcggtgcagtgtgtgtcctgaggaatgcaccttagatagagttgagcttccagcaccaagggtaacactgggggacttgggggatcttcctccatgcttcttcttcacagccatgcgccactgcttaagggccttagatgtttgttcatcaaagatggatctcttcattcctgaacccatctgcaacaatcacaatccagtttggtcaacaataatcaaaaacaaaacaaaagtaaacaaaaagacaaattatgggacaaggcatttttggtgatgaaaaatgtcatgttggtcttagtaattgaagataacgaaagcatgaatgacacttaattagcatttcaaattaagacactttctggagtttgccattattatgttagtatgctttgtattgttactacttagatcacactaataagaacacattagaaaggtacctgagctacaagggcatagagtggaagtgtaatgtagctgcacaaacataggacaccaaccctgaaaaaccaacaaaatagatatattaatgtcttgatgatttgttgccttgccaatttgtttcttctttcaaacataataatagcttattattcttgctttcaatggagtatccaaatatccattccatacacgcatatttcattaaggaaacaaaagagaaaaaagcccgtaccccatagaaactttcataatggcaagcttgaaattagcatggaagcaagattttaatccatatgaatactgcacaaacagaaattttgtcattcgtggttgggtattagattagttaccatacagatatcaaataaaaatacaaatcatatagaatataaaatattttataagcagaagaagtatgggtgaagcgtgcatacccatatccacaggaagtatgttatttgaaaagcattctgcatgaaccagaaaatggatcagtccccaagtattgaaaataaatgaaaatcaaacatgaaactccacaaattgctcaaatgtatgagatctcttgatataaggtgcaatgaatattgaagattatccattaaaaagacaatataagacaatgaacattttccaaaatttataagtcttgataaatgtgatcttgttgttggtgtgcaatattaattgtacaataagccacactcattgtttaccatcacacacatttcatcaattctgccaacttaaaacactataataagattcattttaacgaaatcaaattaatcattatattcgaaaccccaacaataatacaatatcaaagagatcccaaaggttggttttcgatcaactactataaccagaaccaagcaatacaaaatttcggagctcaaagaacctagtgctccttgagttaaaatatgttgtacctcaacatcaaaaccatgaaaagtaaaattgtgcctggatcaaatttgataaccacaaactccacaatttgccaaaaaaaaaataaaaaatcaacataattacaagataagttcaaaacagaatctgctgtagagagaattcaatacctgaaacaaagcaaaatggattagctgaaggaccaattggggccgaccaaaccaaaagtatttatctgatccctgcacaagaggaattccttggactacagcgtgcctctcagtgatttcgacagccatctttgtcaagatggattgaagttcaattccaacagctaagattatctgcgatcatatcaatgtttaaaaattctaccaatccaaagaagctttgaaaatttaacataaaagaaaccactacttacaataagagggatcaaagatgcccaaaataatgcttgccattctgaaaaatatagtgttattgcatttcagtcagcttttcatagtttaaaagcagaagtgcataatatcatatagttcaaatgaataaccagagaatagtggcttacttgcaacgttcagcaacaagaagatcacaaatgacgcccataacacaggactgccaaaaatattgaagaacaaaacaatcaggacacagatggatttcagaatgatcatagcaaactttgaagtcagacataacaaccacagcactaaatagaagaatattaccttactccaacaactaacttaaagtcatcttccaaggatctcttgacatacttttgaaagtcaaatttacttccaggagccaaatgcacctatggatgtaatcttgttagacttaatagaatacaggaatcaacaaaaataagataaatttgcaaccaaaactcaccgagataaatccgttgcgtaatgtcaagtagtccgacttactaacagacttaaaaaattgtcgaaagaagcatccctaaaaaatagccagtaacatatgttacttatatagatgtagattgaaaatttatgatcaaagtttagaagtagcagttagaattcaatctcatgttttgaccttactgaacaataagagacaacaaccaaagaaagatggatgtgaaagtcaaaatttcttacgatatagaaaaagattggggtcctagtccagaagctggtatgtgctcggacaaatgatgtctcatgagtaagtctgaatcttgatggatctgtatttcaaacaacaaaaatttttagtttctcataaacataaatctggtcatcatgactgatataagatattgatttaaaacgaacggggccaaaaagtttgaactctaggatggcataccagttgaaaattcgtagtcatgggttaacgtctccagctcccatttcttccagccacgaatctatgaaaataaaggtacaaaaaattgattcagctgacacaaattagcacggtacttatcacagtaaaagttgatttcaaatttactgtgagggtgtatggctatgaataatttagttgagttgatacaagcatatagaattatttgtagttcgtttgctaaaatacataaatcataagctactggtgaaaatgaaccatttagtttatcaaaacaatcgtcaattatattgtattctgatagcttggacaaatttggtgtttccagagaaaagacataaaaataggaaatgattgaaaaagatgtgcaactgaaaaaaagaataaaaaataaaacaaaagacttcatccgaacttaacaaaaaaaaataaaaagaaatgagtacaactatagtgacaatattgtcaaaacctctctttcacacacttctaaaaagtcaatcaaaaccatatacaaattagtcgatggagctgttcaaacataattaggcatgaccattattctttaatctttagaaataaaaataaaaaaaatttaaaaaagaaaacataataattgacaatttggcatgcaaatttatgtgtgggaaagaagcatcaaaaggatcattgaactgtgctgaatgtttagtggtagccatataattttaaattggaaaataaaaataagcaacatacaacacccatacctttagcctcccaagcaacattgtgataccactgaatagcacatgaaaacaagctaagaagaatatgaggatgtgcaactgatgcaatccttcaacagaaataagttggtttcgtatccctgttaacagaataagattagtcaaaagaaaagtttattgctgttaaatcatatggcaataggaaccaaatttttacctaaaaatcaataactttagatatttgaagttaagtttgttaaaatatatatatatatatatatatataatagggtatcaaaccatggaaataacagatattttcatatgcagaaaaataggtatgaatgtacactcaacgctcattagatagaatatgcatgaaaaacctgaatgaaacattacaaaagtaaaaaattcaaccacagtgccatgggtcaaagctcaaccaatagcaaaaatgagtagggaagtggtaatctttttcagtatcagcactgcaacctaaaactaatcaacaaagggtatatcaaatcaaaggattccatcaacactatgaacaaattcgtgttgtttaagaaatacataaaattcggatgttagtacaagcatagcaatagatttgcttacagttttgcatttaggaatagcgtcaacagcagataaaactctgtgctcaaaccataaaagtctacggcgatgttcttcttcatcagttttttcacttccttaagagtacatggcaacatggtctgcgctacattaatggggatacatattctggcaatgtaactctggaaaaaggtcaggataagtgaaatgaaacccagaatcatcaactctgcaataagttcatcaagaagtcaattaagcatccacaagtatttcattcaatacatatgataatgtaaattgaataacagattatattaccagctttaaccttctcaagggcttcaaatagtgctcttttgtgcctatctgtaaaccactgcaatgaaattcaccatggttaagaacaaagtaaaccagaagaacttcagagaatgacattctcatcttaacaaatcatttaaccaaccaccaaccaaggtataattctcaagtcaactcttcaagtttgtactcataaaaaataaaaataaataaataaaggggggaatttgtgcaaagattattcatttaaacaacaaatcgagaggaaaagaaaaagtcagctaaaatcagttccagattatccagtgagaaacgttgtaatcaaaggttgaacattttgttctattaactaaacgctaagaagcatttagtaaacgacatccgttgaccctatctagacacattaacacaaacaaacgaaaatccgagcaacttcgcatgttataatcaaggaaaatcaccttcactacacaaaactccaactttttctgggtttctacatagaaaacaaaattaattcttgggttttctagtaacataataaataaacaaactacaactacaaaacataagagaagtaaaagaaacagagaaaattcaagtgtacaaaccgttccaagcttatgaagaactttttccaagcctattgatatgataatgataacggcgcaaacgccggcaacagcccatgtgggtgtctgatcaagtgttctctcgtaagcatctgcagtcgctgccatagctacatccaccaaaagaagccatagactcacactcacagagaagaagaatacccagttcattgttattggcttttagtttagaaaaatctttactttcttcgataccaaagttcgaactccctccttaagaagcctttgtacttatctatataactacacgcgcatgtattgggttgattggttcgttgttatgggatccactccacagacaacttttgaaagagcagccagaaaaaatagttgtttttacaaaaattaatgcaattgcaacgaagaaagaatattgaatactgtgaagaacgtttctttattagcgagcgccaagttgcactaattgattttatttttaataaatcatttttaatcattttgttatgtcttaatattataaataataaggtcaatccttcacacgataaaagtaaaaaggaaattaaaaattaaa

SEQ ID NO: 186165 - DNA, 526 bp, Cannabis indica
gaagaagaagaagaagaaacacttacccaccttactagtgcacaagacatgtgccaattttttgggttttgggtgcattgggttcaggttcgagttcgagttctacgagtgttaaatgtgaaaaattgttaccgaacccgaacgagtaacttgttattactttgggagttttcataagtacttaaaaagataaaaatattataaaagtatgaatttataattttttcgatatttttacaggtttaaagttatattgttatttttcacaacaacattatactatattatttgcacattgttttcctcatacgcacagtcctacctttgatagatccatcctcccagttggggaaatttatatttatgttgatgctacagtgagaggagagaaagctattggagctattgtggtccacaattccagtgtaacaattgtggaggctattactttaccctattgggtgcagagtgatctttggctcttgctcatactttaactttacaatattgagtggagagtacatga

SEQ ID NO: 186166 - DNA, 6632 bp, Cannabis indica
atatcttcatatatatatatatatatatttcttgatgtttattgggtagtaaagggtgatttatggggtgcgtgttatcttggaggtcgattcctgagaaatgataggttgcagttgcgagtatgcactactttgttttatttgtacctgattattgtttgtgtgtatgtattttgcagatgtatatattaaggagggttgcaatggctgctatacgagttgcattaaaccttgaacatggcagtgctaaagacttttacatatgttctctttcctcgaggtttttattagagagtagctttcatctttgttctagggaagcttgtaagcatcacggttgcatcatgatgaattgctttacccatcttctgcaggactgttgtttacaaaggtcagctgaagcccattcaagtgaaggattattattatgcagatcttggcaatgaaaggtttacgagctacatggccctggtaaatattttatccattcacttcttatctttctccactaacttcatactccaacaaacagcctgggaaccaccagtaactgaagagatgcaaggttgaggaatgacttctgaggcattgaggtttgaatgatctcttaagttcttccactcccttgattactaattgaattttgatgctggattggatgcatgggtgagttggtaacaatcctcattatcaagtaaatcatgtttgcagaaacttgcccagtcctctctgtgataagttgttgaggatgaattttatttaagagacagtaaggaaattgtgttggttcaagtacagtttaggattcccatagatttgtactactgccactactaaggtggccttagcacaattttgtgcatgtgatttcttgatcagttatcatttttttgaatagaattaattcttcacattgttaatgaaagtcttggttgttttggccattggtgcagattcattctcgattctcaacaaatacttttcctagctgggatcgtgctcaacctatgcgtgttgtgggtcacaatggtgaaatcaacacactcagaggaaatgtaaactggtgtgttcttttaatgcatttatatagtacagtgcatccaaatttttaattagtgcaacactagaaaataattaaagaaagagtgatctatgttattaatttacgctacctgttatttctccaggatgaaagcacgtgaaggattattgaaatgcaaggaacttggtttgtcaaagaatgagctgaaaaaacttctacccattgttgattctagttcatcagattcaggtgacctttttataaattttttgtttgcacatgtatacagggatgcatacatgtcctgcaattaagctcatttcttttattgaaaactgacattgggttgatttcatatgcaggtgcatttgatggtgttcttgaactcctgattcgagctggcagaagtcttccagaagctataatgatgatgattcctgaagcatggcaaaatgataagaatatggatcctgaaaggaaggatttgtatgagtatttttcagctctgatggagccatgggatggaccggctcttatctcatgtaatgtttattaggtttttaagccttacatttgacgatattctttattacttctagtttgtggctattgtactgatgatgaaagtttctgcagttactgatggtcgatacttgggagccacgctggatcgaaatggactccgacctggtcgattctatatcactcacagtggacgtgttataatggccagtgaagttggtgtagttgatattccacccgaagatgtgagcaggaaaggaaggctcaaccctggaatgatgcttttagtagattttgaaaatcataccgtggtagatgatgacgccttaaagcagcagtattcaatggcaaggccttacggcgaatggcttaagagacaaaagattgagcttaaggacattgttgattctgttcaggaatctgatagggttcctccagccatagctggagtggttgcagtaagtgtgatacaaatgttcctgaaagatatgcatttcttttcttgtgaagtatgattggactaatctttttctaatttttaggcatctactgatgatgacaacatgcagaacatgggcatccaaggtcttctttctccattgaaagcttttgggtatacaaaatttctgtgccacctatttttaatttgttgatatttttacttcgtatttttccttggaagaatttgtttaataactcttggatcattttgcagctacactattgaagcccttgaaatgttgttgcttcctatggccaaagatggtgtagaggcccttggatcaatgggaaacgatactccattggctgtcatgtctaacagagaaaaactaacatttgagtattttaaacaaatgtttgctcaagtaacaaaccctccaattgatcccattcgtgagaagatagtcacatccatggaatgtatgattggtcctgaaggtgacctcactgaaatgactgaagaacagtgccatcgcctctcccttaaagctcctcttataaccgttgaagaaatggaagcgattaagaagatgaattacagaggttggaaaagcaaagttattgacattactttttcaaagaaccgtggtagaaagggattggaagaaactttagacaggatttgcactgaagcccatgatgcaattaaagaaggatatactacaatagtactttctgacagaggtttgatacttttaaaacaattcttttctaagttctaattgagttgcatttgactgttgacaacaatttgtgatgtgttctggtctttctaattccgctatatattttcaaatgtagcattctcaaagaagcgggtatcggtgagctccctcttggctgttggtgcagttcatcagcatctagttaaaaaccttgaacgcactcaagttgggttgataattgaatctgctgagccacgtgaagtccatcatttctgtacattaattggatttggtgctgatgctatctgcccatatttggcagtagaggccatctggaggttgcaggttgatgggaaaatcccgccaaaagctaatggagagattcgctctaaggaggagttggtgaagaagtactacaaagcaagcacttatggaatgatgaaggttcttgctaagatgggaatatcaacattggcttcttacaagggtgctcaaatatttgaggctctgggtctttcatcagaagtgattgagaggtgctttgcaggaactccaagtagagtggaaggtgcaacatttgagatgcttgcaggtgatgcacttcatctgcatgatttagcattcccatctcgaccatatcctcgtggaagtgctgaatctgttgccctgccaaatcctggagattatcactggaggaaaggtggtgaggttcatcttaatgaccctcttgctatagcaaagcttcaagaggctgccagaacgaatagtgttgccgcgtataaagaatactcgaagctcattcaggaattgaataaggcttgcaatttgcggggtattttgaaatttaaagagtcagatgtgaaagtacccttggaagaagtggagcctgccagtgagattgttaaaagattctgcactggggcaatgagttatggatctatatcattggaagcacactcgacactggctattgctatgaacaaaattggaggaaaatcaaatacaggttttttacttgcactattctgttagctgtatggtgaaaatgtaataaccagttttgattcaaaaagtatttttcttttttttttttagcatttttaattgcagttattgtttggtaaaatattatgacaagattgcaagtgttttgtttttggactgagcagttgaaaccaaatcttattgcaggtgagggaggtgagcaaccctctcgcatggagcctcttcaggatggttctaggaatccaaagaggagtgcaatcaaacaagttgctagtgggaggtttggtgtttcaagctactatcttacaaatgccgatgaactgcagataaaaatggctcaggtaattatttacattttaactccaagcttcaaggtctgtctatggttgattttcttttcctatgttattttcccgactctgtattcctattggagcagaggttctttttgttaatgtctatgttcatggcagatgttgctgtgtccgcaaagcacctctgggtgcctttgcatctttaattgatacctacctttggaatttggtgaggttaagtattaaaacgaagtttttactctctatgaattgcttgcatattgacttgtttctgttttaacagggagccaagcctggggaaggaggtgaacttcctggtcacaaggttataggagacattgctgtcaccaggaattctactgccggggtgggacttattagcccacctccccatcatgacatctattctattgaagaccttgcccagttgattcatgatcttaaggtgcgttttcatgttttttatcttttaatttgtggaactttgttatcatcttttatgatccagtcttttattgtttgatttctcaatgtttaaaatgctgattttatttgaatctacttgattttcagaatgccaatccaagtgctcgaattagtgtcaagttagtatctgaggccggtgttggggtagttgccagtggagttgttaagggccatgctgatcatgtcctgatatctggtcatgatggaggcacaggagcatctagatggactggtatcaagaatgctggtcttccatgggaacttggtttagctgagacccaccagaccttagttgcaaatgatcttcgtggtcgcacagttctccaaactgatggccagctaaaaacgggaagagatgtggccatagccgcacttcttggtgccgaagagtttggttttagcactgcacctctcataacactaggctgcatcatgatgcgaaagtgccataagaatacttgtcctgtcggaattgctactcaggatccagttcttcgggagaaatttgctggagaaccagaacatgtcatcaactttttctttatgctagcagaggaggtaagagaaataatgtcagagctagggtttcgaacattgaatgagatggttggtcgtgcagatatgcttgaagttgataaagaagtgaccagaaacaatgagaagctggataacattgatctttctctattgcttagacctgctgctgatattcgacctggtgctgcccagtactgtgtccagaaacaggaccatggattggacatggcgttggacaacaaactgattactctttccaaatcagctttagaaaaggctcttcctgtttacattgacactcagatatgtaacgtgaatcgtgctgtgggaacaatgcttagccatgaagtgaccaagcgttaccacaatgtagggcttcctgcagatactatccacatcaaactcagtggcagcgcaggtcaaagttttggagcattcctctgttctggcatcctgctggagctggagggtgacagcaatgattatgttggtaaaggtttgtcaggtggtaaagttgtagtttatcctccaagggaaagcaactttgatccaaaagaaaatattgttattggtaatgttgctctatatggggctacaagcggggaggcttacttcaatgggatggcagcagagagattctgtgtccgtaattcaggggccaaggctgttgtggaaggtgtgggtgatcatggttgtgagtatatgacaggtggcactgttgtggttcttggcaaaactggcagaaatttcgcagcaggtatgagcggtggtgttgcttatgttcttgatgtggaaggaaaatttccatccagatgcaatccagagcttgtagatcttgataaagtggaagaagaggaggacgtcatgaccctgagaatgttgatacagcagcatctacgttacacaaatagtgatttagccagagatgtactaggcgacctagagaatctcctacctatgtttgtcaaggttattccccgggaatacaaacgtgttcttgcaaagatgaatgctggggaggccttaaaggtggacgtggaggtagttgctaaagatgacgaggagcaacatgatgagactgaattaatgaaaaaagatgcttttgaagagctaaagagatggcatctgcatctttaaatggaaaatcaattcaggtatgaagcaactgcagtatcttttatcccttcacttaggttgctgttataatattgttggtgtaacttgagttttgcaatttgcagaaagttgaagaagctgattcatcaaagaggcctagccaggttgataatgctgtgaaacatcgtggttttatctcatatgaacgtgagggtgttaaatacagggatccaactgttaggatgaatgactggaatgaagtgatggtggaatcaaaaccaggccctcttttagaaactcagtctgccaggtgtatggactgtggtactcctttctgccatcaagtaagcaaaattttctccttgctctcttcagtcttatcttccaaacatagttgcttgtcttttctaaagattgttgaac

SEQ ID NO: 186167 - DNA, 3428 bp, Cannabis indica
gcatttccttttattccttaactacaaccaccccaattcctgtcttttctttcttcacatccatttgcagcatctatgttcaacttattaaacaaccatagtggtggtagattctcaaactgatcttgagtcttgatgctattactaggagcacccactgatttgctcacagaaatcgagttgtaattctcaatctattacccttctatttgacgtaatctttggtggcactataagggatcaaacaatagtctaccatccatcttttaaaatatgacgaatttgaagaaagaggaggaaaggttgtagacttagccagatgataaacggtttttactgtcaaacatccagaaaaatgatatcccaaccaatagtagatatatacctaccctataggaacttcaagactataattaatagtatcattatcaaaataagtactaagtttactaccctttgttctttacattaatgttattgtaaaatacattaggagtagtactattatataaatacagctttcagttttgatcgtcagagatttcaaagtacataagcttatactttctttttcaataatattattgttacagtataaagttgactatagtcttagaatcccacacttaatttaagtacaaatcaaaacggcccaaaaatcgattaatgccacttattatgaaatcaaaagggtccaaaattaacttatttagttaccacacagtgatcactctctcaattaaatcctctccctcccaccccccataaaaaagaaaaaagaaattacaataattaaaataacccgtaacattaatatattcacgacatgatttagttaaaaaaaaaaacatattcatgataatcatctattaatacctactattaccaaatttaacatgcttttagaggctttccacataaacaagcattgtaagtaaacgacgacgcttcaaggtgatcaaacggcgaacctgctggaattgggccgcaaagttggttatggcttaagtccatgtgtccaatatacgaagctgaagatatggatttgggtattgggccagttaatttattgtatgataagtccagtaccgtaaaataagatcttggcccaaaaacatttggaatacgtccctccaatttatttctgctcaagtttaagttcccaatagctgagttcatcaaactcgccggaatattcccggagaccatatttccgtcaaggttcaaagtcgccaaaaccgccattttccctagcgactccgggatcggtccttcgagtctgttcagagagagatccagatccgccagacggtatatggaagatatggaaggtggaatcgtcccgctgatttggtttcgactcagtagagctcgactcagcattccgagtctgtggaaatctcggggaagacctccggagattctgttgtttctaagatcgaggtgcatcaggcttgagaggttagttatggaggcagggatcggaccggagatgagattatcagcgatattgagaacggtaaggcggcggagtctgccgataccgacaggaatcggaccgccgatcttgttcccaatgagatcaaggattcggaggaacggcaaggctgttatgcattgaggaatgactccggtgattcctttccagtcggcgattgtgatgctggagagtcgcggaagcttgcaaatggcgggagaaatgtaaccggtcatgtacccggttcggtgagccctttcgaaaatcgggtcttcggactccccacggagatttatatcggcgacccgacgggttccctgatcacaactaactccataccagtttttacagcagtcggttccggtccaggagttgaagattcccaaatgaggctcgtggagggcggctttgaaggccataagagcggccctgtccgacggtggacaggcctcggcggcggccaaagtagcggccaccactataatcatcactaagcccaaacccatatctaataataattaacgataatcttcactattattgattactacagtattctcttcttcctactactttatttgatggaagctaaaataggatgaaatggagggataaggtcgtaaaggggtttgttattgtttatatagagaaagttctgacatgattttattattttctgtgacgattttgcccctaacgtggcattttagagtgacactaggcctgtagggagggatgtaaaagttgtgggttcattcattgcaacaggtctcggtgtttttctgcttccttcttagccccttcttcttcttcctcttgccacgtcattactctttcatataatttttaatttatttatgaaccttaacaagacatactgtgagaccgagcatgtacatttgaaactccaaatcacaacttagttaaattatgaaagatcattttcttttgtcggttcgtaagtctcacatacgtggataaaaattacaatattaatagagaatgatctgaatataatttactgtgatttgtttggtagattgagatatttgattaatgattgattgctattgtaatttctaaggtagtactatagtcaatgtcatttttaatgacaaaagaattatgaagggttgaatgtattttacatatagtctgttcattttttcttattattttaatatatattttttttttgctttataatttgcatataattgtagcttttcattttagttttattatttatttgtaatggaatttttggattctacttttccgattcaggtttttgggtgtagtcttagttttcaaaattatattgtctttgggctaaaggaaagatatttttgtatgaaaattttatgttcttttttttgaaaaatgcctttataaaaaaaaacatataattatatgttctaattatatgtacctttatggtataaacaaatattaatttaaaaattgttatgtaaatgaattgagatatatggtgttcaaagaaaaagtagttgcgtgacttgtaatgaataatgagaatgtacttttaaatgtagtagtgataagaattaattgaagaatgaagtgaatccagatgtgtttgtttggtataaaattaggcaaaaagttaagctttcttcactgtatattatatgcaacatcacgtgtttgaagcttgctatcatctactctacagttgggagggacccagttttcaaatttttttaaactttctgtttgtttctgtatataaataagtaaaaaaaacgtcggttggctgaagttgaagtttgtattatcatatctcaattatacaagtttgattttgtgtgtattaacataatgatgacacatatgcctatctataaagatgaatctacctagtaatggttgtaacggtaataatattgacttattgggatgaaattcgaggttaaaaacataataataa

SEQ ID NO: 186168 - DNA, 1480 bp, Cannabis indica
ctgatgagtgtgagagttgccagggactgctaaagagagggggttagtgatatgaggtcgaagacgagtgcgggtacttgcaatatagaaagggttggatgttattcgaaccttggctcctagggtatggtcataacggaggtgaaggggggctgaagaggagtcacagttagccaaaaactcaggacagtgattgattatatggtttagacagccgcagaaatgacagaagtcgggaagattttcaaagcgaaactcaagccaaacaggggcagccataccttggaagtggaacccggttcctcggggaagaggttgagtaacatcgatctcgatacggactcggagatatggtccccaagtttctttcaatgaggctgtgtcaacttctataaaacgccctaaaacctccccaagtttcctagccaaggctctagagcgtttgagaaacggaatgcccgatacttgaatccagaaaggagtagaggttaacatttcaggggtgatgatcgagccggcctcaagaggtgacataacgataagcttgtaatcaaagtgccatggctggccaatgaggacacgcctacgatcgccaaaacacccgaattcaacagtgaaaaaattgggctctttctccaggacattaatagaaaaccgctcaggccacatttcacggagacgtttcttaaaggcttccggattaaagtgcctattagtcaaaagcttgacagcaagaaaagcagaaggctcatccctgttttcatcttcaggcaattcagatggttcaacaaaggaatggattttggtttcaacatcagtaaggttcaggttggcagaaagagtgtttgtaaggtcatccatgatacaaagagaaaatgggaagttaagcagaaagattggacggattgcaagggagtaaatcaatttgggaaagagctattgtgtagtgtgtgccaggtttgggaatagtcgatctcttatatagggatttggcttacggatcagtaacttgtaaagccttcacagatgggagtaaattccccatgtcagacatagcaatgataagaactagcttacccatggcccctatttcgaatctaggggttctggcaaaggtgtaggggttacctaaaggagcaagggcaatgattgcccaagggggagcagaggaatgcaatattcctaatgtggtatctaacaaggttttgtttaaatgcagaacacaaaggctacgggtaagggataaatgcagataagatgctatgcagaagcagttattgtcagatggacgacaaagaaggaagttattgttgagttgaaggttacctgctttgaagatgagaagcacattgaagcctcctctgtcagatttgacagtcaccggctccattaaagatggggaagaaagacctatcacaccgccactgagatagtcggacccaggacggacaccaacgctgatgaacagcgacgacgacga

SEQ ID NO: 186169 - DNA, 4782 bp, Cannabis indica
tttaaaaaaaaaaaaaaatcatagtattattaatttcccaaaaacaacccaatcccaaatcctctcattacttgtgattccttctaccatataagtgaaacaaatttgtggtttatcaagtttgtcatggatatataataccactttaaacatacaatggccaaataaaactatcaaatgttctaaataataaccaaacaactcaataaaaacaaaacagaatcaaaacaaaaggcaatacccgcaatcgtttttcaagatgcaatcgccaagtcaaatcttctaactgcttctcgagtttattcttagctaaacgcaatgcaccagtttcatttgcttcctgccaatgaaaaacaaattgaatgaataatagaatagagcataaattcatgtatttcagttcatcaaatgtggcacaacagttttcacctttctaagctttcgaagctctctttttgccaattttcttctccagagactttgtattgctattatagaagtctgttcatgtctgaaagctgtccgaaccttacacatcctccaccgagcctaataaaattaaattggtcaaagagaaaatgtgatgaagttagttgaagtagacagcaaaaatactgtgtgagaatattgtaataagacattttaacaagaaaaccataacagtgcacaataagaaatccttcttgtattctacatgtgctgcttgtagtgctcacacaaatactattaaaggttttccacccaattaaagaattgcataatgaatatggagaaatattcataatataatgctattaaattataaagagaaacgtaaatcatatgaaccttgaaaagaatcacctgaattaaaacagcagctctatgttttttccaatgtataaaccttttgcgagttgagaatccacgaaatctggattgtatggtaacagcagctgaaagtatttgcaagtatgccttccttgaaagccagcttcggacttgtttctgtagtacaagagcagctgcttcctctcgtttgacaatgtacatcttccgtgctaggcatcctataataatgaaaaccattaagaacaaatttaaaagaaaacaagaaagacaaagcagaaattgaagtagctcagcctaacagcagccgccattgaccttcattgtagagatttgcaatttgtccgttattaagcaacagccaattcaatgataaaaataagtaattaaaagagtgataaaatcatccaactataggctgatagcactagaatggctgtggatgttgaatggaaccctcaacatagtctccctagattaaactaaatgcaacatttagttggggcttaccatttaacaatctaaaaaagtaggtagagagtaacaaatatgacaataaacggatgaccagcacggatgtatcataattttgcgaacagaaagaaagtaaatctatcacaacatcaatacgaacaaaatgtggaaggggaaaaacaacaaacaaagaatctgaaatttcaacaagtttagcacaagaacctctacagtaagcttggagtaacaatgcagaagttcgagttgagataaaatccctgcgagcaatatatgttcgtatctgacgctgaataagttttgcagaattgtctaaaacctcagcacgacgagaatccaaaacaccaatttgtccagccctgagaaatactttggttctacccaactgcaaaggtaatagatgactaaataaaggcatccagaggcatgcatccaaacataagcaacttgaaaaatgagtaacgagacattcatataaaatatggaaaacatacctggaaattatcaaggtttaactttctcagaattttctctgtgatggctgtttcatcaaaactacagaatacaaataccaggaaagtacgttaataattgcaagaaacaaatggagctcttacaaaagttgtttaaaaattattagtgatattcaaacttccacaactgtagtgcacatgcacacaactacacctccatggattgaattaagcattgaaaaaaccacagacggacccaccttccatccatatattcaggagctaatattccaaatcgatctacaaactctgaataagtccttcgagtgggatagcctgccaaactaatccgaacagcctctaatacaccctacatcaaaacaaataactactacaataaatctaacaattattaaataaatgaaaaacacatacaattactacagggtaacaattgggagacaatcatttacgcaattgttttgctttgtggtcaatgtacttataatcctacatagtacaccatatcccacagcaaatgagcttcactgttatttttggtaaagctcaaaattcatacaactattatcaatagcagtgttgaaaaagaaagcctaaaacagaaatgtgaaacaagaacagatacttgaactcaagttataaatattgtgcatgacttaattgactacatcatcttgaacagtaaatatatagatggctagttaaaaatgcatcaacactccacagaataacatagaagttctagagttacccaccccacaccgtagctgatgaagtatactcaggttctcaaacttttgtggtcggttcaaagaatttggtttcacacaacgtatataatgtggctctgttgtattgaaagtgtttccaatcagagcttggagttggtgctacaagcagaaataggaaaaggaaaagttgtatcaatgtcaggaagaaaaaaatatgcaagtgataatgcagaggcagagtgacaggaacatccaaaacctaaacagaatatattaattgtcaccaaggcattcaaaatttacataaaagcaaatactatccagaagttacaaggcaacactacagtaaagaaattcaaggtaaaaaataaaggttctcaagacaagacattgtagaataataaaggagaaacactttcttcagtcagacgactatcacaatcactgcccagtattgttgacagtactgcaaacaactagtcagaacaagataaataacttacatcttgtgtaagaaaattaccaacaaagtaactacacaacacaaaagtcgtctaccttaaatcttgaggcaacagaagaaaacttgtatgatgatctcaatgattcctctggaagtaaggggaaaagaccagcgataagggtgcatttggaagaggatagcagattgcagtgttcaaccacaacataatcacgatttttatctaaaaaggtatctgtatggtaagtaacctacaaaaagtaatacataaattattttaattaaaattatctaggacacaggtctaattttctaactgtgattctatttgcaaatacaacaagacatataacatgcctttccagcataatgggaaacagtaaaatctgtttcggaaaattttgccttttccaatctcgagtgtgatcggaaatgctgaaataacttcatggaaaaagtttcatgtgttgatcttgggaacatgctgcaaaagtaagagaatcaggataaggataaattacagcaaaaaactatacagaactacacgcaccaatttatactgaagaactcaaattgtaccaagcttcatccaataatgcaattatcccaataggtttctgcataaggaaatgtaacataaggtccaacaattaaaatataataaagatatactaaatttagacctgaagacatcagccaaattacgtatacattctaaacatttttcggtgcactctcaatttccatcaatcctatgacagataaatatgcagagttcctcaactacagtaatacattttactaatctagccacacatgtacatggtatcttctatccttaaggtcccaacacaaaggaaagtgaaagaagattgtgcagttttaatccattaaccaaaaataagtctacaaaatttttgataacgaagaaaaccttctcaatcaaatctagaacatcttgattatctataaactcgatgtagctccaattgatttcctctttgctgtactcatcctgctccatcttgaagacatgctggaataaaggaaagagataaataataataagtttgtattgatcctttccagcaaacagggagagagggaaagaaagtttatactgaagaaggtagaatcactagcctcattaaaactaatacttcatattgtaataagtttacattatacttacaaaaaataaataaatggtgtacctcattaaaatgttgctgaagtttttcattcgcaaaatttatgcaaaattgctcaaaactgcaaaacataaaattaaaagtcaatataacaaaaaaaaaaagtaaaaaatcattaaattaataactaaggagtaaacttcttttgatcaaacattgaaacctctaagaagtaagtactaagtaatctctttattcccctttaaactgaaaaataaccctagtgtcatgtatgaaaagattattctctgattaaaccttaacaagtatcatctaaatgttcattgtaatcaaagtaaactaatttgtcctagttattttattttaaacttgtcaaaagaaactgcatgaaatgataccaaaagttcaatactttttcatcacacaaacatgaataaacttacatggctaaccataaatacaaataactattgttagtaaacaaatataaaataatacctattatccttgaaacattcaaaaccataaatgtcctagaactccaatttgtacttagtgaaattcaaaatcttgcccaacacgac

SEQ ID NO: 186170 - DNA, 9221 bp, Cannabis indica
agaaaaaatctcatatcactcatgctatggtacacttacaatcccactaaccaaaaatctcataaactatattatagcaaaatgggcatgggcatcctaatcatatatgatttgtttcttagatagaagcccatcaagtacaataatggctagtgtggcaaaccagcacacttcccaagcatagttctttcttcctttcatcatcatttagtctaaatctatatattcaacgaaaaaatcaacaaaagaaatataatgaaactagtaacatagagtgttatctaatatctattgcatgctatgtataaataaaaattatcaatgcaatcaaaattctcataaagaaaaatagtaaattgagggtgagttatataattactatttttatccctgaattttgacatatactaaattttactttttaattttttaaagtcgttaaaaatttctctaaattattaagattgttaaatttaaaaatttttaaataattttaagtacaagtcaatttttgacagacatgatttgataaatatcaaagtctttggatcatgatttagtatataaaaaattactgaattagtaaaattgaatgaaattagataaaaaaagaaacttaaatccaataatcttaatagttcagataaaatttttagcaggtagaaaaaaatttcatcaatgacatgagaagaaggagcaatgccatgtcatgtggtgtgtgtggtcccactctgaacaatgtcacagactaaagagataagaaggtaaccaaccaaatcattcattcatttcttcttcttcttcttcctcaaaccattttatgtatacatacagttccatattgatattgataattgtaataatataaaactaaaacagtgcatttggttttggacgatggctacgcttccacgtgtccccttagtgatatcaataaggagtagtaaatgcagattggtggcagaatcttctacccacttctcttatctcactctctcttcttcttcttcttctcactcaagaaaccgcaaatctctctccctttcagctgcaatggctgattcttcttcttcttcttctaccgtccttgttactggagctggtggcagaactggtaattttctttttctctgtttgtttgctgagaaaattggaatttaaaaccaagattgtgaattttcatcttgttcaattttgtgatagttgaatgtagtgtatctaatctatgtatgattatgatcttagtgaaattgagaagtaataaacattaattttgaattattatcattttattgatgaaattgtatgtatccttttgagtattattggcaaactaataatgtaaaataatcacattcaatttactcttggctactttcatggtctcacagtgtaaatctagtcgttttatggtcgcacagtgtaaatctagtcgttctatggttgtgtaattaagtatctggctccaaataactgaaaaaaatagctttcgggcaatatcgctaactaatcgtgaagcgtcacctataaaaggtgttagacaccactggtgcctaatagcaatgctctttaaacataaccttaagttctaacaaatcatatttccttactgaagttactgctatggctatctttactaacagctaaaaaaatgagaaaatgttacattggttgaacatgggcagggcaaattgtttacaagaagttgaaggagtcaagcttgtatgtggctagaggtctagttagaacacaagagagcaaggaaagcattggaggagcagacgatctttatgtcggcgatgtaagagacgaatccagcattgttcctgcagtccaaggaattgatgctcttataattctaactagtgctgtgccaaagatgaaagccgggtttgatccaactaaaggtggaaggcctgagttctttttcgatgagggtgcttatcccgaacaggtatatttcttttttcttcctcaataaagaagcatcatatcatggaaaggggagaaaaatctcttccatccattaaaacttatcatctatcatgagagcatactgagccaattcatgtgtgaagatgagaaagagatgtcccgaaaaactaaaccatagagttataatgtctgaaaagaaaatccctaactcgtcccaccaccaaaacattgtaagaaattctacattgaaaagtatctgatataattgtatgatgagaaattagaacttatctatgaaatcttcgaagttgaaagttatatttgatttaagcaatgtataatttatagcatctatatgttcatgatagttctcatttgatattgttatgtaatatgtatgcattttaggttgattggattgggcagaagaatcagatagatgctggtatgaattccttcttaatttgctttcatttggctatctgtttattatggttagtaatatctgttttgaaattttcattggtgaaacagccaaggctgctggagtgaagcaaattgtgttagttgggtctatgggtggaacagaccttaatcatcccttgaacaaattaggcaatggaaatatattggtttgtattatctctttttaagttccatcaatctttcctttcatgatttttttcttttctgtactgttaactaattccgaaacaacattgcacaatcttaccatgttttagatttggaagaggaaagccgagcagtatttggctgactccggtgttccctacacaattattaggtaggtcatcctcgatcgcttctttttttcttctgttctgtacatacatacatatgttatgaatattgtttagtgatttcttgtactgattcagggcgggtggcttgttagacaaagaaggcggtgtgagggaactgctcgtgggaaaagatgacgaacttctgaagacagaaaccaaatctgtccctagggccgatgttgcagaagtctgcattcaggtaatgtttatgcggtgttacaatcgagcatttttaattaatatttattatttgattacaggcaaatagcgacgtaagtattcaaagtttgagtttgtaagcagcataaatctcatgatttttttaacgacatagtacccaatatttgtaaaactgtaatttttctccaaattcatcagtactatctctgtttagaatctttattaaaataagagttagaagtaactgatactacatgtttcaaggcctaatgatctagaacctggatcttatatgtaccctgtttgaaacaataatactgaagaaactaaaagaaaattactgttttatacttatgtcgctaaaaatatcattggatttacgttgtttacaaacttaaaactttgggtacttatacgactatttacatttttattaccaaatttaatgtgttcactactaaccataatgctctttccttttaatcaggctctgcagtttgaggagtcgaaaaataaggcatttgatctggcatcaaaggctgagggagttgggacaccaactaaggatttcaaagccttcttttctcaaatcactactcagttttaatcttcattaagccagtaagtgatggtttctggtgaagtactacaccattatcattatcattatcagccatagtacaatttttatcaagttattgattgagtgaactgattttagagaaagagtaagacccgggttttatgtgcatttgactagcatgagtattgagtaggctgtattatgagatatgaatgttgaacagtagaatggtcaatcaatcttttttgttttatatatttctcttttctcattaaagaattttatagccatctaattgtgaccaattttaggtcatgaattgactacaacaaaaaatagaactcacttatgtttaaaagaaaatttaatacataatcaacacttgggaagatcagaaggtggtggagccaacttctgattaggcttctttccatccatgacaacccaagccatcttcaagccccaactagtgtgtacttccaagtgacaatgcatgaaccatacacctgtataaatcatcatcaatcaatcccaagatcaaaccaaaatactagatttaacaaaatattatccacttttcataaaaggatatttgcagtgaaatcccctttacatttgcaattgttacacatatgactctaataaaaaaaaaaagtggtaagtaaaaacaccttatcttaagtgttaactcaaaaacacataacgacgtattattggaccacaaattaaatgattattatttatcctgttttgaattaaaaatattcaaatttgaatggaaaaactaattcatttttgagctggcactcaacgggtttagttgacacctaatagccaaaagagtatggctgcaacaaaatcgtaagataaggtacttttgccatcatttttttaattatgatcatatctataataattacaaatgttaaaaaggttttaccgcaaatatctctttcataaataccaaaagatattcgttttctttttatacaacaagaaaacagattgattctgtactgactaacctggattgtcggtgaggaatcgaatagcaacccaacctccagaagggacaccaatggtgttcctctcagcaggatcaactagattgaacttgggaggatcctttttagaattaaaattaccaaaacccattcccactacaaaaaaattaaatccatgtagatgaaggggatgactctctgccccaataatgctagtatcttgcaaaaccaactctacactagtcttataaggcaacacaacaaccttagtcccagtactcaacatcaagttacttggtggtttaccagtgtaattgaatttaaaaggtggattagttgggaaatcagtagtaaacaccccttttgtcttgttgaaaaaatgagcttgtaaaagggccgtattcggctgaataaaactcacattgttaatccccgccaatacttgagtattgtttgtacacctttggctctttgagcaagaggacagtcctaatccaaccgtgaagaaaaacttccggttgatattttttggaaccttagcagggaactttgcattggcgaggctacggattttttggctgaatttgaaggaaaatgacgtgtcgtttagcttaggtagtaccggctttaaaagaggaagcttcttgttcttgttgtggtttgggcctgtttcgtattcgagcaggcccatggttgtggagttgtcaaaagcagctgggccagtgacatatggcctagctgccatggcaaagatggcatttggggctttcggtttggttcttaaaagaacatttgtggtctgacctggtgtgatgagtatagtttgagttctgaaaggctttacatacactgcatctgcttctaccacagttaggctatggttagctacactaaagaatagttcattgttgagtgcagcgttgattaaacgaagtaggtaagtttttcctggcttcacctttagcttaaatgtatctgtgcatgtataaataactagtcagtttagtttagtcttaaaaatcataacaaaatgtcatctttggttgttgaaatttgtaagagtacctttagttgaacagttatacaatggtcctggaagaccattaattgtataggcatctgaaacatttggtcctgaccctgttttcaaggcttggctgataattgtctctgtgttggcattccaccattctcctacaattttttcaacattgaaatttgaccattgtcagctgttattacaaactcatttatacacatacacatacacatatattattacaagggtgggtgggaatccgatccaatctaactaataattggattggattggtttttacaattggacaactttttttaaaattttgactaaaatagtatataaaaactaaaccatacatgagtttttatagtttttttgtagggatttctttaataaggtgtaataggatccgtgaaaaattaatagacaacaaataaaatgaaatttaaatataatttttttaaattggattagatcagtttttaattgaattttgaaagtgatatccattcgcatccaatccaatcaaatccaattgtaattggattgaattggttcggtgtaattggattgatttgattgttacccattcctacatataaatatacacatataggaggatgatttgaattaccaaagataattgggacttccttgaagggttgggggaatggataagggacatgtcttttgggtagaatgacaataggtccatagatagtagctctaagccatgagatatgggcatgccaaaacaatgtgcctctttgaccaatgatagtgaaattgtagagataggtctgccctgtttgaattggacattgtgtgatataagcaggtccatcagcccatccacttctcaattgccttattccatgcctattcattttatatacacaaacctcaaacaacaatatgcaaaaactaataaaaagacaaatagataggaaaatttgttgatgagagcatcacttttgcttctattgtaggagtattttttgttttgggtatgtagaaaaattgtacaccaatttttttatatgatagtatattatagttatactaggcatcctttctgttttcggaaaattctaaataatttacagtgctgaaaataaaatttaaacattaagttgtacgcgtgcttgttttattttgcacaagtacaacaaattattttgaattttattttaagcattgtaaagtattcggtatttctcgaaaacagacaagatgtctattataacttcagtatatgatgtcatattataaaattaggatatagttttttaagtacaaaaaataaaaaaatgttgttacgttaggatgaaaagtgatgctcccacttaagaaactccctatatatattgaaaagtgttactgtcaacctcctattacaacttcttagtcaatctctgtgcccgaaaacacatgctggaaactctgtttttcagtactgtaaactattcaaaaattaacagaagtgatattgtaactataacgaataccgctataaaaaaattattccggcatgtgatttcgggcatgaaagttataataggaggttgtaattagcactccttatatatattttttatatataaaggttaagttctcaactcaccagtgcaaggtgacattattttgaacatgattggccaccttgattaagactctgtcaccttccctggctatgattctaggccctggaaacttcccattcacagtcaaaatactctttgttttacacaaccttgtcacattttgtaactttatctgcacaaaatcacaattgaacatgaccattttcaataaataaataacacactcatatcatatacaactatatattagtttagttttttatgctacttacatcaaacttatagtgcctggttattcctgtatgctttgcatgagccaattgaggcaacaacacacacaacaacaaaaatgtacaaaatgcaaagacagccttcaaaaagtgagaagccattgttggaattttttttgtttttgaattgttttgtatgatttgaaaatgagatgatgtaatattcttctttggatgcattacaagttccaaatgagatggtttatatacttataacattgcttcaataaactcttaatcatcatcaaaggcagaaggtgagttaattaggtgattgagtgttacattacaatattttgttattgagattgagcctaataatgagtactagggcaatggtcaagctttaccatagagtgatgtgatgtttaagccaatttttaatgtatgaaattattttcttaacggtataatcacttggtggatttggacaatgttttaggtccatcatactcaacttcaattttggttaaatttttgttattcttctataatggtagcaagtcattgttttaacataacccatttttcctttttaaaaacaaaaacaaattcatcataaaataatagttaattaagattaactttgacatttaacaaatcatgccctttgaacgtttacgaccgtttaaaattctccttaaattaagattgttgaatttaaaaaattttgtccaattatagtaagaaaaatctaacatggataaaaattcaataggcataatttgacacatgtcaaagttcgagggacgtaatttgaggttagtctgggagcataattaaatacatggacaatcaatgaattagtaaaattgaatgaaattcgacaaaagtcttaaatttaataatttcaatagttcaagaaaattttttaacagacagaaaagttcagggaataaaattcttatttagcctaaaataatttaattaagggtttatttatgtagtattatgaatgtacatcaaaaataaagttcgaaggtctgacaactgaattcagagcttcgagagatagagcaagttttgcaaaagaataattagtagagttattatttcttttacttccaaattccaaatttagattaattaggttgtttacttggaatgctttgaaaaacttagaaacaaatcattaatctctttttctgctcttttcttttctttgaactaatcaagaaatgggaaaaacaaatcttgaatcttttagcaagataattactactatttttagcttcaaggactttgatagataatataattttcaattgaaacatttcattgcaatttccttttgttgatcactttaccaattataacacacttttttcaaggatttattggttaaaaattgattaagtgagaaaagtatggattaaaagtgaaaaaaaaaaccatggttatggttattggtattgcctagtagctagccttttcaacctcctaccgtttgaatgaaacttgataattaaggcaaaataaattaaagggattaaaccaaacttagttagttgtgacaacttttgatgttaactggtccttttttttaataaaaataaacttggttctttctattctaagatataaattatttgttaagcaaaaaaaaatataaattattttttatattgaggtgtattatctagtcactatttctaaactaattggttatagttttgtcaaattctatcaacatcagttttggaaaaggtaaaactctttttttcagtaaactattaatatacatatgttttctcttaag

SEQ ID NO: 186171 - DNA, 1422 bp, Cannabis indica
atattacgcctagagttagaactcgtgaagaaattatggctaaatatggaaaggctaaggtaaaagttggagacggctttcgttgcaatgaattaatttattgcttgaatggaatttgtgatttggttaaaaatgatttcaggatgcttcctctgcggctgcaaatgcaagagaaaagctggtagagcggaaggaaaagcttgaggtaatgtagtgactcatacaaaatgttaatggtttgaatattatttttgtttacacatagattggttgccaaataatgtagagatagtgaaagaaagaaaaatacataaataagaagtcaagaagacattgattagggggacgagatttgtatgtttgggctatacaagagttaactcagattgttctttttctcttttcggtttattgttttgtggggtggctgatgcatccatttagaatttgatactgagatgaacctataactagctattttctccaagtgttccaattttttctcttcattactatgaaaatgttatacttttttccactaaaaggggttcacaatatgccaaatcaacacaattcgaataacaattgtgagtatgctgaagagagtggcaacattgaatgcgaacacatctacactttcttgtacttgttatcagcatcattcacagtataattgctttatttgacgactgggtgaactaacccccactctttttatcagagactcggcaaacggactgaagagctgcagaatggagctgaagattttgcatcaatggcgaatgagcttgtcaagacactggaaaatcgaaaatggtggcagatataagtaattcggccccccctttcacattttgctttcgataatcacacttcagttctctgaggaggatttaaattgcaattagtggcaagtctttaactaagaatggttcaactcatagcaatccagaactgaagtttgcgatactcgaaacagtgtaaagaaaattaggaatcaggaatggaattggtgttgccttaaattgtcaagtatatcattagggcttaaaaaaaaaatctgctaaattattatagttgtacatgatgtgatgaatactttcatatgaataatattgctcctcaccattagttttcttcatcaaatgcttttattcctcaccttttttttggtgcgtaccaacaaagatgagcattaatatggtttggactttggaaccaaaaactaacaggaacaaagtagggctggggaaatttggaatatccctgcccttcatgttaaaaaaaaaaaaaacgactcgcgttgagacccatatagattttcgtcggcgaaaattcttaatatatttaatttgttttagtgtgactattcatcttcagtcattatatcgttttttattgtatcttgttctgtcctatttt

SEQ ID NO: 186172 - DNA, 4763 bp, Cannabis indica
acaggttcttttgagtttttgaaccccttagccttcctatcttctcaatagaatcactagcaatacctttagaagaagattatcctttataagaaaatggctcacactctacatgtcattcttagatttttgctttcgcaactcatttttcacccatggatgaactactcagattcttttgaggtcttcttggggttttttagatggagaagcagaattagaacgagtaattgtcatcactccattactccaaaatacaaatttatacataaggcgagaagctcgaacgtggataaccctaaaaaaaaagaagaaaaaagagaaacgggtataaactgagccaatgatggagatgtatatgtgtgtatggtgggtaaaattgaaacagacagtgggagagagagaattatgagaagaggaaaggaaaaaagtgaggaagatgtgttggggaaggtgaataatacattaccaaaaacgtgtaaatattttaagtaaaattgtatatgtgtgaatattttggtaaaaatggaaaacaaaaagaacaaaagcccaaagttaaaaatctcttcatatgtgattagtgagatgccattattaagaataatactattttttaaaagatttgggtactttgtgagtgtagatatcattagtagtagtacagaagctgatttgtcttccttctatcaaaggggtccttccgaattaactgggcaaataccttattacaacgtttgatctctccacccttcttttctacgaatatatttcacctctctatcttattactatgtatctaaatacactcatttaactaatcacaatcccacaatctgtcttcatttaagtgtgaaaatgacctttgaaccaactacttcacaaacaacactatcctatttccaattgccaaaagacaataattctattaatatatatttatatattgcgagaacagacattctattatacaaacaatagagtcaaactataatccttaaaatggcatgaagcagagatacttcttccgaagctttttccttctcccatgagcttctttcttgtcttcttcttcttcttcttctgttttgttgccaccttgtgactcgagtcgatttccacaagttgatgatgtaccttcaatcttcaaatcaggcttctgatttttgattggattcttcaaaaccttctcatctgggatttttgctgaaccttctaattctttgctttgtgacttgcaagttccttcaattaaacatggaacataaaacaatttcaatccaatgaaaattgtaacttgtaacaacacactctcatcacacacaaaaaaaaaacacatttatgtatgagcttaaagctaatacagttgtcaaatgcagcaagtaaatttatacacaaacaaggaaaatcttttagggtacctgtcaatgctggatgcataaccatctcagttggtttggaagaaacaaaaacgcttaacttgcaaccagcattgttttgcaccaagtcaaagggtttctccttctccgactctatgtctgccaacaaatctagggcatcgaaacattcctctgatgacatagtcacacaacttgaatccgaactagaagaaggtgatggtggaatctgaagatccagcagttctaagaagtcacctccagaaagataatcactgtcagctggtggtacaatgtccacaagattagtaggagcacttactctgtttccaatctcgttatcctcgcttgtctaaaatatgtagcaaccatcaacatatattaagaaagcactctccctactttgaagagcaagaggaaagagagatattcatttagctacaaatttaacattacaaaaagtttttaaaagtttagatgcagtgatttattttcatgtcatgaaaaactagtaaagaaataatcaccatttgggcattctactatactaagaaaatatcaaagtgaaatttcataaatttttaaggaaaaaataaaatgatctttgggaattaaagaaaaaatccacttcttcaaatcatcattactaataatcagaaagaattataataaacgcttgtcaaatttagttttgaagagtccttgagaaactgcaaatgttggcatgtgaagacaaaataactagcagtgaagcattttgattccacaataaacaaacaatttggatctctagaaaaataataaataatatccaatcttatactcaaaatcaacattgtggtgttaaagcaattaatgagctcaggattcacaagacagataagtagataactacaaatttgacccacaaaacttcactatatcattgatatgtacctgaggcttactagtagaactttgtcctgtatagttttcagacctttgaataactgattgtgttgattgactagccatatcagctctagcaatcttctgaggcattccatggttagacttttgttcatcaacaacaaagatattgcaaagcaagctttcctgcacgattttcagccaaactggcagttaattagtcgattgggaaccaaaaaaacaagaaaaggaggagggcagagacagaaccaaagatgggtagtaggttctactaataccttttcattgttatctttaggtaagatattccaagtaatccagtacttttgcataacccaattagttttatgcccgtgaggagcttgaccttcaaagaagtcaagagtatttctccaaccagtaattgaagaattggaaaaaatttgacaagcctccccttttggtctccagtatccaaaacttgcatccttttcaaccttagacataatgtaaaaccaaattccatctgcatataacaagaaaactcatcccattattaacaggaaaaagttcacattccttcacattttataataatgttcttacagataataatatgtaccacatcaaaattttgctatttccaattatttttaaacaaacaattcaccctatcaagaaaataaggaatatgacataccaggtaaattttcaggcatgtgttcaaaaggatttacatcagaaataacattgcatggaggtggaatgccgctctccattttctccatagacataattatctcctcaccagaacaaaaagtactaatttcatgggatggggaagttgctggtggacacatggcagcctgatataaaggtaacaaagcagtgacaaaattcgatctgtggtcgtctgtagaatgaatgtctgtcaagctggcaaactagattgacataaaataaaatggaattgtcaacaccaatcatcagattgtcaagattatatgtgaaagagtaaacgacagactcatagacagggttttaattttaacttttaaccttgaacagatgcagatgtagataaatggaagtatatcattaaaatcaaaagaccaaaaggaatttaaaaagaaaaggaaaccgaactaatagtccactacaaactcaagattatattacactccaaactcaagatttttattaattatgacattatcaaaggtaaagatatgatttaccaataaggtgtataatccaaaacccagcctttctccaaaagtctttaaatttctaaactaaagcaaacccaatgataagctattgactgataaatgaagtgttacataacatgataccagagaccaagcataaaatcatcgatgaaacaattcataaatattttgactcaaatgttgatccacaaaccataatattacttgatgctgagatgagatgagagagcagaaaaaccagaaattcatccaagttcccatcttttctttgttaaaagatcaaataaaataagttatcgtacgataccttgataaaggaattgagcatcacaaagaaagacattcaagaaattcatttctactaaaaaaaaaatcatttaatatgattaaagcccaaattaatcgattccagtaattttcattttaatgaccataattataatccgttggttaatttaataccgatcccaacaataacaacataattcgttcttaaactccagaaaaagaataaaaaagactcaattttatttttccatcgattttcttttcttcccaaacacaattcgagctttcttttccgtcccggcaaactcgtccatttactcatcaaacaaacaaaaattaataaaaatttcaataaaataaaaactgtgaatgaatagctcaattaaacatgcacttaacgttccattccattccagagatcgaaaattaacacccaaaaaaaaaaaaaaaagttctttggacagtgaatcaaccgaacctgagagagaaaagatccccggattctttaattgctactcaggccccagctcttaggggtacttatatagtagagtggcagtactactggagtatcagtaatcatggttaaacattactattgttaaatttaaccatggtacacccgcacacagttaagtggaaaatacacaattaccaatttatcccctgagacagtgttttgtcattggcttacatcattgtttctgtgtggaattactgatttatcactcaatagggtgacgtgtcgcctattcattgagttacatcaggttgtttcggtaacttggttgctggagcccactcttttgcgttccttccgcgtagcttcacttcactacagtcgacactctgacttggcatatgtttttgtaaaaaggaaaattatcatttcttcattttttagtacataatttaatcccttttttaattgggaatttaa

SEQ ID NO: 186173 - DNA, 8104 bp, Cannabis indica
tattttttttcagattgaaaaataagtattaattgcacttgaaagaactagaagtttggcttagtattattattattattattattattattattattattttgtaatggaagaattggagagcttactgaacgaggaagaagataatataggttaccaaaaatttgtctctagtattaacctctgcctcattggtcatatttatcttttgttttcttccattattttgcactgttgacctgtgattttctagtgaatatttgtgattctcactggtgatagtatctttattttcattcttattttataggtttgtgttctttgtggttatggagatggtgcaatgactcaggcattgcgaactcgcacaattgtgagaagccttttgagagtttggaatgtggacatagaatgcatgtctagaaataagcatttttctgccaatccttttcaaaactcactgagcaggttggatttctctgattcaaaatgtggaggtgccgctacctcattccctgttcgacctatacataccaaaccgatggcttcatctgtcttccaagtggatatgccttgtcacttaaatgctgtacagatttcccccattagtgagttcagggtagataatagtataacagcaggattacttgattcaacaactaagcaatggattcatatggtttgtgggctttggactcctggaacacgatgcccaaatgttgacactatgagtgcatttgatgtatctggtgtttcatgtccacgagcagatatggtaataattgaacgaagtgatactttatggaagtagctatataaaatatgaagaatttaaaatgacactttcgaaatactttagttattgaacttgttcacaactaagattgctaaagtgggtgtggtaattacatttgttgaacataccaagacatattggaaaacagtgaaaagggtttgcttgctgtgtctcttgacattcattatatgattgatatataatcataaaatcatagctaagaacaatatgtacccaactatttaaagactggttctttccttttatgaccttatttttggttttctttaatgtgttggctggttatatggttgattttttttattttttttttttaaaaaaacatttcccaggtttgctctatttgtaatcgacctgggggttcgtgtataaagtgcagaaatctaaattgttctgtccggtttcatccttggtgtgctcatcagaaggtctgcttcaaccctatctatttttattagcttgattatcggctaatgttgaataatcattcaaggcattttcatatttgtatagcattttttctagcatcctagaaaaattgtctaatttaatttcatttgctaacaatggataaaagctacagttcagaatcgtggtggctgaagttgaataattatttgacgcattcatctagagtgtgtttttatagtattgtaaactaatattgattaagacaataagcagaatactgtcggaattttgacattatatagttgaagtcaaacccagagtaggtggatgacattgtatattgactttatttgttgattccagggtctgttacaaagtgaagttgaaggtgttgataatgagaaggttgggttttatggaagatgtgtgcttcatgctacacagtcaatgtgtgaatctgattgtaacccaggtgatggggtaactggtagttcagggtcagaggaagtaacgtgtgcgaggactgaggtaactgttattataaaggcttatttagttctgaaagttgcttcttcatccgccggatcacatgaagatgaaagggatccatgtctatattcactttgtttcttctggatatctgcagggttataagggccgtaaacgagatggtttctggtataaaaaattttatagtcaaattaaaggcaggggtggatgccatgttcctcaagagcaattaaatgcttggattcacattaatgggcagaaatcttgcgcacagggacattcaaaattgacaatatcagacattgaacatgattgtcgggtatattcgagctttttgtgtacattctttgtattaggtttttaacatgtattgtagaaattttttaacaaggctagtagtgatcttacttttggacttgctcataattttatcagcactgctataaggtaccttagggtgacaacatcctaggggtgtggtaccctaggacatggcatattgccatttatgcaatttaggtcatagcatattttaaattgacatatgtgagatctgacattgatttgcactaataattataaggtctcgggcacataggtgcccttcagcttttttttaattttggtgaggactgctctacattttgcttatgttatacagctattttactatatgaattttccaccaattgcagaaggaatacgctcgttataaacaatcaatgggctggaaacatctggtggtttacaagtctggcatacatgctcttggtctttacacatctcgcttcatatctcgggctgaaatggttggatatcttcaagttgttgagtacatttcatcgttcttcaccgttattgcagaaatgatagttttggtttactttgtaggttgttgagtacattggtgagatcgtagggttgcgtgttgctgataagagagaaaatgagtatcagtctggaagaaaacttcagtacaaaagtgcttgctacgtttttcaggatagataaagagcatataattgatgctacttgcagagcggaattgctcgctttgttaatcactcatgcctggtaatgtttctcttctcatttttcttttagcagaatctagattaggagtttttaaacatgcttaaagttttgatccgatcaatatacgaaatgagatgttatatgaccctaatgaattctattcacaatggttttagtcaggtgggttggatgttgggtgtaatacttcttttgtcactcaagtttctctcttttaatttaattgtttgtttgtttattatttacattgaccagccaaattgcgttgccaaggtgatttctgtaaggaatgaaaagaaggtaagtttatatgtttgtacgatattgcaatttcgtttttttttttttgaaaaaacattgtgtttgccatataaagtctttgcattgcctgttctggtttggtctatttaatctgagtgcagaaattttgaccgcaaattttcatcatttgttctggtttcccaggttgtctttttcgcggagagagacatattccctggagaggagatcacgtacgattaccattttaaccacgaggatgaaggtaagaagattccatgtttctgcaattcaaaaaattgcaggcgctacctgaactaagatgatgtatctacttgtttctcgttgcaaaatgtttgtaaattattggggaagatgtatcttcattgtgggttatgtaaataggatctcatcatcaaatagagactaattattattatggtaaaagtgcaaagccaaacgggtacataggttggttgctctacacccttgctcatcaaatagatgaaggagagatgatgtattagtggcaaactattataattattattattgttgttgttgtagtagtactttgcttttataaacatcacaactattctatccttttttcaaacattagataaaataacccttctatcaacacctctttctctctctctcccacgatggcattgtgtcaccatggcagatgagcactcaatagtgttgtaaatataggttgtgttttttgacacgacacgaaaaacatatgtgcttagatacgatacaaaagattatgggtttaggctcgatacgtaaacacaatagattaatttaaaagcatgacacattaaaaagtaataattttataataatagcaataataaatatttatttattaattaaaatgataatacctactattaaaaaaaattaaataattaaaactataaaatttacatatgctttagtatttgaatgattgacgataaaattctcatattttaatttttatacatttagtctctttatttttttctttttatggcaaatttttttttaagttttttattttttaacaaatttgaggcatttgttaaatattaatttagatgattactctgtatatttgtatatgcatgaaagtaaaattttgaaggcaatacaataataattcagttaatatttaatgatgatatctaacgagcatttcaaatttgcaaagaaaagtaaacataagggattttgtcacaagaaaaaaaaataaaggagttaagtataaaatcaaaacataagaggattttaccgcaaataaccctttagtattcagttcatcaattataatgaaaatgcaaaaatatggaacacgaatttgagctcgtataaaaaaacatgttctatttaagaaaaataggccaacccaaataaagcacgagacgaatccgagcatgacacgaaattactgaacttgcagactgttagacttaccctataaaattgttgcacgattcagcatgatacgactaatatttttttatggcacgacatggcacaatccatactttttatggcctcacctgccacgaactatattttaaaaaacccaaaaaatatgaaccgaactagcacgacatacacgtatttacagctatagctagcacccaatgctgccactgccatctcaaagtacctttaattcgtctaatcaaagtaatcttttttcaaataagtgaaggcttctaatacatttatgtatggtttattttctcacattttgttttctttcaggattaaagctccaaattttttgaacaaagtgatgttccagcgatgcattagccatgcctaatgtcaatgatgctgtactaaataatgatgttatagaaacttcagttttaggccaaaacaaaaaccgatgatgcaaaatgatggtttgtgtcagtatgcgataatctgctataaaatttgatataatttctagtgagctatataactctttactcgtatgttaatttaaggtaatattttttttctacgagatgcagaacaataaatttgaaatttgtctgtttgagaccataatgacgttttgacgcttgagatacaaacaattgatgttttgtgacttcacactccaaattgaagattctacatacatataccaaatgtgtacatctaaaaaataatatttgaactaaacaaaaaaatacagctcaaattgaatttcatggttgatttagccatagcaaagtatcgttaaatatcgttttttgggccaaaaagatagttttcatcgcatcatcgtcaaagtacgcatttttttggggcctaaaaatcaaatttttgtcacagtattgtatttttttggggcctaaaaatcgaattttcgtgatgccatcattatagtaatgttaaacatgaatggagcatcattttatttaaaattttacagatttttctagttttaaataaaagaaaattgacccacttcaaaataataataataaaataaaagaaaattgagcaaaatcagtaaatcttacataaatgtgttcgaaattatgtcaagtttacattcttgaggttcaaggtttattttttattttactttgaatcaataaaacacaaaaaaaaatgacttggtgcttcaatagagtaattcaatggtaatgggatgtggcgacgtcaatggcaatgacgattgacgatgttaatagtgatggtggtggcggtgccattgttgtagtgactagcaaagagaggagggacgattttgtccaatatttcaaaaattgaatatttttgtgatatttgattatgtaaccgaattttttaaaaatataactttttttttatattttatttaatgcctaaaatttttatttataaaaaaaatatttgtaaaattttaaaattataaaaatacattttgctcggtgaaaaataaaaaaacgactaaaaaattaacaaaaaatcaaccttataacaactataaataaattataaaacaacaaaaaataaccaaaaaaataatctcacagcaattataaaaagataatttattatttttatagaaagatatttttataaataaaaaatttcaaaagtaaaaatgaaattttttccatgacttatttttggtgtattatgatataataagatgcataaacctcaaattttccattatgtttaggtagtaaatgaaaagtacaacacatcctgagagtagtgatgtggagatatatatatcttttgttattcaatgtagacatgttttattcccctatagttgaatttagcttcataattagatgcaacctacaaaagaacccaaaaaagaaaaaagaaaccaaggaatgaagccggagttaagagaactctggcagtaggaaccaataaattgccataataaaaagggtctgtgtatttaaactcaaataaataggcggtgactcggaattttaacttttaatccacggtttacgccatatttacgagaaacggagggagggtccatccagcagagcaagtaccttccttcaatagctccagccctctcgcctatgatccccaatttggaatgtttgctgtcgcctcattgaccattttcaccaatgtcacctgcaacgtttaaggagaaagattttgcaactaaataagaaatactagaattacagaatctgaaaaaaataaggatggatatgatcatatataggggtggcaatcaggtcacgacacacagatttgacatgaacacgactcgtgattttacgggtttgacacgacatgaaaattatacgggttgtgttcgtcttcgtattttatcaatttttcatgtcacatgtcgtgttcgtattaactatttaaaataaatttaaaaacaccaaattacacgaacacgaaataataatactaaaaacaacaatttagcttactacacgagatttcgcaagtttgaaatggtacgaaatttatttgagccgttttcgtgcctgtgttttataaattttttgtgtcacgaatcgtgtttgtgtcgataggtatataataaatttaagacttcaatacgacacgcgaaattgctaccactaaattcatgaattatattgagtgcaacgtgtaatttttcgtaattcaataaacaatagagatgattacgattgtcctaaattccccataatgtttaggtagtaaattccctctaatctctcaaccagacaactcttttgctttcgtatcattgagacccattccacaagattaggtaaagaagcctaaaactagattacttccaccactgggtaatgtggccaaagatttgtagatataaacttatatatttatatatatatgctttatttacaagcttaaaattttttatttacaaaaagaaaatttaaaattatacaaataaactttactaggtaaagtgtaagaaacgaaacaacttaaaaaaaatatttaatctcacaacaaatataaataaactataaaataattaaaaaaataactagaaaaacaaattcatgataactataatacaaatataaataaactaaaaaataatttattatttttactgaaaaatgtgtaaatctcgtgtaataaatttagtataaaatatatcaattatttttatttagtattgatatatttttgtaattttttttaaatttttttagtttattatataaatcttttaaatatgtatataaaaaacttaattagaaaaggataacacagcaagcaaccaaaagttgaccaactgacacgtcaccattcttcaagtgtacatttttaattggcatctaatctctgtagagggaataacaataataataataataataataataataataataataataataataatagtgtggtgtcaaccttgacttgttgtgtggatctgtaattttaattttgatccaatccacattgatggtaagtgaatatatcatttaaaattaaatttgatcaatcccccaccctcccctcaacaaaagaaaaaaccccacaaaagctcagaaagaaaaaaattaaaaaaaa

SEQ ID NO: 186174 - DNA, 8516 bp, Cannabis indica
cttctgaaaaaaaaaaaaaaaaaaaaaaaaaaaaaaaaaaaaaaaaaaaaaaaaaaaaaaaaaaaaaatttgcattaccaagtgattttctattacattctattgtaggctatcacagctcttaagaaaggggcatgtttactaaagtatggtcgtagagggaaaccgaagttctgcccattccggctttctaatgtaagtagttttgctttcatatttccattgtgattccacacaaggccttttaactggagcaataagtttgggcttacttcaaagtacaagaattcatactgaatgaagagagatgttattgatttcagttaggttcaaaatataaaacattctttaaacacttctttgagaagagaaacctggcaatataatatttgctatgattctgattagagaacagttatgcaatctcagggcctcacaagttagagcccaatcagcactaaatgagagggtgagttaatatgcggtgtgctaggttgatttacttagtttggcataactatttgtttatatctttcaagttttatttttattatcttaatctaaaaatgatatattctgctgtttttctaatttgagctcagttaaatcatgtgtgtactcatataaaggtgtctttagcgttccaatagaatagtgatgtcagaaatacgttatccttaatatattgtcatttctttcttagatactttatcttcgtttcaggatgagacttttttgatttggtactcaggcaaagaagagaaacatgttaaactaagtcatgtttctaggattattcctgggcagcgtactgtaagtttgtaaaatcattctttatatgttgactggcctcaatggccagtttttgaatccttaattgagcctagaactggggccttctttttcaggcaatatttcagaggtatcctcggcctgaaaaagagtatcagtcattttcactaatatgcagtgataggtccttggacttggtgagtgtatttagtaatatctttgaattgatattgtaatactaatttttgtcggtgtcaaaatgacatgaacattacaaaatgaagtagttctctctttttttaggataagtacaagtgttaccagtgcccaagattaatatatagaaataaagcagagtaactatactgatttctcacgaacgaacaaatgaagaatgaatctgtttactttcttttgtggtcactctccaattttgtaactatactgacacccgttattctacaaatagatatgtaaagacaaggatgaagctgaagtttggtttgttggccttaatgcattgattactcgagacaactaccgcaagtacaaaattgatgcaacatgtgaaaatggatcaactgatagtcccaatactcgtactcgaagaagttctccttcaattgcgccatttgtctgtatcaataatgtgtttccctctcttttgtttctcttcttagtttttctatcaaagttcaagaagaatgtttattatttacagtttaaattcctcatgactttttttttttaaaaaaaaaaaaattaaccacaggatccaggagatgctgcagttaactttgagaatgctgcacagagtagaatgggaaaggcctttgcagacataataacgtatactgcagtcaccaagcgtctcagccaacctgatccagttgtcaacccttcaacgtcaccttgctccgtagataactccaataacaatggtcgagcttctgcaacagaagcatttcgagttagcttatcgagtgctgtaagctcatccagtcaaggttctggtcatgatgaatttgatgctttaggagatgttttcatctggggtgaaggtattggtggtggagttttggggggtggtattcacagagttgggagctctttggatgctaagatggatgctcttctacccaaggcattggaatcaacagttgttcttgatgtgaatagtattgcttgtggtagcagacatgctgtgctggtatccagacatggagagatttttagttggggagaggaggcagggggcaggcttggtcatggggtggaaatgaatgtttcccaaccaaagcttattgatactcttagtggcacaaacattgaattagtagcatgcggggagtatcatacttgtgcagtcacaatttctggagatctttatacatggggtgatggtactcagagctcctccttacttgggcatggaagtgaagttagccactggattcctaaaaaggtatgtggtattatggaaggaatacatatatcctatatatcttgtggactatggcatacagctgttgtaacatcagctggtcagttatttacttttggagatggctcttttggtgccttaggacatggtgatcgtagtagcacaagcattcccaaggaagttgaagctttgagagggcttaggacaatgagggttgcttgtggtgtttggcatactgctgcagtagttgaagttataaatgagttatctagtcctgaaacaactgttaattcttcctctggccaattgttcacctggggagatggagaaaaagggcaacttggacaagatgataagaagcctagactcattcctgaatgtgtatctactttggttgacagaaaattcttcaagttgcctgtggtcatactatcacaattgctcttacaacatcgggacaagtatacacaatgggaagtactgtttatgggcagctgggaaatccttcagccaatggaaaagttcctaatcaagttagaggtaaaattgcagaaacctttattgaagagattgcttgtggttcttatcacgttgcagttttgacctccaagacagaggtctatacttggggtaagggttcaaatgggcaattaggccacggagacaacgatcacagagatgaacctactcttgttgactttctgaaagataagcaagtaaagagtctagcatgcggttctaaccttacaactgttatttgtcttcataagtgggtttctggtgccgatcattctgtatgctttggttgtcataatccttttggatttagaagaaagcgtcacaattgttacaattgtggattagtcttctgcaaagtgtgcagcagtaagaaatctatgaaagctgccctggctcccaatgttaacaaaccatatcgagtgtgtgatgattgtcatgctaaactaaagcaagccatggagacaaattctgcattgcgaaactctaaggttagaaatggaaatgttcgtcgtaaaaccaatgaagtggctgatagagagagtcgagctcctagattgcagacaacactctctagattctcatcttttggctcaataaatcaagctgaaagcatgcattccaaaaatgagaatcaattagaatccaatcatggtcgtgtctttcctcctcttgatagagccaacctaaaggattttaatttttctacagcatcgaattctctggttggagctccaaagaaagtaatatcagcttctgttcctgtctccagattgatgtctcgagcaacatctcctgtttctggaaaattgagcccagcttggtcttctgaagaaacagatttgaagcgtacaaatgatattttaagccaagaaattgtgatgttgagggcacaggtcagcttgcttacactgcttttgtgatgctaagattttaaattatatccatgcacatgagcgtacatgtcctattaatatttgtaatgtcagcattgacatcagttatgagaaatatgtttaccaagtagaaagtgattggaatggcaccctgcaggtagaagatcttacttgcaaatctcaagatcttgaggttaaactagaacaaacaacaaaacaattggaggaggtgactacaatagcagtagatgaagtggaaaagtgcaaatctgcaaagaacattataaaatctttaactgctcaggtttgttatgtttttctctcttctgtttgattttttctggaaatctaattaattaatgtgatatgcaagtagtattgtggtgaaaaactgcacacaatctagagtaaattattccagaaaagttaagggggagctaattcggaaaaaaaatatccggaaatagattccacgcctagcaaaaactaaagataaaagaaactttactaaaatacctttatttcatgtaaccatataactacccagtaatttgtttcaactcctcgtatttaattataaccaaagacccgaattactgttcattagaattaactttcacgggatccttcttttcctttccttcttgatatctaaacctttactagacttgacgaatccaaaacacatgacaccacccaccctttgcttctaaatgaatgtaagagcttacattggcaatctcgaccaaaaaaaaggtagaaaacgtcatagtaaatcatttatgtagtcacccaattataaattgcctgatcttttattctgtgagaacactgaacattatacttacccaaaaccatcgtctctacaaacattttcttttggaacacaattgacaccttccagccgtagaagaaacacttctagagaagtgtccctaataatcctagcaaaaaatgactaacaattaaattttattgtctacttcaattttattgcattatcattcccatgtaaatagttctaacaattgagctcattcaaattttatataacatgaaagatccaacttggagtttatcctgtaaacaattttgatgcttcattcaatgaccctttccaaatgtcctctgaaatttgataatagtgcccattgcacacttcaaaatagcaagcagaaaaaagtccccgtataactaaaacgagctttccaagggcgtcataaagttacctatttttcccctgacgcatctcacttattaggatttgagaccagtcttggtaagcttgtatagttttacaacaaagaattgcttgctagagggaacctcaaaagacaaagcattggttatgctttttctattcttgatgccagtgtcaatgtccaagccaccctttttctttgggatggcacaccaggtcacaagtcatcatatcatctccactcaagtgctactttcccactaaaaaatccctcttcgatcttctgagttctgtatgtagagtttgtctgcacaagcattttgatttgagacaatttataaatgccatttgggtagttaggcttgtgtacctttataataactcaagtttgaattttggaccattcacttttggagcaaaggtgctttggaatgaattggttggatggagaagaagccaataaactggttaaggtattgatgttagacagaagaaagtgaattggctaatcttacactgactacaacatattcatttgtgtactaaccatcttttatgtaattcttcatctatgcaatagagccatgataggtgctacgttagtctgaaattgttttgacaataaattaggcagtaagctagaatctatgtgaaggatagtagttggctcactaagtggagctttgtattgaattgtattcgttttatttttatttttcattccaatgcattaaacaagtttgtcctaaataccttgttttagaaaaacatggtgccccctggtgtggataaagtccttcacaaatatatttgagaagatatgatcaatgtttttacaaaatatagtacagttactgttgtcgcatacaaattttgcttactcaactactatgctgttctttttatttgtcaattatctaaactcgagctcttcttgtctaaaagttgaaagacgttgctgaaagattgccagaagtacataaggtcagctctagtacagacttaaatgctggatgcaccgtcaagttttcaaaccacaaccacgtatcaactaagaccactagttcaaacatggctactcctgaaagagagtacaatggcgatcgaaattcccccaatggatcaaaatcacaagctggaaaagcagagtgggtggtacaagatgaacctggcgtttacataactttatcctctttgccaagcgggggtaatgaactcaggcgggttcggtttaggtatgttcatgttgcgactcttctctcacatagatattagtatattataagtagtcgaaaacgatgattacctggctaatatgagaaaaataaacttgaacaaagaatcttatttcaccttgtttctgaatgcactattttatctcatagcaattttttgcatggcctttacaattacaatcacttaaacatagttatatataatgagatattgatagataaattgatgtattctttttcaaaaacctattgctaaaagtcttcaatcttccaacattctttcatagtcgaaaacatttcactgaggagcaagctgaaaattggtggactgaaaatggggctagagtatgcgaaagaaacaatgtacgaagtacagagtaatgtgctgctagcatggtgaaaaagagaaagcaaagacgatatgacaattcagtataatttctccctggaatttgtaaattttccccttaatcttccagtggagttcaccttgaagaagctgggatcaaaacatagctattagatggaacatttggaatatgcgtaggaggtaacgggtttcgaaggaacagtgaatgtaaagatgaaaagaaaatatatttttatttttttgacaaatttagtgttcattttccttttaatcctctaacgagattctgcttgtcaatgttggtagtctgtagcgtttttcctatttttaacttttgaaaaattataaatttttcagtatcatctttagatttgtatgaaggctttcttttcctaccaacgaggattaagaaaatggtgtgttcagttcacaaggggttatcttaaggaattcaaaaaggttgtcctcagggaatgggataagaagctatacatacaagccaaattagctactaaagaacatcaaagattttgtgtgaaggagaagacatcaaatattatatatatagaagatatggtttttgttgtacatacatagatagtagccagagccaaagccccagaatgcgaagtgaatattcattaaacaagtgaaggaagtaagttgcttaggttttcgtaaagggcgtgagggtattacttcccattgcggtcctctccggcttaaatggctgcgttgaggcatcagataaagttggtaaccttgaaacactgcccttcccttttctggcattaggtcctaactcctctatcatgtatttccacccatcaatgggtctcctccgactaaatatgtgagtctttataaaactagctatctgagtaccaaaacacaataatacaagacaaataaccagcacagcagtaagaaaagaaagcaaaagatagtttaattaaagcgactaaaaaataatgcacaagtaattaagattacgcagacctggaatttgctgtaagcaattcgacgctcgaactcttggagaagaatatcctcctccctctgtgtcatctcccatatattcccatcttcagtttttgatgtcgtttcccaaccatcaggcttggctttaaactcaccagagcttgacatttttgagttttccaattcctggttcacagaatcgaaaatgctgcaatttgtaaaagcacacactcacatcagaatccaacaaaacaaacacaataacataaaagaagacgagacgaaaggaaggaacttactctgaacaactatcaagtaacctctcgatatcatcaccgccaccaccaacgatggaatcacccaatttctcctcttcctgcttctcaatctccttcatccataaccccgcatgaattctctgtttcttcaatctgtaatctctcttcatattctctaagctatatagcgacccacttccactttcgctctctggattcagtttttctggttgtttctgggtcttacttgacgatttacgtctctggctccaattatcgttcatgtcttccacaaacgccttcgtctcggaatcgacgtccgatgggagagcaatgggggaatccaatggggctgagaaattaacgtcggcctcccatggagctcgaggggatttttccgaaacttcctcggggatccaagcagtctcccaggcgttgttccagtcgtccttgtacttgtcatttcggttggaggagaattctctgaaacttggcttgacaatggcaacaggagagaatctatggagttgagagtttcttactatgcgttgaaaagtattcattgaaatttccactttaacgaaatgaaacctgactgacacacctgaagttgaaattagtttccttcttctctgttttcggttgatgctggaaacagaatgtcaaagcttaaaccctactgtgactttcaactcaaattagaacttgggccgttagaacaggcccaattcggttttgatgtggtaaaatttaggaccaagatgcaaaatggtcatacaactaataataaagttaataaatgt

SEQ ID NO: 186175 - DNA, 4031 bp, Cannabis indica
attaaattaaaaaatataagattacagtatatctcattttaaaatattaaaaattggccatcaatacataagagaaatgctaaaagacactagtgctgcccaacactctcttatgtgtcaatatcgctattgatctaattaagtatcaagtcccatatcatttaatataatagcttttaaggaatattattagctaatcgcaacgcaacatgtcgagaaagtactaagtacgacgggtgcctaatagcaatgctcaatgcataacaagccacaaggtactagctccaagtaacaatctaaaacattgatattatattgttataattgtgtagttaattaagtacagagtttgtattagtaatagtagttgtcaccggggcatgacacttgaaacggtgacactattaatggagcaagagtcaactatgaatctccccatggggaaggcaggtggttttggttggcaaagagctgtggattccccgttcaacattacgacaacagaggacatagttggcctctcatgtgcatctttctgaacgcacatcaatcctatttggagatatctcacgaattcatcttggtcacatgaatcaatcaccaatggatccaccagctccaacgcttgtcctccttgacatagctgccacgtctaatatcataccatttcaatcatatcattcggaaatacaatataataatgttgcttaagaatatatatgaaacacaaacaaacatagaaacagtctcacgtatgaaagaaggcaaggagcgagtttcgtaagataaaagcatgcgttccttttcccggtgatgatttcaatcaacaacactccaaagctgaaaacgtcagacttgatagagtataacccctccatggcatattctggtgccatatatccactaattaatcaaaattacagaaattaattaatgatttaggaactcaattaaaatgttttgaaactcatggcttaatttaattaagagcacaatggcttactaagtcccaactattgtggcagtattagcttgactttcagttcctgcaaaaatcctcgccattccaaagtcggaaatcttgggattcatatttaaatcaagtaatatgttactggctttcaggtctctgtggatgattcgaagcctagagtcctcgtgaagatagagaattcctcttgctattccgtttataatcttaatccgtgtgctccaatctaggtgtgcacgttttcttgaatctaaccatcacaagtttgaaaaaattgcactttagctgtaatataacatgatgatactggaacctgaagtagaggatatatagttcagagaaaagaataaagctattttctcaagttatatgaatagcaatatataggcaccaatgataccttttaggatttctcttattttattacctaatagaatggtgtctaagcttttgtttggcaagtattcatacacaagcagcttttcctctccatctacacagaaacccaaaagcttgacaagatttttatgttgaagtttcattatcagtagaacttcattagtgaactcttctgaaccttgctcagataatatagagagcctcttcactgccactttctttccatctcttagtaccccctgaaaacaaccatgcattttttgttgttgaataatctaattaattagatatttgacttccttttcagattgaacaaaaagaagaagaaaataaaaatattgtactaatattaattacctggtaaacagggccaaaaccaccttctcctaacttgtttgaatcagaaaagttgttagttgcagcaagtatagatgccaaaccaatatatggaaactcctgatcatctccatggatgttcttactagaaatttgtcgaggattttcattattccctgaataaggaatcaaactgtagattaagtagagaaaaaaataaagaaaaagacaaggcaattatgtcaacaaaatcttcattactctttttatgtcttctgttaagtgcataacagcaggcatatgaaccaagaacaactatcacaaaacatgatatagcaacagctaccagtgcaagtttccatctttttcttccaatatctgcacttgaaatcaattaattaggtgatgaatatatagattttaatattatttgtgatgaatagatatatacaaaccttccttattcttatcattagccatagaagcacttgattcacccatataaaacgcgtataactcatatctcaagtagcagcttcgactaagaagtctagctccaattgagtaataataaacatccaaaatctcttctgtggcacttccaaggcaatccttacagtcatctggggacaagtctctagagcattgcactaatgcgtatacagtcttatccatataggaaacttctccagttgcatacgaaaatgaatcgtgattataagcagccgtctgagtcagattacgcaacgttttggtcataaacgatttaaactcttctggctgagaaatattttgcaagttacgtagtggaatgtcaccagtgtcgtcactcaattttccgaagaagttgtcgttggagtagcgcaactggcataactcctcccacaccacggcttcttttgagttgtggtgacagagggtaagaacatcttgtgctgctgtggctatgcaatcgtgacagagttggtcattgacatagttcaggcacatgtaaacaccatagactttgtctgcatctttttctcccattatggatgtgtggaacttgagagtagaagcattcgaagggaatgtggcgagtagattttggaggttactctgaaacagactattgtctgtgtaattactggtggtgttagagcaacgtgtataaggagggtcagcaaaacagagattggaaagaagtgtcaaaagaaaataaagcaacagcaatccataaatatcgtccataactgccttctgatgattgctgcgaaaaactagatcaattttattatagctaaatcttttttctaccgtatgtgttaaaggtacgtgtatgcattatttaatttttaaatattggaaaattcttagatacatttctgataaaaaacactgtagtaaatacatatccacttgttttaaactattttatatatatgacgacacaaatatattttatcagacttaggatttaaataagagcattaattgctataaggtactaacgactaacgactgtgattagttaaaaatacatcattatctaaagaaagccggaaattgagaacgaaatgaaaaaacaagtcatcaaagccttttctcccagtccccccaaaaaaaaaaagtcatcaaagcctttcctggtccaaaaccatttattgaagaacaagtggacagttggttttcgtagaaagtgcttctgcttccattttcaaagtcaagtcttaagcctaacttttacagagtaattcattggctctcgaatcaactaccaagggtgccttctgttttctcttcatccttttctattttcgaagtaaccctgtgtccatttcaaaataaatacataaaggaaaattagatttgagtgaaaaatctaatataatctagtggtggactcgtaatttaatatatttgtttttagaagaataatataacatatttaaaagaaaatttatataaatttatattattataacatcaaagtaaattgtgatactacaatttttttaatctaattttattttaatatttttgtttaattttattttaatatttttgtttaattaagaagttgattatttggctccttatctaattttgataatttatctacctaaaaaatatgttctgaaaattattatttaatttattagtattattactattaagaaaattacataatttattatagaagactattttaagtttttattttatttttttataatgaaaatattttataatttttcaggagtgtgtgtataatacaaagatttagaacatgtgttggaggctaaattatatataatacacgatc

SEQ ID NO: 186176 - DNA, 4751 bp, Cannabis indica
gaaactttttttaaaaaaaatttgcgggttcaccagttcgggttcgggcgggttgcttgggttcgggtcaaacccgctcaaaatgttcagccctagtatcctctattaaacttgactaattccactgtgaatattgtgctacttttccatttgatactcactaagttctattcacttttgcatgtcctcaaatggatgatacttttaccctggtggacatgatcaatactgatgttgagggagacgaagttacactactacaaaaataatttttcttgatgtttttaaatagtcgtttaaagtatttctgtcggtttctatattcgttgcatatacgaccgtcgcaaaatgagcaaaatagacgacaactaaaatcgttgctaatgtgaacttcccgacggtttaaatcgtgccctaaatatcattgtgttagaatagtatttctttttattcgaggaagaataatgtttctaaaaaattctaatgattgaatagtactcatatataaaaggataaagataaattcagctccatatataaatataatatatataacatattatttaattgattatttttctctaactgtataatgaatatatatatatatattttttttgtttttatgtttttgtaaaataatcccccaaaaaaaaaaaaatgcaaaaacttaaccaaagacgcgggatataattaaatgctctccgaatttcattgtaataaattaatattataaactttttattcttagttatttaaaagtattaatatatctaaaatggaagggatagggatgtttactggccgacacacacacgtatataaatagcttgaactgttgttttccatcaacatttttttacctcttctttagttttgacgtgtggggtatcatttaactaagatttacacggacaaaacatacatattcccaatcactcccactctcatgcaataaatatatatattacatgtttttatcaccaaaaatgaaataaccaaggtcccattcggattaatttctccaataaaaagataaacaataaggtcccattggatttttgggtatcttcgttttagctctcaacaaattatactatcctaatctacttaaactctatagcaagaaaacattgttatttgttacatattaaaaaaatatttagtgcataataactaaaaaagaaaattactcaatatactaattttttaattttaaatttacggtttgagttactccggtagtttttatgtaagctgttatacgaattttagttgcgatttaaattgctccattagttactataggagtttttatgtgtaatttcgtaaaaatatatatataaaaaaactattttaaagtataaaaataaaaaatacttataaataaagttaaaccctcctcaagatcataacatgttcaatcagcttttgttaaagcaaaaattaggcaaaacctatcatttcatattgccaaaaaaaaaaaaaaattatattcagttaaaaagaaagaagtaagaaaagagagcaatatatattttttaatttttgtgctcttgatattattattagtttagtaactgcattcagaaaaaggaaagaacaatattattagcctagatccttctttttgggagggcttactcaccatataataaagtagtggtattcacaaatgcttctttctttttagtctcccacattaaggaccaaagttatcttattttttgtgttatcaaaaaaaaaaagttatattatttttttgggtctaccccaattgataatttacaaaagtacccttaattatcaacttcctacatcataagtttttttttcatctctctagtctatattttaagcaattaaattatatgaaaagggtataattttcagaaaaaataaatatatcaaaagggtataagggtaacatgttagggacaaagacatagtagtagggcatgcctaacatgtcaatgctataaaagtttcaataatttaggggttaaaaatgctatttgtgagtccaaatagattggcatcttccaagatataaccttcatcaacatcaaggcgtgcaagtggaacaaaaaatggtacaaatgcataaaatgaaaaatatgatttgtattttctctgattggtcaaagcttcaaagaagtgagccaccatggtgggccaaacacctggtatagtggaatagagggatggttttgcaaggcaaatgtgacaattgccaaggattgggtgggcctaattgaaaaaccaaagaattttgggcccactacaccgaacatttttattttaagaatttatttcattgtttttcttttaactaaataaaaaaaaaaaatataggatctctacaactcaacctagacccaccacccttccttcacagctagtcaaataattttgtatccccattccacttcaaacctctataaatagcataacactcaacaccaaaacccaacacaaactaacttgttaaagaaagagatagagagaaaaaacacaaagagagtagtagaaaggaaagtgaaaaaaaaaacaaaactcatcagccaaaacagttattatagaaatggagaagttccctattatcaatttggagaagctcaatggtgaggagaggaactccataatggggcaaatcaatgatgcctgtgaaaactggggtttctttgaggtaaagatacacacacacacacacactaaaatgatagtactttcttcttatttttttctttggacttatattagtttgcttgcacaatacaatactcatgttttacctatgtggtttttttagcttgtgaatcatggcataccccatgagttcttggacacagttgaaaagatgacaaaagaacactacagaaagtgtatggaggaaaggttcaaggagcttgtgaaaagcaaaggccttgatgctgttcaagcagaggtcaatgacattgattgggaaagcacctttttcctgcgccaccttcctgtctcaaatatagctgagatcccagatcttgatgatgaatacaggtaaaaatttctgactcaaaactcagaaacaaaagaaagaaaaaaaaatctcccaaaaagcctctgactgggcattgaatttaattggattgactattcttcttttctgtaatattttgagtgaattagtactaaatagtaacactgacttgggtacaataaataccataaagttgaaaaagaaaattagaaaaaagtggggtatgagaaatgacatctcatgacaaaatttccaaataataatgcaggaaaatcatgaaggaatttgctcagaagttggagaaactagcagagtatctgttagagctgctatgtgagaatcttggactagaaaaagggtacctgaaaaaagcattttatggatcaaaaggcccaacctttgggaccaaggtcagcaactaccctccttgccctaagcctgatctgatcaagggtctcagggcccacaccgacgccggtggcatcattctcctctttcaggatgacaaggtcagcggcctccagctcctcaaggatgacaaatggattgatgtgcctcctatgcgccactctattgttatcaaccttggtgaccaacttgaggtataaaatataaattcaaaatcaattccaaaatcactgtgcttgattgacataattgacaactaaaactatgatatgaccctttcgatttcagcatataatatcaaatctcaactctcaaccactaaaatgaatcactgagtccattatttaggacccttttgagcatagtcatgattagaacactaatataattcatttgttttttttttaattcattcttgtttttttttttcttcttcttttcaggtgatcaccaatggaagatacaagagtgttcttcacagggtaattgcacaaacagatggtactcgtatgtctttagcttcattctacaatcctggaagtgatgctgttatctacccagcaccatctctggtggagaaagaagctgaagagaaaaaccaagtctacccaaaatttgtttttgaagattacatgaagctctacactacagtcaagttccaacccaaggagccaagatttgaggccatgaaagctgtcgaagctaaggtcaccttgggcccaattgccacagcttgaaatatacaatgtttttttttttacttgctaaataaataaaaatatatttatatatattataacaagaaaagaaaagaaaaaaaaataagaggagttttctatgttttagccatgttgtaacaagtttttaatcatttgttataaaaatattattactctttttcggtgttaatttattattttgtagaaaggtaactaaagttgcaagttaataaatatatttgaagataaaaaggtttttgtttaatgttttcgatctattcttgtttattttcagtacaattcttttcccttagttttcgttatggctaagtggggagtagatctcaaaaagtcataggctgtccccggaagttagttaataacatataaaagataaaaacattacttaaaaagagggataaacatactaattttgtagctgtttgtgttagggtttataaaacacttaagaaatatataaatcacagatccaaacatattcctaaaagtgctttaatatagaaaaccctaaatcataaatctataaagcctttgctaaattaaagagatgataaaatataagcggaagcactaacctgaagcca

SEQ ID NO: 186177 - DNA, 3880 bp, Cannabis indica
taatattgtggctataacaaatactatcataaaaataatattttaattatatatttctaaacaatattttctaaacataaagtaaagaaaagacttgtaataagagattgtaattaactaactatagttaatcagactatttaaacttttattaacaatcatcactccttaaagtttcatatcagtacaaattgattgacatgcgttaaaactctaatatgtttgaaaacctcacaaaatcctaaactacattattttcattaccgacagccatcaagaaaatactacactagtttcattgtcgttcatctaaaatgactttcctgtctgcaaaaacatcatggtcaaatttgttttgactttggttttataacagcagtagcagaaaataataataataaaaaaagtgaaaaatattctgaagataaaaccatggggatagggtttttgagtatattcttctgtgatttttctctatcgtaatcctttctctatctctctaaaaaatgatagtcttctctccgtatccaagtccaaccagctcagtccttcactcttcttccaatatctttcatacccacatcgctttaagctctatcttaaaccccattggagatggaagcttaatcttcaagcgacggaccagggcgtatcggttcctggtgctcttctcagcccattccaaccccaaaattgttaagtccaaccgtaggtctcggtacggtcaggctctgtctccgtatgacaatgatgaagaagatgaagaacagtgtggtgtcgacagtgaagatgaagatgaagattggtcgactgaagtgagtttttcttaacttgaaccgggaatttcggatagagtttcactggatttttttagatgttttacgctgtgttttcaaccatttgaatgtttttcatgcttttgaagctgtaaattttgaattattgttaattaactatgtcgactatttaatttaatgttttgttatgaaaaatgaaacttgatttttccagactttcctacacttaaattcgtcataaggctttacttattgttaatcgagcttttctttttctttttgtcattgattttgaggaagtttgatgttttgtttctattagttttaaaaaaattgtatgaagtgcatgttttgagtgatgcactgttgccctgagaaacatataatatatagttgaaagcagcaatttttttctttttattttatttcttttcatttgtgctctttatgctttctgctatatattactagtttgctactattgtgtttgtttgtgtgtgagaattaacctgtagctttacccgggaacggtttccaggatgaatttgctgaggtttcagatattgatgctaaaagaaaaaggtccaaattgcaaggaagatttggtggaagtaggtgtcaattgccattgaagcttttcttaaagcattatatatgaaaagaaaaaaggaaacagtgaaaagaattaactgaatgaatgttttgatattgcaggcagtcgaaaacaacctcagaaaagccagagcagagtcttatcaagttttccggttgataaggaattaggtggcagaattggcaagcaaactctagacaaaaatattgctggaagttatcaccatacttcaaacagaaaagaatcagttagttccgtagacgtacgcaaagaaaaggtgtgaacactactttagttatccacatttactatctgatgtaacaatggctcaatatacctaattcttttgtatttttcttttttgagcagctaaatatgaggaagatttttaagaataaatatcctcggctatttgaagagatagacttagatgaaaaatggttaccccttatagattacttgagtacatatgggcttaaggaatcacacttcattcaaatgtatgagaggcatatgccttcccttcaaataaatatatgttctgcacaagaaaggttggagtatttgattagtgttggtgttaaacaaagggatgtaaaaagaatacttatgaggcagccacaaattctagagtacacagtggagaacaatttgaagtcccatgtcgccttcttgacgagtttaggcatcccaaattccagaattggacagataatagctgctgctccttccctcttttcctacagtgtggaaaattcactgaagcccacagtgagatacttggttgaagaagttggcattaaagaaaaggatttaggaaaagttgtgcaactaagccctcaaatcctggttcagcgtattgacatatcctggaatactcgttatattttcctttcaaaagaaataggagcatccagagatagtatggtgaagatggtcacaaaacatcctcagctcctgcattacagcattgatgatggattattacccagaatcaatttcctcaggagtataggaatgaggaatgctgacatcttgaaagttataactagccttacacaggttgattttatttcattttcacggacattttcaatacttcaaattattgtccttgtgttctgatgttatcatatttgcaggtactatctttgtcacttgaggataatttaaagcccaagtatttgtacttgatcaatgagctgagtaatgaagtgcactcattgacaaaatatcctatgtacttaagcttgtcgttagaccagagaatccggcctcggcataagtttttggtttccctgaagaaagctccaaaggggccatttcctctgagttcattggttccaactgatgagaacttctgtgagcggtgggctggaactagcttagacaaatatctagcatttcggcagagactgctactcaagaagtttgcaaacaaatatgaaaagaaatactaatatcgtgatcggaagcttcataagatttactgactgagtttgaagagcagtgttaattgcatcataaatttatttgcccttttatttataccagggtgaaactgtatttgaggtttcaaattgactgctcagactatggtttcttattattaagcttctgttcagaacatcatcaggttactcaagtttatgatgattgcatgacattattccagagctataacataatgtagaagatgctccaaaccttcctgaaatggcccctaaaaaatatttgaagcagttgattgttgcagaagctgtcccccgccaccggtgatcattaaccaagttactaatacagaaataaggtgaacttctctactattaaatcatctatggttggtggagtgaatgaaagtaaagtcacatattaacttgcaacagtattcacttagtcattgtgcatatctctgtctgccttggactggagtgctcttctttgatcatctctcctttccactctgctattataatttgatgtttttatcattggtaatgcaggtctggccaaattactgaaaatcatggtgacaacttaacagaaagctgtaatgactgcaaattatgttgtcatgtatgcattaaatagtttctgaagtattcattataatgtttcttgaaattcaatataaatatgttaggcagtgggatatatttttatatgtaaattctttccctgcagagacagtaatatatctttgttatacctgttcaccctcgaaatacccataagagttacatatcagctttataattttattcgtctcttctcaatttattgtaatgaacactttaaacagaataatgcaatatgttctatatcaggtatttttgttagctgacctggaatttttttccatctggttaaatatatcctgtaggatgataagcatacctgctctgctgtgattactgattagttactaaatcgaagatttggttgaagctcattctggtgatgcatgtag

SEQ ID NO: 186178 - DNA, 1870 bp, Cannabis indica
taagcctccaccattctccaacaaggattaaatgattcactttagctccatatagtaatggcagagaagacagttccatgtcagagctcctaattggacttgcaatttcaaacagaacaactgcaatgtttatggaagccaatgtacttctgcatatccaatattttatcatcagaggagataatcacaacaaattaatctaaaaaataaaaattcacttaggtaaaaagctgagttgttttacattaagtacagatcagagggttcatcttcatcatcatcatcatcatcttgttgtagcctttgagactcctttggaccatgggaaccaattctagttcctttgttcatgtaagtcctcattttcatatcttctttcctttcatagtcttctttgattgtatgctgacattcgaaagaagacagtgttggctcagcagctgttgaacaatccttgtcagcagagctttcatctgtcattatggttgtgtttggaaacataaataatgtgtaaaatttaatactaaataacctcgtattttcacacctaaaatacgatgtttttttcttagaaaagtatagtgtgtttacctttatcaagcttgtcaagataagcacctagaatatccaactttttgtttgagcacaattgtgtttcactaagtggtttgttggaagactctgcagggttgagtaacttgagtttattagcatcttggagttttccaaagtaagaagacaatgatctcagttgtttctgattagcacaaaagattcccacatgagatttggtttccgaaatcgatcttagattgtgttggaaatcactccttgtctgcaaaagaatcggtccttttatgttggaggaagagctccacttcttgtagatgtatacagagaaaagtttcacactatcacatgttatcatcatgcctctctcgttgtgtctcattagattttgaatgtgttgagtttggtttctgtgaggcattttgtagcatatggaaaccacagccatgtttatacacactggaagaaaaataaataatagattaaggattgagtgaaaaccacagccatatcgattctcaaaataagtagttcaaagttttagttcccaaatacatatatagagaaaaagaacactaaagttttaagtacctgaactgatgaaatcacagtgtgtgatggtgtctctctatgggattgggctagtactattggagaactccattatcagttttcatgaaagtgagagagagagaggtctgttcctaataatattagtgttacaaaatcatcacatgagaaaagtaaaaaaggattaagaggagaaattaacgaaatccaaataaatccttcccttatctaagttggtccattgagaagctgccatatctgattaacaaaatctaataagaggtgtaaatgtaatgtggtggagtggaacccacttggggtgattttgaggccccaaaagaaacacaaaactagtatcaccacacacacaccattcaattaatttcacatcaaatcttcttcaaaaagaaatatcacacacgtgtaacgagttacaacgttaaattttcaagttgggtgtcataaataatgctcaaaattgaataataatagttcaaaaatattggagtccagtgtaaggtagggtatattatatacagacctaatatctttaatgaaatgtcatggccgacatcaaaaaatgtttttgaaattaaaaggaaaattttactttttatgattaataaaacacctcatatcaattttgactccctttattaatttgtaccaattaatttctttgattacacgaattttccattttacctttttgtttttaatgtaattttcg

SEQ ID NO: 186179 - DNA, 3388 bp, Cannabis indica
aagataataaaaaaatgtaccaatgagtatatcatacaaattatgatgccaaagattgataaacttagtagatgtgtattaactactcttagcgggcaacctgggtataatagcttcactgggaagagctgaaatgggcaattgcatccatttcctgctgcaatagtagagcatcaataaagatatccagatcatccccctgcattacatcatctattgcatgacaagttatgctgacacggtgatcagtgactcgcccttgaggaaagttgtatgttcggattcgttcagatctgtccccagtaccaatctgcttaaagtgatgagtgtacaacaatcaccaaaatcagaagcaagatttaaccaagttttttatcaactttactctctgttgtttgttacctgttctgaccgaagttttgatctattgctatgaactctagacctctctatttcatatagcttcgcacatagaaccttgagagccttggccttgttctataaagagaagattacataatattaggaaaacataccagatagaaagtggagttaaggagccactaggcatagtgatagacaattgtaggattttgaagaggtgcagagacataatgtgtaaatcttagtgttgatggtgtggtttggtattgaatataagattctgtataaacgtatgaagaaaataaaaccagttgcaaagttcagaatgatctaccatgtgttgggaccgttcatcttgtatgttcacagtcaacccggatggaatatgagttatcctaacagcactgttagtggtattagcgtgctgtccacctgcaccaccagacctgtatgtatcaattttcaaatcttcattcttcagctgcacatctacctgcaagtcccaaggtacgcacactaaatataacgaaaaataatgataaaattatcaaatagtcacacttcgagtgcatatggtgaagagaagaattattgaaatagtaatggccaaaagtttagtacttcatcagcctgaggtagtatagcaacagaaacagcacttgtgtgaacacgtccagacttctcggttacaggaactcgctgtgaaaaggaaatatgagtatttcaaaatagaactcataaatttggagcgaagagaggcaatatgatacctgtaccctgtgaattccactctcaaatttaagtttcccatagacatcagcccctgagatagccgcactagcttcctgatgataagtaacaattacagacctttcacaaatgaaattatgacagcaaaattttgatttcaataaaccaaccatttagaacagaaatagaattcagggtcagaccttataacctttaagatctgattctgtaacatctaccacttcaaacttccaacctttcttctgcgagaatctctcgtacctgatgaaacaaattgagaaagtttcaaaatttgaaatcattattagatgaaatagtatacaaaagctaaaaaggcagtgctttaacatacattttgaaaatgtccatggcaaacaaagaggcctcgtccccaccagtgcctgtaaaaattgatcattttttataatagagaatgacacttagccatgaaacacttcgagtaaaatcaacgagtttattttgttattttcaagctttcaaattgttattttttgtttagcaaattacgtacctgctctgacctccaaaatgcagtccctctcatcagcatcatctttaggaaggagtaacttcaacaataaattgtgaagtgttttctcttcttccaaggcctgattcagttcatcattggccacagtaagcatttctttatcatcagaagattcagaaatgagtgacctcaaactacaaatctccttctgcttggaccttaagtgagaaatgaggtccatacaaggtctgagcttgcgaagctccttattagctctagcaaactcagttggggaagcttctggctgtcttttcagtaaaacaaactcagaataactacaaattaaattgaataggataggagatgagtggggtggtggcttgacctacctggttcacagcctttttgaagaaaagcagttcggtattcaatggccgaaaacctctgttccatgatcctaattagattgggcgatatgtgagcctcagcttgggattctgatatgcaaatcactgagaatccatgatccataaaaattgtacaaagaaataaaaaaaaaactaaatgagaaggcgacgcaccggttgacgatgaataattaagtgtagccattgatactgccggtgttctcttgacagtggtagagaagctcccgttgccgaagcgcaggcatttgagctgaagcagaagttgatgattccttctcattctttgaacctcgtgagtcgccactgacgagccgactcacaatcgcagaataccaaacaatttatttatttatttttttgcttaaacaaccaagaatgaccaacggaatggtcatatttctaatattattatttgtgtaatttaatattaaatttaatttattttattttaataagtattataaaaaattgctaactaattataaaattaccacataatcttgactctcttcatcagctggaactgggatcttctcccacaaagagtactttagaactttacagtcacaagtgaactcgtccgagccaagaaggccaactgtcctcagatttgcctcgtttaataagaaattagctgatcgcaaaccaaagggaagacctagtaagattttacggcattcaaccatttcagcggtggggattggtcttctggaaactactgttaacgcgataaagtaataagtaagcgaccttaaagtcatagaactcaaaaccaagtttttgagcgaaatgttgttgtgttgatgggggaaagacccgtagtccaaaagaactcattcttgaactcggtcttgtttggcagtctcacaatgatccttcgatcatttgtgtgggtaccgagataataaacgccccctgaacatctcttcctcgcaggaacgactttgacagagtaaaaataaactaactctaggggagtgggacactcccatcctaggatgtgatacagaacatttaaactttcaagaattctgtaaggactttgaatcagctgaaaggggcaattccaagataattacaaaattctttgtagtactgtctcaggaggagaactgctccaaccctaatgtgctcgaggctccaagcgcctatcccagacgagccagtagtactagcatcaccgcactcctcgcgaataactcttttaaagaatacatagaatttttactccttgattatgacacttgtaggatttttttctttcgaattattttttgtaaattttcccttcaaa

SEQ ID NO: 186180 - DNA, 2161 bp, Cannabis indica
gcactttttaatcactcactcactctctctctctttgaatacactttacaaagtatccctacaaaattatatttaatttaaaaaaaaaataaaaaaaccaattagaatataattttctgacatggatttgtgtatcataatttttctttgtcttatgtgaggaatcacaaaccacaaattgaaatgaggttcttcattaagaaccctatttttatatgagataatatgattgaattttttttaataaacatgtatgcttttttttaaattattttagtcagtttatttaattaaagataattaattaattaaaaaattaaaaaaaaatataaccatataatatgataactaataaaaaaatgtatacgcattaaaataaacattttttagtttatagtatatatataaatctatgtaatttttatagtgtccttttggatctattgtcgttatgctctaactatcaatcatcttcaaccttaaacgcttccaactgctgtcttacccagtttttttgaaattctgcttacataactactctcgcccaccttcctctgccgcctctcccccataaccaccactaaccacggtggtctccttcctttttcttttctttttcccttccttgccatgcctgctgcaatggatcctctctccaatgacttcaattccacactttcactcacaaaagaagaaagctctattcttacactgcctgacatcctttctaactcctcttcatcacaatctccctatatccttcttgcccgtgtactcactgaaaaaacaatctataagcctgctttttatgatcaaatggtcggtcattggaaaggaagattctctgtcacaataactgattacaaattcgagatgttctacattgctttgggttgtgaaggcgacaaacgtcaggtccttaataaagagccttggcactttcagaatcatctatcatcttatatgcgtcaggtgctctgcaaaatgtcacaaaggaggatatgattttcaccactttctgggttcagatttatcgccttcctttcacccttggtgactccatctgtaaatgtctccaacaaccgctccacacatacaccttccattggccacttaaacccctcattttcatcctctcttgcatcacccacaatgacaaattctacccccaccaatactaaacagccacaacaaacttcagatcatctcatgatctaacctactcatactactcctaccataattgatctttcacacatttatataccagatattagaactccaccattggcttcaaacctttttgcaacactaaccccccccccccccccactgtcagttccttgctcgtgaacccacccacaaagccactaacttcccacatcccaacaactcctcaaacaactttcacaccagtaaaaacctttggttctactggttttctgcatcactcaggtgcgaatcctgatggaaataaagaaaattcagaacccaaccttacacctaaaagcccaaataacaccctctctatgagaaagatgcttaagcgatgtcgtggcctcaatggatcaacctcttccaatcagtcaatggaagatagtttggagggtcaagttggattctagtctctcgtcggactcttttgtggaggttgctttgcaaccccacaacgcatcatgaaaatcataagctagaatacacggggcttggggaacccgagtgcattacgacatctctgattgcttgttcaacaacaatcgtcccatgtttcgtttctaatggaaacaaaactttctcttaactcaatttctagaatccgtgaattattacattactcaaatggtctagaagcctctcggattggattaagtggtggtcttatgcttttgtggacagaagaagtcgatgttactttgttgaatattggttcaacattcttcgactgctatatgaaattcaatggcagtccaagttttcactttacaggattttatggggctccggatgttgccaataaatcagcttcttagactctctttcagcgttttggtgatgttgctccactccaaccttggcttgctattggagattttaatgaaatttttttctaacaatgacaaattgggggaagcttgaggcgtgaatcccaaatggaagcctt

SEQ ID NO: 186181 - DNA, 3743 bp, Cannabis indica
ctactgatgaagcaaccaaaataatcacatacctttagcaatttattcactgaatcgaaatcactataaatcctattatgagagaaaaaaatcattatgggagttctttcaagcaatagtttttcacttccctaactttatgaacatatctgtatgatgtcattaatagcattttttccgagtgatcaaaatgatacactcaatgttttaatcaatggcaaagaagaaaaaaacgacactagaaggaaagaggaagttggttgcaagatgttttatactgactctcttacctcccaaatgatggcagatcgatcatttgatgacgaggccaagtatttcccattatgtgaaaattgtaggaaccacacttcatcactgtgggcttgtaatatctgtatgagcggaagcagcatatgatatctgaactcactattctagtgatacttaacaaaattccgaactttatacatggaagaataattgaaatgaaacaaaattattaacagaaacatgacaaagtatctgtaagccactaaacatgtttgtaccaaaaagagaagtaaggaaattgaacaaaaggtaaattaaatatatttcaacagagagcaatttgggtagggggtgaggggagtaggtcagcttagataatacattcaaatatttaagtgcaatcttgtgaagtcttgaatcttatttgctcttagtagttccccgcttaaaagttcaagacagcattagattttagaccaaacactaaaaccaacatttacaaacactagatgtttgtaggtacaaagataacaatccaaaatcagtaaaatatctaacctgtagtgttcgagaaggaatttgttcgctaccacacctatgatcagtatacagtgacatctgttcattcacagaattgtgaaaaaagcaagcatctttttgcaaaacaagagcctgttcaacaagatgttccaatcgcctttcaggtatcataattgttgggggaagcagttcctgcaattcctctagaagctttgttcgagacttgagcctaacattatcttgagcacgagaacccaaaagtgaaggagcaactaagcacgaagagagttcatgtactctaggaccattaatgcaaagaggtgtaatctcagtccgcaatgtcttcaatgcatccatgagtttgtcctctttcaaaagttcaagaaacttttgctccagaatcagaaaggaggctgatttaatgattttttcgtccagttccctaattttgtgcaatgtattcacactttcattccaatttccatcaaggacttgctgcataaacagattaacaacagcagaatgcacagatattccagactcttcctctaagtgagcaccacttttcttgtaaccaagcgaatataatgccttggctattattcggacaaattccaccctcttaatgacacctttggagccaacaacctcatcgtcccctgcggatggtaggggccgagccatcaagtctcttgaagagccagctacagggtcaataagagatgtaccgttggaaagacctctcagttctccagaggataatttcatgcgttttgtcgctggttcttcatcctctacacctcccatgaaatgtgcccctcagcccatatattactaaatgggtagaaacaggagggctggaaggatgatatttcagaaatgtctatgaaatgagaagaggaagacaccctgaaaaaaaatataagattgcaatgatcataaagttcccagcttttcagggaggactacgaagaagtagcatgaacaatgaccaaaacatcttgatttttctacgatcttctttcaacaagcaaaaccgtatatacatatatataaatgaaaacctgacttgattatccaaaccaacagacacaaagacaacaaacattcatgtatgaacaaatttgtgaaagaaaaaactcatgcacgcgccatgacacagaactcataaagattaattcatgcaattaacaaaatcttttagagaagttgcaatcaaaaccaattataggcagattatcaaatgacaaacttgggtgcactttcagcacctgaaattcctaattctggagtcaactaaacctatcccacaaaaacctattcaaattccaaatcatgagaaacaactgctactcagatgaatgatatgcactctatgaagcataatgtacatcatcagtacatgaattaacaatcaatttacacatgtaacctagaaacttacacaattcattaacattagtgataactaacataaagagcagaccaatttggatacatataggtaaatactcatacacacaagtacatattcaatcaaagaaagcaagcaacaaagataaattatgttaatagcaatagcacaaatcttaaacaaacattagctaaaacccacatcagaaagaaacaataaataaagaatccagctaattaagcaattaaaaatcagtaatttagtattaaaaaaccgacataaaaaatccaaccagaagaataaatctgaactaagaatctatgctaagttacaagaacacacaaaaaaggcactttaaaatgaaagaaaaacaaaacccccaaaattataatgtgttaagcaaaaagtaaagcaaatcaaagaaataaagtaaataataaaatcaacccatttttgagcagtggcaataaattaaaataaaataaaaaataataaaatacccagaaagcgattgttgtttgggaaacgagtccgatcaatcggcaagagctccaagaacaagaaaagattgagaatcgaacaatcaacaatggtaaaaggatttagagcaagaagtaaagggctttattgtgggcacatgggaagtaatataggtgggcaaacaccaaattagatgaaaaaaaaaataataaatgagaaaagaaaattaaaaataattctttgtaataaataataataataataaataataataataatatggtataggagtcttactatataatcaattagttatccaaaggaatgaagaagaagagcatttggggtaccttgtgggttagaacaacacaactcaactcagtgagtttctctttgcgtggaggaaaccaactcagtggggttattatatgtagagattgttgaaggaggagaatggagatgtcaagatgggtttctctctctctctatctatacttctctctcagaaattcttaggattgggctttgagttgggcttggtcttttaaaacttcattcttcttatctttgggctcagatcctatatgggccattggcctattcctacaagcccaatccaagtcacgagcgggtgacgggtcgggtctgttggtatttgacatcacaacagaaattagtcaaaaagaggttgaagtttaggatatgctttgtaagagaatattacatccctttactaccaattgccacacttcttttcttggaatcagtctatcagattagatatgataagataaaatctaaaagtaaaaaaaaaaaatcatcaaatgtctgcagaaaaaaaaaaatgttcaaaaaaaaaaaaaatagtaacatgaagatgctctaacaaaatataacctctgatacttattaaaaaaattaatttaaaaaactttaagttaaatcattttattcgtttactaattactaaattttaagttctcttcttcatgaattaaacaaacaaataacacgagtaaatattatgtttgatgtgatt

SEQ ID NO: 186182 - DNA, 2137 bp, Cannabis indica
aaaaaaaaaaaaaatgaaaaaaccttttcttttttgaaaataatattttgttcctaattaagaaagaaactaattcattggattatggaatgataatttgtacaagtcattccaatatttggtttgtcaatcaaacaattgaatcttaattccaatggaataattttttttattggaaatctcaattttaaatctccactattagaaaacttattccattttaaaattaataaaataaaatttcttcatcactcttatattaatttaattccaaaatatataagcaaataacattaatattctcgttactatattaatttattttattatactattattctaattcattccatcttaaatatatataactttagatttttcaagcaatgtaataaatatttatgaaagtgttacggttaacctcttattaaaattttttagttaatttttgtgttgaaaatacatgttgaaatattattttttttttatttttataacggtatttgttatactcacaacatcatcctcgtgaatttttaaaaaatttacagtgtcgaaaataaatttaaaattttttaaacacgtctggtaaattagaatattaaaaactctatttccaggattataaattcttcgtaattttttaaaaatttacaaaaataatattgtaattataataaatactataaaatttgataaaaaaaatatttcgagatataatttcaaacctaaaaattaattaaaaaattataattaacactcctctatacattattatatatacactttaagtatagtttaagtaattcaattaatttaaattgtcggtcgattcaaatcccataacatgttatggttatttatttttatttctttgaggagacataacatgttaaatttaaaaatttattttttattttttaaaaaatttactttattattattattattattattattattatatttttggatgaaagctttttccctctcattgacaaaattgattgctttctttagctttatctgccgacacaaagcaaggccataaaaggcacatatataaataaatgtgtttatatacaaatatataatatgaaaccaacaactccaaaaccccaacattgaaatttattttcataatattttctatacacaaaattttcaatttcttcttctttagaggcttttctttcactccatggatatatgtcagaatgaagaacaacacaataataatctcagcctctacagctcttcttcttctagccctgaccaacttttctcttctcaaaacatggtacacacttttttcttcttctttattttcttcaattattgcttgaaataataaagttttgatttttaccaatttttgaacttaaattgaaaaagggtatttttcaaaatctcaacaggaagaggatttaagcttagaatggttatctgtgtttgttagaagattgtttaactagctcaggtaattgtctcccaccacaaccaactaacaacaacaaaaacaactactaatagtactataagtgtacttgaaacctcaaaatcttcaaaaccacttgattttcacaaggcccaaaagaaacccaattcactactagagacccttttttcaattccaagcaaagctaggagcaagagaaagagagttgttttgaccaaaagaagagaccctttgaccatttggtcaactctaaaaatgcccaaaaacactactactaattttgagtaccctcctctactcaaacaaacatattggttatgtgatagtgagttaattgtgcccaaaaaagatgtggataagaatgaggaggagagggagaaagagaatggagatttggtcaaggagatagatgaggatggggaacaattgggctttatggcccatgggcttgtggcaaggagatgtacccattgcttatctcagaagactccacaatggagagctggcccattgggcccaaagacattgtgtaatgcttgtggagtgaggtacaaatcaggtagattgttgcctgagtataggcctgctaaaagcccaacttttgtgagctatttgcattctaattcacacaagaaagttatggagatgagaaatgggtcttagatgattgatggtagt

SEQ ID NO: 186183 - DNA, 6988 bp, Cannabis indica
tttcttttttttttttctgaatttccaataaaatatatttttgcaaacttgtaacttacagtccataaaaatgaatattgaattatctctactccaaaaagattaattttacattaccatttagctttcaaatttatgaatcataccctcaatttgtaattaaagatatgtgccaaatttttatttgctagtaaaatacaccactaaattttattatttactctgatcaatgtgaaaaaagtcactaaatagtacaaaactaaagtaattcttttaactacaattttaattgtcactttggttaaatgtatatggttttcatttcaattttaatttattatatgatttaaaaacaggattgagtctctgatttatatgatcttaatatttaacccatacatcatttcttttaaattccattttccattaatctacaccactttaatgttaccaaaataaatcactgaatagtacaaataattgtattcaagcactagagtaattttttcccaagagacaagagtcactttcctcattattttgataaggccatagattattattgtcaagtctcaccaagaccattgtgatttcaatttgaatttattaattatttttaaaaatagatttgagtttatataaatgtggtttttagtttggtgttgtgatgttttttcagtttcactagctttggcaacaactataaataatgggaaagtatttttttcaatgtgatgggatgtttattgaagttgttataattttgttgtctaatatccgaagccagttttgtcctatgtgacccgcgatataaattttgcagttcatgatttgacaaaacatatcctttagttagacaatgaattatccaggttcactgagatctactaccgattatagtttgttgcattattaattatgtgtgactctggttcaccacgtcaaaaaaaataataataataataacaataaaccatacaagcttccttaaaatagatatgtacatatttatattttcttggaataaattagtcgaataaaggagaatttgattaatataattagtatttctcatctgtactaagactaaatttaactcaatgatgactctcatataataatttactaaacttagcattaacaaaccttgttaaccccacggcattcctcgtagcccgcaacacagcctgtggtatctatctcctcatatttctttattgttcataatataaactcacaaacatcaccaaacctcgttacaaatcaacacaatcatcataataaccatcctcgtactacagctctgctgtttctctactctgccttagagaaccagctttatttcttagaaaacaagaaacacaatggcacgccctgttgttatcatggctctccttgttattgccttagccgggttggtttcagccgatgtaaacagcgaaatgatcaagggtggcactggtgctgcagcagcagccgcgcctctcccagccgctggaccctcagacgacaatgaaattggaaactcggatggagatggacagagcgacgacgatgtggttgaggcccccattggtggacctgttcctcctggtgcattctctcctactgattcttctccaacaggtggagcaactggcctcgtcgcgggctcagctgtctcgggtgctgttgcccttgttgctgctgctgctgctggcttcttattttaagcaaaattttatatacattttgcacattcacatgcaaatattactcatacctatacttttttttttaaactcttgagatcatctaatatttactgtaatctctgaaaatttgttcataattactagtctctcaaaacattatatgacttttactcaatagtgaaacatttctacaattttgtctaatgtcatcagcagctggctacgtacacatgaatttgattactgtcatgaaatataatcatgttatgtgatgaaatattccataatccaatatggttaaataacacaaattcaaagttcatgtccttgtaaaaagataccagcaaagaagttttagattcaaataactttgtaagacgaaatattcaccaaaggcatttgaacaagtttaaactatcctataaataaaagggtcacaatggccaacaaaacaaggtggtaatgtaacaagtttgcattaaaaagagaggaataccaaaccagttaaatccagcctttttgccatgactaatatcaaagattgaaaggctgaaattctttggccaaatgtgtgaaacttacatttcatttaaattcaaacaacagcactaaatctatttctatttcatcacccttgtctacatgaggaaattaaagaccaaaaaaaaacaaaaagagagacctttcttcatttctttatcaaccagagacaaggcaaggcttttagtgtgtagctcctatgcaaacttccattaaggagaaaatattcatttcagtcttctaaatttacagagaaactacaactcataactcttgaccccttaactcaactacacctcatgttactatagatatacaccaaaaatatgggaggaacattaagagaaagtgagactacatatatccctcattgtgtcaaattataatttacatttagcctttttattaatgacacaaaccttttaatgcaagaaatggctcttatttggggaagtacaaaaccagtacaagacttttacaagctctttgttgagcccaatacaaggggaaaagaaaagcaagaaagagtgttgttacatatgaaaactaatacaaatcattttacactagactatacatgagaaaattttcattcacatatgaacaagctcataaatagtctttctagatgttgtgttgcaggagcactactagtacatatttttaaggtggtcttttagaaaaacaaggtgaaattgaaaacagtcaaaggtttcttaacacacacttggcagatccaatccatcactagagaaatccaaataaaggcatcccatgtaataattcttccgccatataatcagcaaaggctgattcattcattaaaaaaaagaatctcccaccctattccctggatattaagatcagaaggatattagagaaattctctaaaagcattccagtaatcaaccctatacataaatttacaagcatgaagactctttttatcataaaacttgaagttccttttcttactttttctagtgttttgaccttaggtgactattaacatatctcacaatagatgtcgaaagccaacttttggtcaataatcaaggatgacaagttctagcaaatctttcagtgtaaaactatgatctacatgacctgcaatccacatagttctaagccatacagtatatgcacacaagcaagaaacaaaccccacaatgcagaaattagaaaagataaatggagagcagaaaacaaatgacctctcatagtatattcaacataataagtttttagagttaatatcacaagcacaacaaagcaattgtgttgaagggaggaaagggtaaaacagtttttgaataaatggaataagctgcagggcattaggaaccaaaccccacaaactttatcctcatttatatgttactgaaacttactaattgtttttatctcacaatatgagctatacctaattcatttgaacagtaggaaaaagatcaaaaaaaaacatcttttcatcctatccatccaagtaaaacttacttctaagccacattggaaatggagccatcaagatccaaccgaagtgatgtagacgcgcatagatatccaaggattgacagttcaaattccagggcatagattttgtgggcatggtaaaatcaaattactctgatggcaaacgtctcctctttccataatcaacatctcttgagcgagaccgttgatgatcttctggcattactcttgacctactacgaggtctagatgaagaccgccctttgtcccagtcattgtcattatccaattcatgttctcttcgacgatgatctcggttgtacccatctttctcttctctgtatccatgctcccgctgctccttttcaggtctgtcccagtcctggtctctttcttcatgatgcctccgctcacgatcagatccccgctccctttccctagaagcaacacttgaccttactcctttttcatggtttgcttctccatacccatactcagaagcaccatcatcaccaccaccaccaccatagcttgcttccttgctccttcgaacttgttcgtctcctccccatccacccatgctagtctcgttccacatccctgcatgatgcccatccatgaaaggagaacccatcatacccattccattatttgtcatacccctaccaaagaaggctgggtttacatgtggagccactgcacctagtcccattgtgttaactcctggaaatgaagaaagcattccagggtaagcatgtcctggaaatcccccataaccacctcctctactcatatatgactgatcaaatccagaacccatcatggcctgtggattcatcattccaccaacaggacccccgaaagcatgtcctccaagaccctgcccatatccacctactccaccagcattgctcccaagtccaaccatgttcttagcacccatagcccctcctccccttcccctcattaccccaccacctcctctgttgagtattccttgcccacctcgtccccatccaccccttccgaaattcctccctccatctccactttgatggttctgattgccacctcttccaacaccatcactgacaggccttcttccctgcccctggggaggttgagactgattctggacttgattcttgagcagctcccatctgctgaagtgtttatgaagtagcaaatgccacaacacaagctcttccattgaaaacttgaccatgcattccttccttgcatgcagtagctgatgatgaatcataaaactcaacttgacaatatccttttgatttgccactggctctttcatcaaaaaacttaatttcctttactcttccatattgagataaaacattttcaagttcagcatcagttgtccaccaattcagttccccaacaaacagcatagttgaaccattctccattggtggccttatcagattttcattaaccgcagggtgtttaacgcttaaatccacattggtttgattagcagtatttccagaattcagtgacaatacatgctcatttgcaacttttacaggaataacagatgaatcaactcctgcaccatgttgtatcaaagatccattagccccataattcttcccttttctgagactgaagcagctccattcgggtacaacatgaaaccaacttttgatttattatcaactgcaagtccctccttttggccaggaatttgagaacttgtactaggatattttccatctgttgaaacaccaggaatattcggttctcgagataccccagtttcgtctcttggtaaaagaaaattagtcttctgagcttgaagccctccattgctgacaccaccaggaggaagtggtgcctcagactggtgcaactgcatgaaaccatctccaatgttaacatcattatagagatcatcatattcatcatcttctcccattggttcttcatctgcaagagcagatatagctccactattaccctgatactggagcttttgaagtcctccatactcctcgtcttcgaaatccatttgctcttcactcattcagcccattaagactgaaaaaagtgagatgaaaataaagaataataaataaaaactccatatatatatgatacaacataagcaagaacaaaacaagtatatgaacacaaaatctgtaaagtttacatggctctactcattgagagatgataatgtcggacattcacaaaattccacttaagaccaaaacaagaaacagctaaagaagtggacaataatcaaaatctagttaatatgcacatgaacttcaaagatctgatattgcttcaataaatatgacctttttgccgttttttctgtaacttacttaataagtgcatgaaattcaaaattttcccacacccacatcaacaatttacctctctaccaaaaatcaatacatccttaaaattaaaccacaaaaagtcagaatcacgaccacaccagaagaagaaacgagaaaagaaaaagaaagaaaataatcaattccatttcacaatactgggaaaataacacacatattcaacatccctcacatcgtaaaacattatcaatccaaaacccaaatcgataatctgagcccatcaaccccacaaagcaaggaaaattacagagacccacttaccaaccgacactttacgagcattggagttggagactgtatcaaatccataacttagcaagcaagaaaaaacaaaaaataaagataaacacaagatcaggttggattggattttattcttgatttgctttaggtaagtagtcttactgtcgttttgttttggtttttgtcttgtgttgtggtctgagaaacgaattagaagcaactttaatttggttgatcaacaacaacaaaacaaacagtaaagtactgttctttatctactagtattatttatctactgttcaggtattggtacagtgaattgagctcaaacccatatggatatatatgtatatattatgtcatatagtctcaattgtaatagaattttcctgttttcattgcagagaaagtggggttatgttacaatgccttgttgtaagtaatgcaacataaaaagataagctttccttttcaggtttcaactgctaacattgacctttgttcttgttcagttgttcttatgttatgttggtgttcggtttactcttcatactcatgtttttcaaaatgagatttttcattaaatttattatttgcttttaagaaaagggtaaaattgtaaatttatcatcgttttcatttcatatatca

SEQ ID NO: 186184 - DNA, 2148 bp, Cannabis indica
aagtacaacatggctgctgagaaagagctgatcaagccaactaagtatattcccatcaaatggtaaatggcctttgccagcaatggttcctgaaaaaatcataataatgacaattttaatatctttcaagtaaaaactagattttttttgtatggttagcttagaacttgaatgaacttacctcgggaagattatcacccttgacggatttgattacatgcttggttccagttttttgcaaagctaagacatcgagttcgtcccccacaacactgtccttctggataacagcataaggtccaatacacgaatttcggccaattctaataggttgaaagcttaaagttccattctttacttcatgactttgaatcaaagcaccttctgcaataacagctccatctccaattgaaaccaaggatggatcggtgatgtcaactgtgtcgagcaaaactgaagatccaatcctagctccaaacatttcaaaccagtatgttaggaacactgtacctctaagatgttctgccagaatcttggaagaaacttcttgggccttgtacagtgcccaccacttaacaaaatcaactgaccaaatggaaagtttcggactcatggcatagtttggtcttaagaaagaatttccgaaaagagaaatgcaaaggcaagtggaaaggatgcaaaagatccaacaaagaggagcaagagtcaaagggattaaatagtctaaccagagaattcctcctgtcaatggactgatagctgagatagaccacataaaagtggaaagtgacaaataggcaggaaagacaagaagaaaagcaacataaacaagagctagattttggagaaaccagatttttaactggtgagacatagaaacttccatgaaagtttcagcataataatcaatctcctgctctgaaacatgagactgattgctcatttgttcaggttgtgacttgagcagtagattctctgaaaaactcgccagctctgcaatgcaagaggctgagaaaatatctactgctcctactggaacaccgaggaaatctgaaagtttttgtgcagctctaacaacaccaattgagtcaattccataagagactaggttctcagtgacagagatgtctttgatggatataccagtttgttcagagactactccttttaaaaactctgcgatttctctattgttgagtataggactcggtataggagaactcactagttgagggccgggggtcgttccatctctgcatgaaccggtagtgaaggatcgtttaaagatcttttttgaaataattggatctggtactgcattcaatgtcccatcagtaaactgtttgaggcactcgaatctcttgatctttcctgatgtcgttttgcttatggttctaggcttaataagcttaacagaagcaacattgactccatgttcttctgcaacacgcaatttaatgttatcaacaacttccttgctaacaggttttccatctttaacctcagcaattataaccaaaccaacatggtcagagctgtccggaatagaaatccctttggttgataaagtttcctcaggaacaccaatcacagcacaacaacctggacgtagaagttcggatgaactctcaactgtcttctctacatcagctgagtaaatatttcttccagctacaatgatgagatctttaattcttccagtgatgaataatttcccatcaattactcgtcccaggtcgcctgttctagtgtatatacgaccaggatgattttggagctcatttctaaaagtttgttggcttaattcttccctaccccaatatccaattccagcacttggactactaatccaaatctcaccttcctttccagtggcttcaatctcttcattcatttccgggtcaacaattctaatatcgacgtctgcatcattgggaactgcataaccacaacatactcttccttcccaatccaccaagatgtttccttctccgaaagcacaactaacaaagacacaattttctgccaatccataaccaggtgccatcacttcttgagacagaccaaaaggatgagtgagctcaataaattttttcaaagtcttttgcctcactggttcagcagcaaccataagaaatatcatagaag

SEQ ID NO: 186185 - DNA, 3397 bp, Cannabis indica
taaggttttggttcaaattcatacacaagttcagaaaataacaaataatcacatatgttataaaaatactaaatctaacatagtttattttccaaggtttccaacataatgaaatacagtgtcccggtaggcgagagtcaaagataacattagttgaatagagtagtcagctcatctaaaataaaaccattttagcaaccttttattcgatcaaaatgagaatccaacgttgtcccggtaggcgagagtcaaggttattctcattttatgagcttccaccattgtttcatgttttatgagtttatctctaagtagtcaccgtaggggagagtctaatagagacgaaaactcacaaaacacttatcaaatgaaatcttacggtgttaaaagttttcaacgaataaccatccataagggggacgaagtctagcgtctcgaggttatattgaaaaaaatttaactattgtaagatcgaggttatagttgttagacatgtgtttttgaagtttgagctgttctggttagtttgctaagttaacttacaaatcttgattgcatgcctcaatcttacaaaattggattgatgtaatggcatagtgaacactgctaactgctaactgctactgctatagagcagtagctaatttagaattttaatgttgtatgtatagtttatacaaggttccattttttttttctttcactaaatggaaaaaataatagtggcctgctcagaggcattataataaaaaaaattgacaagtcaaatatcatcagcagataaagaaaaggcctaacagcagactgaaaagataaacgtaaaccatatgtatttttcaaccttgcattgattctagcgtggaaggaaaaatagtgactgtgtattaattagctgtgctgagcagtaggccagttacctaagtcagccagccagcattactcttagacctgaaaactacagagagagtgaaagaaagcattggtcaatttaatgatccaaaaatgtgattaagaacatcataaacaactcacctaatccaaaagaagaaaagaaaaggaaaatagaactgggacttcatgaatgaatggatggatttgatttttcattgtttaaatctatacatgaaatctcaatttgtcattcaaaatctgaattaggctgcagacagacacagtgagagttttaaaatactgtccttactctgataaggtaacagataattacgttactattctactacagtatcttgccttttggattagattaacaaaatggtataaggaaaatattatggaaactggaaatgcttctcattgtactaccattgtactaaataaccagatagatattaaaagacacagttaacaaaggagctcatctaattaactgaaatcacttatgtagaataggatgactacatttaataaataagaagaaaaattgcattccaaactacaatgttttcacattatattgtaaagcaaatcaaaacatacatgatacataaaaccaagccaaatattataagttgtaacaatattgcaaatgggactactttacttgtcacttttggactctttctttggaagaattgcagagaaaagggcctcaatttcctctttaattcgttgaaatacacctggacctttgacttcatctatctgggtattctcatcaatgtcatcactggttccatgcgtttctttatcatgggtaggggatttatgagcatgggctactgcctcaatctcttcttttgctctctccaacaagtttggtgcttttacattttcatctaccattcattacaaaaacccatacaatttaatatgcatttcaattttgaaataagaaattatgaataactttttgcttcaagaaatcccaagataaaagaagccagtaaatttcattacttatatacaattaaatcaagtattatttatgagcagaaaattatgagtacacaaaacccacacttcaataactactaaagatgattgttcttgaaaatatagctacacgcctatacctaattccaaaaacgttgggctcacatgtaggtggtatgttttacccaaaagccatcatcacaactaggtttaaaattgagtgataagaataataataatacctgaagtcgttggtgctgctttcggttccgccattagagtttatctatctaggaatataagaaagcgaatgttttagaaacgtttctttttaagattgttattgtttgagctaggatgcatccaagcagactttccgtggaccctccctcacctcgctactgatcatttaacgatggatttgagtaacacgtggataaagatcagctgtccacgtctctttagttcggtgtatcttaatcaaaagcattgctattgagcacgagtgatgcttaacactaatccgatccaatccaatattttttttttcatccgatccacgactgtatagaaaatttatagaaactataatatacacgactatttataaaaataaactaaaaactaatttttttgattggatgatattcgttaattgtactaaaagatcttaagaggtattatctttctttcattagttttgatttaatctatatattgaaatctttggacttatagttcatattaaataaaaattgcttccacttttataactctaatgtggaccataaaaaccgataaattcaccaaaatcatgcacaaaccaaaatttacttcaaaagtaacaaattcatggtcttctaggattaccttaatcttgataatcagttctcctcaaaaaactagctgaattccttgccaaaattaatttgagttgatctaaaaatgtttgttcttcttgggatttcttagtgccaaagggaattagggagagttaggagaaagaaagaattactttgagtgatgttaatcatgtttcttctaatttttaacttcagcataaaatctcttatttctctacaaaatacactaatttgaataattatcaaataaagcttaggtgacaaattctaaaaacgcccttaacatattttttttttttttttgagagtcaaaaaggcccttaacttttaagttatctttaaattaggaataaattggtcataatcaaatatcccgcataatttcgatattttaattatttataaattttaactcgctgaatttaagatgctaaatcgtatcaaagtgatactattggccaactgtcgaatttccactattatgaaaatactaaaattcacatataacatgtatgacacacttagaatttaataaaatctcaataattgataaattatatcactaatgcttatttttgataataaaacttttttataataaaaaatattaaggtgttaacacttttattttataatttttt

SEQ ID NO: 186186 - DNA, 4966 bp, Cannabis indica
gagagagagagagattcaaaccctaatttctgggagtgtacggacaaataaaacaacaaagaaccttctatttaattttaaaaccaaaataatttaagcaggataccaaaatgataattaaaaaatttaataataacaaaaaacgaatgataaaagaatatttagccacctatcttggttcacaaacctctgtcattctcttttggaatttcctccaagttagaccaagattacctcccaaaccgaatcactcgaccggagctaccttcgaaggcaaccccgccacctctttcttctcctccttctcctcaccaatgtatcaaactatatatcacaaagagagcaataaaatcgtttcactaaatacaagcagaaatgcaagaatgtcaaagcgagtaaaactgtgcaattacgacatgtgttggttgttggacgccatgtctggagatggttacagtttcttaggcaagttgtaggtcttcttcagaaatttggaagctgcatcgtcgttcctgtagcacagaactcgtaggagagtgtttggttcggttgggttccattgcccagaagtaggtggcagtggaaatttggacctggcagaggagccatatgtctctagtgtcccacgtcggaacctctcaatgaggctgtctgtttcggttctgaaaagtggaagcacccctctcacagctgttgaaaatttatcgattagctcggaaggcaagccatctccattggcccagaatagatctttaagggatttgaaatcatcttctattatctgagaatcttgcttggagaatgcacgagagggaccgccagcaagcaaaactaacaaaaaaccgtcaaaggaagctctcattatgtcggtaataattctcgtacgaactctctcatgtacagcatccgaaataattgacaaatttctttccagctcctgaagaaatggttcaatcctggcggaagatacttcaccaacatataaaccatcccacaaaacatgactgagatcgtggaaaacgatcctgtatgctactgcctcacaaagttgttggattccctcgacacaagctgctggtgagagttcgaattgtttttccaaaccgttagaaaaatcttctactttagcagactcagagttcctcaaatgagtgattacccttttctccaaaacttctaactcactcctaatacgttgtaatgtgtttatacgaacacagagctgttgaattccgaacgagttatctccattcaatgtagcaacctgagagtttctttttggagggtttggtgatttttctttcttcttgccaaagccttggaactttgatcctatagtacatctggtcaatgctggcatagtgggaacaaaagtatttcgtgatcctgcaaaaatcagaagaaacaatatcaattatcaaagtacaaaccttaatatgtatacagataatgatgcgatgtgtttgtctcatgatctataccacagccagattttgccttcgttatgtaatattgaaggcatctgtcaaggcctgtcatcaagtcgggaagcaatgccggatgcataggtattggaagccgaaaatatgcttccaaagtttcatcgaagattcgcaaaacttccacagctgagggagcatatccttcattatctaggggactccacacctataacaatgccaacaaaaagcttagcacaacaaacaaaaaaattaccccaaaagacatgcaatcattagaacttgtagttatcaattaaattgaaattcaggtccaaagcatatgaaatacaagtatactaatgtgtctgatatgcataaacaagaaaatttactgggattaaagagttagtttgagattgggagagataaactttgcatataggacaatataaacaaaaagcacatattgtatattcagtattcacctcacatctttcagttgtaataatttccactattctaagaattatgtttgattgatttgcaattgaaaaaagcataaaaactaatggtaacgcattggactcatcctaatcatcatctggaagctttcttaattaattagtttttacaatacctcttgctgtagatttctgtcaacccattctttcagtctatccactctggtcttgatccatattttcaccaaattggcaattgcagcttcggcctcaaaaggaggcatctcacgaattattgccttcccaccgtcatcactgtctactgaatcttcaactgctatcagaacaagatctttctccagcttatctgcagctctcaatacttgcacagcatccggtgtcaattctgttatacctgatatgaactgtttaatctcatttgcgtagcaaacgtgaagggtggcaacagccacacctgctgcaaaaggatgccatcttttcagaatcggactgaacattcgcttctccttcagtgctagctcaccaacatctttagcaagaatggcaaggattggaagaggatttggctgatttttggatgctctcctgcttgagtctgccatctccattctctgtatcacaacaaaacacaaatcatttatgtgtgaaacctaagcaatgtacacaagcagtggaagtcgctgcaaactaacaagggttttattttagaaagtccatttaattaaagattgtctttatccatgtccacctacgcaagttacagcacatttcagacaggaaaggaaaactatctacagtggaatgttggttatgtttcagttcataagtcaaatacctttttcttttctcttctttttttaaatgtactctatttaagtatgaaaattgagttctttcccacttctgaaagggataacaggctaattttaacactcctgtaactaattgctactttgcaaagtccaatagattttaaagaaaatgtttgatgacatggatgaggaaatgatacacatttatcaattccgaaaaaagaaaaaagtaagccaggctgataaacacatatatctatttacttcttccaaaaatcaatacccaataactccagggctgcataaatatgcaatactactaatgacaaagtctggtcttattataacaattcacacacttaatgaaaagggccagtgacagatagcgtaggacttacctgagcaaaagcagttcgtagagatgatctgatgtatgtgtcgatcctgtctcgagccacattaacttcactcttccttctccttcgatactcattagatatatcttcaactataatcttagctgctgcaacccccaaagaaacaatcccttgcatggattcaatattgccactatcaaaagtctcatgatatgcaagaagcctcttctctgcccaacccattattgaagtcaatgtagaactcaaaaccttggagtaatctgcatccttagttgtctttgcatctttagcaacctcttctagctgactatcagctgcatatatgagatccatttcaacttggccagttgcaacaaaccgatgaaataaaacccaagtgaagcaaatattatggagaacctggttaatcccaaggattccccaagtctttttaatatgttccattagttcatccacctcctcaagtatggatgtttcatcattaacatcaaagcaagcatttagaagcatttcgtagagcctgagattcagtggaaacccatctgcccaatgacaagactcggtaagagaaccatcaattgatctggaagcaagagtcatgacagcacttcgaagaacctgcaaagattcattattcctcccagtttcaatgggtctttctaatgccccgtgaataatttgtcgtagtctctgcaccggactctgtaccctatctagtggcaagcgaggatgcaaaaggagtccagcctcgagaattttcagggttcgtttttgccacgcatcatattcttgtgaatcagtaaaatccatgagtttgagttgctgtaaaagctccaatggtactactactgattcaattctccttccaacctgtcggatacactaaagaatatgagagacaatgaatgataagttcaaaatatacttcaatccataaccaaaagaacaaagcatgtacttcgatattcaaaggaaactacttaaaaaaagaaaagaaccagccaccttttcctactcaaagttccaacatttaccaacaaccctttacaccctaatgtgtgcattaagagaaataacaaatgaagatcaaatcccatcaatctggactaataacaaaagttttctacttcaattttggacacttttctctaagtgcattcaaaaattgacaattccaaaactaggtttagaaactaaaacaatatatataactaatgaagttgataaaaaaaaactcaaaaatcacagtcaattcatcaaaaaagttttgcaattgaaccaagaaaatcaaagaaacaaaacatatactttgaaataaatctaacattcaaaggaaaatactaaaaaaagaaaagaatgaaccaaccaccttttcctactcaaagttctaatatttaccaaccctttacacccaaacaagtgtattaacagaaatcataaggcaactaattaaacatagtaagaccaaatcccatcagtctggactaataacaaaagtttttcgtcttcaattttggatgatttttcgtaaatgcattcgaaaagtagcaattccaagcatcagatcgaacaaggtttagaaactaaaacagtgtgtataactaatgaagttgataaaacttaaaaaccacagtcaattcatcaaacaatcttcggaattgaaccacaaatcaatccgattaaagaattttcccatcttcaaaaccccaaaatagaaactagaactaaattacaaacactaaacacacccagaaaaaccccaaggccaatttgaatctcagatcaatacattcgcattatcagagaaaatagaatccatatatatatatata

SEQ ID NO: 186187 - DNA, 5513 bp, Cannabis indica
aatgacttaggttaagtttcttcacactgccttataagctttgtatatacaattttaaccaagttaaatttgatttatatgcgcgacttactcgatactgctgcaggtgaggtataaaatatagcatatattcaaaccttgttaattagttatttggaattagcgctgtaatgctgcatggtttactgagaaaagtcattgattaggtgattctggtattgggaactctgaactttaataaaaaaaatttacaggtttttattgagtagggaaaatgtcagcttagtcaaatatctacttattattacatggaccttatctttgtgtctggttcctattaaatgattggtaaagaactgagccaaagtaatagtttagttatcagttttctttgagatcatctcctatatttaggggttgggagtaataaggaaggagtgaattatgatagtatcttaagaggagatgtgcttcttttagtagtcactaatagtgcatttttatggttactatttttcttaaagggcatttttatgaatctactcatgttttttgagtgtgcctcatcattactcaattattcatgtacttaggtaggtaggatgacatattactgagtaaagcaatttcggtccactctgatgtttgatgacgtaaaatacaatgaataaacatgccgataacaatgtcttccttattgtcagcaacttcaacataaaaccatgtcccccttatgtttgtgtttgtttcttttttctgtgaacatttatatttcggttttttaaaaagggacagtacattggttgctagacaagagactgactttgtggaatataagtcagatctctgaggtgaaaaatgcattttaaataagctttattgacagtggttttttactttgaaaaagcctggatctgctcgtgacttcaacattgcacttgtttaaagagttccattgctctcagctttgaatttttcatttcttccacatatggtttactaggaaattattttcttgtatataatgtttctatgttgactatcttgtctataggtcatgccatacagcactggttgcaagacaccactgtctaattttgaggctggtcaagaatatagggtttgtacttttgaacttctctctatcttttatatttcacaagttctgtctaatcttggccatttttattgggtaattttacattgaaattatctattattggtggtcaatgaatttgcatctcggttggtgaaccatatcaagtaacttggtactggtctttgttgtgccttgaccaccttttttttatttattttcttaattctgctggtttattctcactgaatctttaattttgctttctgaaacctgtgactgtatctgattttggttgtaatgcaggatgttcctgatcctgaaataatggtggctttcccaattattggtgatccacaagaagcagtttttgttgcttggacaacaaccccatggacgcttcctagtaatcttgctctttgtgttaatgcgaattttgtttatgtgaaggttggctagcctaagttaattggtgctaatattttgtgtatttttattcataaaaaatgtgttttataaaagtgccttgtgctttgtcaactatttttgtattggtgtctgctgtttttcttctctttttactgctgattattttctccattactggaacccttgctattatgtttgtaatgattaaatgtgcgactagactagatcatggtgaaatatgtatgagcaaggtgacatggttccatcaatctctcacacctacaggcaagacatgaggttttatttgtttttttcatagttgaaactttttgagcttgtaagcttgagattccaatctaatgagggttgggtcaagggtcaggcccatggtttgctttgctcccatgaggtttggggttcagttctgacttcagggttaaatgagagttcaagtaagcttgagactagtacagagctgaatgtgacttgcactttgttttcgttccatttgccagtgtggttttctaagtcattaaatgtttgatacatccataccttggcaggcctgtaattgtttgagcttctagttatttcttagtcttttgttttgagacatgctgactgtaattgggctgatattggaaagtctcagttccatctaaagtcagaattttttcatggttatagatgtggggaaagtttttttttttaaacgtgcatggggttctgcaaatgaacaaaccctttttgccctatctcctagctggtgtgggatgtttaaaaagaataatgagaccagcagccatttatttatccatggtgatttttctataaaattgtggtaaaattgctcaaatagtttagttttcattgaggtatctggtttaaactgttgagattctgatgtttcatatcagaggaagctaggaaataaacttttggatgatgtatcgactattctttgggaggctatgcttgaacagaacaagataattgttgaaggacagcctagtgatgttgatagtccatgggattagattagaatttgggtgctctttggctgcataatgaaaatgggtttaaagaaattttattctttgatttacttagagaatggagtattatattgtaatgatgatttgttgttattttttgttgtgtatagctatttttgtgatacttatggtttttccacatgcctgtatttttctcttcattgttgcaagggaattttgctgtttaacttgtttactatcatttatagtggattatgactataataggaaagtattgccttgcattatttctatatagattttcactttatataggattatggctatctttttcttggtctgtttgctatattttcaaattaattgtattttcatttgaaaatcacccttgagattctaatttgaggtgaactaataatcaggttcgcaacaagaattctggaaaagtatatgtagttgctgaatctcgattgtctgcacttcctggtgagaagccaaaaccaaatatcattaatgggtctgttgataatgcaaagaaatcaaatgttaaagccaagggaacatcagctgggaagaaggaaaatgttgaagactcttacgaggttttggagaaaatgaagggtgcttcattggtgggaatgaagtgagcattctctcactcattctatggagctactatcattttgtggtgctttgaaatatatcttttaattttctgtttttgattgattgtcaatatgtgatctgcaggtacgaaccactattcaattactttatggagttctctgatgtagcatttagagttgttgcagacaattatgttactgatgatagtggtactggcatagtccattgtgctcctgcatttggtgaagatgattatcgagtttgcttggaaaatgagattatccttaaggttagcatttaaatgattgtagacaactaaagttgtaaacttatgctcaactaagtgcaacaagatgagcttatctgtttcttaattttttagcatcaataaagtgccacaaagtctgttttctagatctgttcactttattgtaatcatctctccctctcgccctctctcttcatgtatgtacatatgtgtgtgtacatatatatgcatctatttcttttatatttaattgtactaatgtgtgcctatttctgcttgtacatacttggcagacttttgtggttttttgtttatgtgtcctttttctttttgaaggctcatattcccactaagcttctagattttacttggattttagtgcttggcaagattagtcactacgatgaataaaacaacactgattataatcttgccaagcactaaaatagatcagcgtcttttgtggtagaatgtaatgttggatttctggatttcattagtgtaagtgtttaatgacatttcattgattttgattatgttgatttgtaatgccattcaaatctaattatttttttccttccacaattgggtttaaagagtccaacaactactcatttctttatatgtttgcaacattggtgtccttgagaaagaggtcacttgtcatagactggcctctcctgttatggcactgaaagccctcacttgtggcagagaaaaccatggttacaaaagttttagtgataatcacactgaaacctacaacaaccaaaactgagcacacaaaaatcggacctatagtaaagttttccaatctctgcataaatctaagaaagaaagttcctcaaaatgtttagtcttaaaaacccatgcactgtccaaaattttattttctcccatatgtcatctactaggctctcctttccttcaaaaaatctattatttgtttccatccaagctgaccaaacagtagtcatcaccgctgtcctccataatcttactttatgtttgctactgactggcttactcactatcatatgaggaaaggcacaaggtaggacccacgatacatcaaattcctcaaaaatatttaaccacaatctataagagtctacaagtcctaaacagatgttcaacattctccccactagcacttcacaacaaacacaccagccaggtgaaatagcaagataaggacgctttgcttgcattttatcatagacattcacttttgtgtgccctttttgtttcttctaatttaattttgtcagaatttcaaaattttctacttcagttttagcataagtgcctcttctagccttttaattctcaagccccatttaagagtgattgctagctttttccaattagcttcttgtatttgtgcttttgagaacattccttttgattctttattccaacatttagtacggaaattgaagattcttgtgtaattaattttatggtcatttagggagttctatgccatcaattgtttctatatttgattaatgtatttgtaattattcattttcatttgcaactagccattgtttatgatgtttgtctatgtcttgtgggcttgcagggagagaccttgattgtagcagttgatgatgacggctgctttacttcaagaattacagatttcagtgggtgctatgtcaaggatgcagataaggatataattgaagcagtcaaggtattactgtatggaaaacataattggagagtttgcatagtagttgttgctaaggtttggtagtatccctaggatgtccacagttatgttctacgtggaatgtcttaaaagctatctcacataaatttgttaggtgtttatgtgcattagttttaatttgttgcgaaagtcagtaagtagtgtagtctgaaagaatgcacttacgtcaccaagaagttcttttggcgaaaagttttagtaagtactctgaaatggtgttcttaagtcaccaagtaaatttttggcattaaaaacttcattttacaccaatttggtgtgacgaaagtcagtaagtagtcagtaccctccatataatctaacagactacttgcacac

SEQ ID NO: 186188 - DNA, 3743 bp, Cannabis indica
caattcaaattagggtgtatagtctcataggtgaacaaaaccaaaagcgatcagtggaaaaaaaaaaaagaaatgagtgcttcaaggttcattaagtgtgtcacggtgggtgatggtgccgtaggcaagacttgcatgcttatctcttataccagcaacactttccctacggtaaagaaaacaagactaattttcttctcctgtttctttattgggtttctgtttgtatcccgagaaaaagtggaaatgtgagagataaaagaaagaaagaaatgttggggttttgctttcttaagtttttctggagatgggtttctcagtttggattggttttatgaggtttagtgttttgtgcttgtggatttttcttttcttggttttcatgtgtaattttctctctcgtgtttttcatcttccattcatgtttgttgctttcattttttcggtgctatgtctttctatctttttcatgtttcgatttgttgctaaatttggtgtgagtgaatgcatcaatgtgttttgctgggccacttttcaagtgttgggattttactcttgtccctctaccgagtgaaggactcaaggacttttaatgtaccgagtaaagcatttttgttttagacataacaaaaggaacacaactttctatcaaatcaaaacctgtaaagctatttatgtcctttgcagctgcagggtgtgaagtgaattcttgttgttttgcttaacctaagtaaaatagtgttgagactgtaagtatttatatgtattaatacttgctcagtcacttaattgtgtctgatcattcattctcaaacacaaaatggtttttatttagacattaggacagaactttcttcttctttttcttgtgtattgtttcgtttcactccttctgtgccttgtagaaaatcctaatttgttgttgttgtgaaaaaggttttgcaatataactatctttacttttctcctgataatgatatgttttgaaacaggattatgtgccaaccgtgtttgataatttcagcgcaaatgtggttgtggatgggagcactgttaatttgggactgtgggacactgctggtaagcttagaactgttactccctgctatatagtgttccactgcttcatcatttggagtctgatgatttagaattataaaacagggcaggaagactataacagattaagacctttgagctaccgaggtgcagatgttttcctgcttgctttctctcttataagcaaggccagctatgaaaatgttgccaagaaagtgagatttccatatggattttttttttgtcttgtaacatatgatgttatgatgtattaattatattttccccctgttttatattgtagtggattcctgaattgaggcattatgcacctggtgtacccataattcttgttgggactaagcttggttagattctccactccttttcttttcccttctttatcaggttatatttgtatgtgctttttaattgtttcatactgtactagttaccgtttctcatatgagagatgctctcttagattaggcttctgcctccctatggttgattgtgtcaaatagtcctttacaatttgatttatacttaaaaaaatcttatggcaggttaatgggcatcacttcttgtaaaattttacctatttgtttggacataatcagattcaagtttgaatataatattagagtatttgtttgtatccaaaagcaggggtttgtgctctttcacacaaccttttttgtgaaacttgcatgcttgaaattctagtgtttgtaataagaatgatatggagatgaagtctttgcaattcttggtttgcgtgatgccaatatcagtgttgggccacagttggtgttaatttctctcagttcatctctaagttaatatgccctgatatggaatccatatcaattacttcttaagttagtttgtcacttttatacatctttccttcttctattccacaaaacaatgttgactgttagttttaatgggagacttttttgcttattctagatcttcgggatgacaagcagttctttgttgatcaccctggagccgtgcccattaccacagcccaggtaacatccagtggattttcagttcataactttgacctcagtttaattttcttttctactcaactgtttagaggggggaaaggagtacctgattttttttttcttcttgtattgtttttctcttgtagggggaggaactgaggaagctgataggtgccccggtttacattgagtgtagctcaaaaacacagcaggtacattaagagtcctattcaccattaaagtggtaaattggcatagttctttgttgaagggatttatgtaatgtttgctttttgactgcagaatgtaaaagcagtattcgatgcggccatcaaagttgttctccagccacctaaacagaagaagaagaagagaaagacacagaaggcttgctccatattgtgattatgaaaaaagtgactgtatgttgggaggaaagtggtgaccagttaaccctttaaaccgattatagtctttctcggtcagtattgcatctcataaatttttctcacctgtcgaatgcaacgatctgtggctcacagttttcaacaggcagaactaggaaaattctctttaatgcaaccaaatgttcacatcatctgatttgtatattaatgaatcaaaattgtgttggttctttttgggggtttagtagatattcctaatatatcttaccctctatgaaatactgaactttttccctagcgtaggcaaacttatagtcatgttctgtaacctcatttttagtaaacttacaactcttaaggatcctttttctcttatgttatgattatggatatctcatgtttgaagcaccttagactatatcaattacacaatagtaaatggaaagttgatactgacttttggaaagtggaaaaaaaaaacaaactagaatatagaaagtgaaagaaaatgaaagagaatatctacattttcatagtggaaggaatatattggcattgaggggtctcagcttttttgatggagccatggaacgcggttcttttatgaacccatcaacttcaatatcgttttagattctttggaggccaacccttttcagctaatcacgaatatataatctctctctctgcacaatatatatatatatatatatattatttaaataaaataagacggcatgggataatatatatatctctggctaaataagagcagtttaattcgcagtattctgcgtcatttgcagccatgaaaaccgaggggccagaatcctattttctaagaattcttaccggtctaacatgatattagaatcaaaattaaaaaaatttctaaaaatgttaaaagaaaaataaaaaacacgattccaaaagtccatagttaaaagagttatttgtgatttagagatagtgtcaaggagatagttacaaagtttcacattggtaatgtatagaaatataatagaatatataagatcaaaaactattcctatggtagaatattgattgagatagacacatcctatgcatcctacaattcaattctaaccagaatcaacagactttgattactatttgtcacaataatacactcttttatatctacccaagtattcattgtcattatccaattacattcttctaaattacatctcaacaatgtttgatcaaaattgagtttgatttgagtgaactc

SEQ ID NO: 186189 - DNA, 3662 bp, Cannabis indica
accctaatacacaaacacttagcttctttttttcacttttctctttatggttggcttgctcttgtttttgctcatacccttatcatcgtatactctgtaccatctcatttggcatgaaattagtttggttgtagacccacccgacaggcgtgatccattccggttctaatcattgcttgattgaacgtaattcccagttaccctcaccgtcgataagccgcaattccacagagtggaatggtattaaagcgggacgctgaaatgcaaattaagtaagacaatatatattcatgaaaatgctttaactcaaaagaagcttcaacatacataaatcaaacaacatattcatataaagtacatacttgtgaggatgtaactactgtaatacccatctcctttgcaagtctataaagatgttcttcaacgtctacactcgtggcgctgccatttgaagaaatacgaataaaattagaacaccgagaaaaaaaaaaagcctttgaatttgaacattttctttcaaggtaaggacaactgtaaaagtttggggaactctcacgcactttgtacactcgtcgaggattccaaatttaggcttgtggaaaaataagcgggccttgtagaaacaagaaagaaagaaagaaatgtcagaaaagaaaatgaaaaggaagaaaatggacaacaagggttatggtaaaggtgtgctaaaacaaaaattaactcaccattcctaatctctgttgttctccaagagaaagaatatcctcccaattcaagttagcatcccaaccacttccctccctttccaaaagataattcaatctaacattttctagaatagttttcaattgcatgtccagaatgttttcggtgtcagtagactctttacctgaattaggacaatcaaatcaaagttacattaaggatggcacacttcaagttttagtttctagaataaaattttcatgaaatcacctttcccatagagctgcaatgccctcaattctgcttccctctgtgagagaggatatattatttgatccctaagcgttcccaagcaagtgtacggtcgctgaggaacatagaacacaccacaacctgacccgacctcttcagtgacatgttgggatggttgagtgagccttccactcatgatgggccaaagacctctaagagctctgaaaacagaactttttccactcccatttggaccttgaacgatcacatacttttgtcaggtgttaattcttaatagaaaaagaaacattaataataacaacaataataataataataataaagatactacaaacaaaccagtaacaagcaggctttttccaggtgatatgtcacatgtcaatttccgagccaacaatttctgcccaggggtaacaatgtcaacttcagagaagctaatggcatcctcagagtaaagatgtctcctttcagctgatgatccagcactggcattaggatctcctgtaagaacattaaatcattaatatacacgaatacttttatcaataaattaaaggctgaactgaagtgtacataataaatggattatcagcacttcggtaaagatatcaagagaatcctctttctgtgaataacgccacacaacatgtacattaaaatacagcttgtagatgcatagttgcagtaaatcattatagttttaagaacagttcaagacttaccggactgtgcagcatctagaagctcttcaagttcaaaaattcgattgaccccaccagaaagttcaacaaacttccgatgcaattcgagaatgtcaccaaaagctaaaaagctctgtgatacaacagaggccaagaatcgcaatgcatgagccagttcacctgaaaaataatccatcatgtgagtacgacaaaggggaaagaaaacaatttgaaagaagcgagttgactcctaggcctaccggtttgagaattaaaatttaaaaaggctttctcttcaatttcaattgaattaaaaagaataccaatccgaactcaaatgtgaattcgttctgttaaaatgttattactataagtgcccctacatcttaccttgagtggatattaaggctctgtctcctttgtgttccatggcatatagcaagctcaatccccaagtcacattgtgtggaagttgctttgttatgaaatcatccaatataccgaacatccacttcttcttcaaaagtgtcaaggaatgatcaagaagctctctgaatttgtattcaaccatctgtttgatataaaagcatccaaatcatcatttggagtgataaaccattaataaatatagagtccataagcctttagaacgtagagttaatgacacaaaacatgaatgcatgcaagtacaaagctaacagcaaattgtctaaaaaaatcaagaggaaaaactcatggccaagaaaaccatgcagtaagagaggaccccatactgctaaaaaaacatataaagcaatgaaataaatggtcaaggaactaagaatactgaaacaaaaaggtaaggtaatccagatgacataatggaaataaccttactaaaaatcattccccttgtattaattataaagaatattgatttctttcttcttttgtcaaaatgctgccctattgtttatatccccaagtataaagacaataggggaaaacataaatgtccaaaaaaaaaaatataaggcacttcacagtacatcatctataacaaaaaagacatgggttgcagggcttacagctttttctcgagcaccacctccaaagaaagctactgattcagcatgtgtgcgtaatctttcatgcatgaacctaatatatgcaaggtgtcacaatgaaattagtcttatttgcagggcagttcaacaaaagcagaataaaaagcagaaactaattttagttcttacctgaaggttccttcaagctgttgttcttgactagccaagtcaccgaactcgggggtaacagctctaagaaaacctagccccagtaacatgtatgcatacaatataccaactcccctctgacctgttaaaagcttcattctccaggtgaaccttataaaacaaaggatattattatcagcaagataacctaatagtacataaaaacctcaaatacagtccctacaatttgtttttactaattaaataaaatactcaccaaagaatgtccacagttggcttcaccattccagtaaccaatcctgacaaatcagttgttaacttttccaggtcatgagttaatctctgatcagcatcaatatttttactagacatgttgaagacctacaaaaacaacagcatgagttatctgacaagcaaaaaagaaaaagacaagagaagagaaaatcaacaaagaaaaggagacttgaataaacatatctgatctcagtaccttgtagaaggcattctttctcagataatttgtcagtaagtgtttagtcaatcgaattctccatcccaaagcaagtctcgctgtcaagtgcctgcaaaaataataatgtcatgtttacttccacatctgcacctctttaaacccatgatattctgtaagccacaacaaaaccccacgacttccaaagttccaaaccacatagtaatatacaagaatttagctcacattttcacctgcagcattatacatatatatatatat

SEQ ID NO: 186190 - DNA, 2512 bp, Cannabis indica
agctattatgagttttgtgttatcatttcttagatatttttttaatcccctttaggcaaaaattcatagttctacatgtgaagtatgtttataaatttatatcctttgatttttgatttttgtctgtgtagagttttggtacataatttttttttttgtaaaaaaacttccactgaactataaaaattattgtaaatgtcttcatttttttttacaaaaataatgagaattactttaaaaatatgcattgtagacattaagagtcgacgaaggataaccaattatctagccaaaggatatgcttactcaaattaaggaccgctaaaagatgtgaaccaacatttcacacaaattgctcccaaaaatttaattagataaaaaagctataaacaactataagcccgccagatttgtggagagataggtggttggcaatctcttggagtttgatactgcaagagagagaaaattggattgggacagaatgctttacacgattttgtgagttcggagtttaaccgatttttgctgttgcattggtgagtctaccagttttctttagagcttttgtctagaatggaccagaacgacaaagaagggccaaaggtggcagaggagataatgggtattatggatgaacctcctgtggttgaagaggtggaaaccgcagggggggagggcgtgatgaacactacggaagaggcgatggaaccaggtgagaactccagagaggaaggagacttagatgacatgaggcaacagttctttgattccatgactctcgagttagaggcagatgtggagttaagtgcagaagttacaaagaaagctgtgctggcaaaaacctttggcagaagaagcgtggctaggggtagagttaaagaaatactttccaagatatggaaactgaatggcaactggaagatgaagacaatgaaaccgggattatggggcatcttttttgataatgaggatgacaagaaacaggtgttgaagaaaagaccctggctggtaaatggtgcattacttaacattgttgagtggcctgaagacggtcattgggaaggaactgatatgaataaagcacggtattgggtggaagctcatggcctccctacttcatacctaacttggtagaacactgacgtcatagctaggaaagttggtgattatattgactttgacagagccccaagggaagttactgctcgacggggattcctaaaattccaagtagacattctcctaaaccagagattggtggctgggttttatttgaacatctccagagatagaaaggaatgggtgcagtttaaataccataaacttccagccatttgcttcacctgtgggcatttggctcattcctatgaaaaatgcaataggacccctcagtttgcctttcctcccattgggagggctgtgccgttctatggggcgtggattaaagcgggggtgcccattagaaattgcttcgatcctgctatcccgagaatgagaatccaggaaggtgttaagcatcccggagttcatactccggtgaagaaaaacgataagggcaagatggtcatagtacatgatgaaaatgacggctccacaggagggggacaaggccctggaacacagagaaccgttgggagggggttttcaccaaatgggatattgctgcaggatgcaaagaaggtgtgccttaggactcaggggcagatggccatttcgggtaacaagaagagcagagtaccagggtctttgaaacatcctatgaccaaaattgataacagaggaagagattgtggtattattgcaagtctaatggctgatattgggcccacacgtgatcaaatggttgataggccacatgaggaaatttgtaagtcaagagtgccccatatgcaccccgagcccacgtttgtaacgtggcccactgatactaaccttgaagatgtgattcaacaagtggtgaacctggcccataatgaacttgggccttcggaagtcattgtttcacacgacagcttggatttttcagttattgggccttctttctctggtgcaaagaaaaggaaagcaagtgttaatgtcgttccagtaattgattcaaacagtacggacataacctcctttggagataaacagccatcgactcctaccaccttccttcccacacttgaagttactaccttctcccctggaagctgtagtcgagatggatccagctctaaaagaagagctactccccggaggcgtggggggaattcaaacggtagcagaggggtgcgaggcaaggtaaccgaagcaaggggaaatggtctgacaacagcggcaatgttcaagcttcaggtatgaatattacccctttggatacggacctaattgatatcactatccatgaaacaacaagtcaattgacgggtgaggaggcggcccatagccaagccccccccaatcgccatgaggctcctgtcgtggaactgccggggtgttcgtagaaccccggcaacccagcgctttt

SEQ ID NO: 186191 - DNA, 6958 bp, Cannabis indica
tgtaaatatgagacggtctttttgacacagcacgaaacctacacgagcctgagagacacgagcatgatctgacacaaaaaaaatatatgcttaggcacgacgactggacacgaaaaaatatgaacttagatacgacacgacaatgttgtgaattgacacgactcgacacgaaaaatatagacttaaacacgatacaataagctcgaaagcacatatagattagcttgaaagcacgacattaaaaaagggtcagcccaattaaaacatgaaagaaatttgaacacggcataaaattactaggtttatgaaccgtactgaatctattttatgaaattgttccacatcaaaacacgatccatatttttaaaaactcgaaaaataaagaccggactagcactgatatttatatataaatatatatatttctatgattaggctaaagggacgaaaaaaaatagaagaaaaaaggaaaaggtaattaagagagttggtgcaaattgattagtaataaaagagggggaagaaagataaagaggcaataattcgaggggacctcaacctcaatgtcatctaattctcatacaactttgatgaaagcaatagtgacactaaacgacattgaagcgattgtgaataaacttaagagcagctacattacgtggcttagtctaatgattggatgacccttacagaataataattataattaaaactctttaataagagttgagtgagtggaacctccaacattgaccaatgaattcaacataatcttctgaaataaaaaataatttaagttttcaccaaaaaaaagaaagttttgtaacatttcctaatctggtaccaatatgtttgtagtagggtcttttttttttttttaccacaaatattgtaggctaaaattgccttaatgagataactagccaaacacttactgtttggccttcaaatcttggaaagaaacactatttggcattcataaaactatgtatacaaagaaataactgtttggttttcaaacatatataccattagttttctctaactgtttggagtccagtacatgtaatttgactatgtgacttatcgtgcttacctagacgtgcttgagtagactctaattagttcatacaactgtagcattgcaattatggcatttactagatataatatacttctgaaatactcaggtacaagtaacatcaattaaaaatgggttatcccaataatttgaagtacttgttgtcataactagcgtaggtgatatcatcaccatgagcctagaaaaaaaggtacaaaagatttttattgcccagcttttgagctggactcttcacatatttctattccatttttttcatatagcttgtattatgggcaataatatggcatagtttgttaccattaagaaactttatgggatatcatagtttgttgactattcttaattgtatcaactatttaaatagttatgccaaataggaaagacagttcaatgtagcctaattctgaatgtagaaagtaatggacaaactcaataggtaagaaaactatatacaatgcaaccaacttaacttatgggtgaagtgaaaacacggcaaagatgacaagctggaccctatttctgtttgaggaataaatgtaaatggaaaaagagattcttagttgggtcacagctatttaaaacttgctaaaaagagggcacagttcaatggaaatgccccaaatagaaaaggaagacaaagttaacttattcattgtagctaaaaccactctgcagagacaataaattttgcaaaatttaatagatgggcttaactgacagagatcacttggtaagcttatggtaatatattgatattgaaatatgatctgactaacatgatcttcaacaaaatgtgaaaagagttaaataactgggcaatatatctaactagaatttcagaatgatacagtgaaggcaggcgaaatctgttcaactatttcacattcatctctttatggcatgaaagccacaacaaatacagcctaaaaatatattgcatgttcataatttcaacgtattatgatatctccttatacctgaaagttgtacatgaagtcaaataaatattacttctgatctttgaggttctcattctgtaggtacttcaacactccatatgtaacggttccagcaatgaacaaaccaactgttggagtaaatgttggatacagtatacttaactaagaacttatcccactctctggcagaaaacctgtgattgtgttcacatgatttcttgttagaaaatgaaatgaaacacatgaataaaaatacaaacaaagaaaattagggtttttttttctggtttatgcttttcaattacatgaaattttctctccatgtataatccaaggccgctttcatcacagccactgccagttagttactcagagcatatcagttatatccttaagccatattacctacttatagttttatctcaccttagtggatcatttccacaaaaatgtagcttatatttcacctgaaatcaggagtaagggggagccaatttagggaaagagaagcttttgtgactaggaaggggttctactttgttctaaatagcacattgtcagtgcagtacttagatattgaacatgtaccagcttcaaatatttaggttcaatatctctgttaaaattttacaagttcttatattgtgacttggatattaagactagactaacactcaaaactctaacttaaccgatgcaagtattttacataaagattagtatattcaacattaacacaaataaaattgtttttaattcgtcaggacacaaaactcgtggctcaactacaaaaatgtggtcactttttcctctactacttaagccagataagcttagacactaataataatagaaagaaaaagaagtgcaaagtcccacttattaagtggtccaggaaatttagactcaaaaaggaccaacacattttgatcattttattgaaataatgcacaatatatctgtatatgttaacagacaatctttgacaatggctgttctgttaggtaggtccttcaacacttacgcaccacaaactcctcagataaagtctattccctaggttgatgatttctctctacacaagtggtgtccaaggcttgactactgactctactccattgggacattactttacgatctcccaccagcagccataaatcttctcattccctagggtggaatgcatggggcttggggaacccaattgcatcatgtcatctttgcttgagataagcacctcatgttctatttttcatgagacttgaaagagcgtagtgcgcaaaattcttttaactaaatttcagttatggtttagaaattctaagggttggtcttggtggtgggtttatgttgttataaaaagaccatgtggatataacactactctcttattcaataaatcacttcgattgctatattcatttgaaggtggtcctccaaggaatttaactggtttttatagttttatgaaaactgatcaacgctagaaagcacactctgtgtctgcttaaaaggctaccaaagtctgtaacaatatcagttgatgtacctttgcactagcttgccatttctctaaatttcggcagcttcactttgcaactctcgtgatttatggctcaagaaacataatggcagcagcaatttcgcacttggctgaaatctggagactcctatccaacactcttctgtcactctagggctatgaaggcaaataataccattaaaaattgtggactttaattaaagtgagtagattgtctactgcggatgcagaatgctgccgttaagattgcttccgaagcccttaggaacccttgctaacaattatctatgagaaccgacagtgtgttcctctgaaatagaatttttattacaaacaacattttgttgacttttgaactgattagaaatgaggcaagaatagctatgcagctcgaaaattagacatgactaaatcttcagttcgagtagagtggcttttttattgaaaaagtgacgcttaaaatgaggctttttgagcctcattatacaatgcattagctgggtctcctttttctcatcaatagaacaagcacttggtttttcaacacaggatggtgatccactttcacaatacttattgatttgcgaagaatctttttcatctactccaacataaatcaagaactgattgttcccagggtcttgctattactagacatgctctaccaatctcacacttatggagtgcttggtgtaagagtttcacttgatgggttttagtagagaaagattgaatactcaagtattaacagagttcgagtttttacccaaacaataaacttaaaagcgagacccacttaatcgtaagtcttgtactaaaattataacaaacgtacgtttggttttacattcccaaatccaagaacccaaatccccataccaaacacattgttcttatttgcagatggtattatttttccaaacaattgctccctctcacaatgctgtaaagcgcaccttggacacctaaggacacctaaaatcacacatcaggtcaactactcaatccggacaaatctattgtatctttttctcctgatatgatatgttttcagcgatacaatatctatctcagtaaacttttggtagacctatttgttgccattggatttacctagggtttgccattattttcaggcaattataagcaacaacaattcaatggaattaaggaaaatgcttagaaactactaagttcttggcaggagaagtttccgatcggtgatgtggagtccttccctacttatgccttaagctgattcacttccaagtagcttatgtcatcagcttgaatcactaatgacacatttttggtgggattctaatgctaagggctcttctattcgcttgaaaagttagataagcctttctaaacttgaaggaggtaagggctttagatcctaattcattttaagaaagcttgactagaaaaacaagcatctgtatcatagacaaaccaactctcttagcagttttttttttttttgtgtctgccgacacaaccttccttcaagtttgtcttagacattatctttctacaatgttgattatgtgaaaaagagatatcaaaaagttttccatggaaatttcaacttctaagtctatcaagtttcaagggattagccataatttgactgcctttgagtttattactgcagatcatcaatgaaccattattttattgcaaaatcattttagatcaattgatatagacagaatcctttccatccctctcagttttccgctacaggaagacagacatcatacctctacaagacttgactttaaacagtgaaatctgattattatacagctacagctctgaataattctcacttcttagagctccataaatcatatccactgttggaaaatttctgaactttttacattaccaccaaaagtgaaaaccatagcttggcaggccatccagtgtccactaacagttgctgcagctcttcagcaacgtcaagttcttgaatcagcagcaacgctctctatgcaccttgcctataaggctgattggaaattgtcacactctttctcattctcttaccaaacaagaaatggagaatgttatcatgtgaatcatttagtcttgcgtaatgggaaattgcatggtcgaatgtctaaaacaatgttcacagttctgtgaggctccacataaatcaccttccattgatctcatggcacaaaatactccctcttgtcgcgtttctcgaaacctcccttggcaggtcaatacaaaataattgtagatgcagcttttgataattagaagaatattgtaagtaggtgttggggctcttatcctagaatcttcaggtgaagttaagggctgtttttatcctatagaaatggaagtgaaagctttgttcacaggtcttcactcttcaatgacagttttaaggtctcaactaacctaactaaatttgctcttaggtggacaaagtttttttatatggttaaaggatattcataatccaatccaatccaatccagttcgaattctgatattgtcatggaatctctaatcatcactgataacagctctttctacctcaaaataaataataataataatttttttaaaaaaaaatcttaaacagcagtacctgaagcagaaagaatgatgccttgagtaagaattatcacaccaagccccaaccatgtcaggagaaaagcactctcatttctgccggtttctttggccttttcgtcatcatccactactgagccaaaagccggcttttcgaccggagacctccgaataatggaagccctctctcttttactcttacgtttcttcttagtagcagtagtagtactcaattgggccgcattctctttggttggagacgaagcagaggaaccaaaccccagtccctgtgaggtggatttcttgggctggaccgtggtctcggtgaccttgatggtggattccgatgggtccaattggttctgggacttgatcctgaagtgggttttagtggaggagtgaagaggaagacgatagggtttggttgtgaaagaggaaggacagtggatttgtagcgccattttcagttttgttggttaattggtggatttctttgttatcagtactcctcttatatctttctcatatttatacttttctccctcaaactttgtactattccacttgcattccttttcatataattacattcaaagctcttagatatttagtctacctaaatatagtatttttgtcattgaattataatttttgcaaagtcttactttctaattttgtttgtgtagtaaaaatttttctaaactatatacattattgtaaatatcttcatttatattttgttcatttttttaa

SEQ ID NO: 186192 - DNA, 1766 bp, Cannabis indica
ccagcataagactatcacctgtgtgtatgtatttgagacctcgaagaagctgataaagaaagaactgataatgttctggtgtcaaatcatcattagctttgatgacctggtgtagatccgattccatgagttcaaacacaacatatatatctttgaattctcttcttgaaggaggcaataaaatgtgcttgatctccacaatgtctgggtgacgaagaagtctaagaagtttaatctcacgaaggattcgagttgcatcagatacatgttcaaagatatcattaatctttttaattgcaaccttctctccagtatgtgtatcatatgcagagcaaacaactccatagcttcctttaccaatcacttcctctattctatatctattcccctcgccatattcagtgaaaaagtccacttctgcagttgactgcaacatgtaattgaaaatttgatccaaattatcgaaacacctaaatgtgaaacttttcatataacataaacaatctcgctagataacctataacattttttaaaaaggagaaactgaataattttttatgccatactcattaaatatattgacatgtataacagattaaggaatcctagttctaaactgataaaaaaaactattcaaatttgaaatccttatctttgaagtgaaaaggaaactattacaatttataacaagataaatacaaacatagaaataaattcaaatgagataatcttatatcattataatatcacgaaaaggaaagagaaaaataacagattaaaagactcccaaagtcaataaggcaaagaatagaaaaatgttaatgataagtaattatctatgagttacaaaatccccattaaaaaacaatccaactatatataacacggatttagtagaaaccacttacccagtcaaaccattttaaattattttcccatccataaacatgggtgacattttaatcacagatcaaattcaaacttgaaccgttttcatttcaacaaaacaaagaccaaattcttattacatgacaagagcactacagtggggccttcggcagagggtgttaggggatagccatatggcaatccataacaaaaggttgaatataaatggacaaaggaaaacaaagcatagaaaaataaaacgtagatcttcataatatgattcaatgacagagatctgaatcgcagttacaattcaataatttgatttatttaaacacttacttaatcctgcttcaataactaacaaagtaaatgaatgagtaaactaaatacacagctttaacttaataaaattacctttcttctatcatcagcctgcatcttatcaatagctcaaagcatcaaatcgatcaatggatgactcaaacccgtaacttcactgaaactcaatgacccagaaacccaaatcgcctcaagaagatatattgatcagaattaatttataatcacgagtcaatgaagatgaaaaagttatggaaaccctttttccaaaatgataaatgaagatgtttagagacaaaaataaggctgacccaatacagatttggggactagagtgatacccttttcgctgaaacaagaaatgttaagacttaattcataagaaacataactttttgtctcgctaaaagaaaaatatttagctggaaacaaagcgtttacagatcacactaccaacgaaacgaatacgggttcttctaagtcgtgccgctaaattattattctgaagaaagaaaaaataaaaaggaaacaacttc

SEQ ID NO: 186193 - DNA, 9019 bp, Cannabis indica
atggttgaaattgaaaaagcaaagaagctgtgatctgaactctgttttcttcatcaatagtaagtagagttaatggcttcaatcaaaacgacaagttcaaccgcaattttgtagtaatttggtttggccatcaaaactttaatgcctgtcaaggacaagtgttagaatcctggtaatgtacaatacaattggaaaaacttaactcataagaaagacatttaaagcttgttttgtttttggtcaaagaatatgatatccttttacatctttactaccccacaatgatttgctttgagaggttttcagttggcagttgaagctttatttaaagctcttacttgtttatcaaacatttttcacaaatttcactgctcacacttctggatttgatgtcagtaaattataaattagctccttaaggctattcccaaaaccttctacagatttctttccattttttattcttcttgaaactatttgaggaccaaaataataaagtctatagtacatgtggtcatagtagggcctagtagtttcacattcttcttataaagagttctaaattccaatccttctttttctaatatatatacacaaaaaaacaagtctacaataaaccctctaaagtgatatttcagtagattttctatctatttggatggcatccaagagaattttttaagccatttttttttttcatgatattttaattatttaggatctcttgtaaatttttaaaaattttctaattttttataatattaaaaataaaattcaaatattttgttgccgtgttactatttttttcttattagtgtggtaagtaactgtttgaaccttatttttgacactataaactattttgaatgttttaaaaatttataagaaatcctaaataactacaacataagtgaaaaagaattagactatatcagagtctacctaaatactcatttagaataagggtatactgcagaataaaaaagtaatcacttgaatcttgtggaagcaaaccacatgtttcaccatattttcttgactttactcaaataagttatataactttccacattgctttattcatgaaaaaacctttacatatatataaatattttgatatgattcatttcccaacagagcaagcaagccaagtgttataatagttgtaagaaaacagcttaatatacaaatgccatgtatatcctcacttgaagaattattctgcttacaaatatagaatacatacctgaaaagccacaagccatttaccattaatccattcctgatgaggcctcaattcagagtgatgaaattgcatttcctccttagtactcttaaagtagacaaaatatcttgagtttgtatcaatcttcgaaatcacaccaacccaccagccatcattgtaaaaagcatcaacctcttcaaacaaccgaaaacaaccatcccttaaagtttctggtggagaaggtctaatatggattttatctatctcttctctcagaaactctttgtcatcatctgtcctcaagttctggtactccacaagaaacttgtcttcccctattggttcaacaatggttgctgtgaaccaagcaccttggaaaccatcttcatcactgttcacctcaattatagtccccttctcaaacccaagcgtttcttcctttgtttcttcagtagaatttatctccatttcaatttgcattttctgtatacatgagaaactaagcttgtaaaagctaagcaagacaatgcagaagatgacactccatcatatgtatttgaatgaatgaatagagcaaagataataaagaacaaaatgtgagtttgctataagaaaatttcttactattgtaagtcaaaagatatctgtgggaaaataatctaactaacaatgttaatcaagaacttaacagctaaaggattattcaagttagtaagaacacaaattaaacagagaaatatactggttcaagaccatagatcaatgcaatccatggccttattccagtttgggaacactatctcttctaagtattgattgagcaataatctttgtacaccacagtcgagcaggaacaacagctctcatagattcactcaagtgtatctttcctcaaactcgaaaccgagctagcatattcatcaacatatggagctccatacaaaacccaagaaaaacctctcactctttctttgtaccctctcagtttgctcttctcttctctcttgtctcgaaaagtagatgaagttggctatttattaggcatatgatttgaaatcccagtaggaaggaaagtttgttgaagttgattgaaaaaccaactgtcctaacggatttggtgggttggatttataggaactaataccacaatttcaaatgattttgtcctcatctaagaagaatattttgttttgttcttgttcccctatacacaaacaaaatgcatcaaacttcataaacacaatgaaccaatcgttctcatgtagaaaatagttacatttgggaaaagaagccaacatgcgaaaatacaggagagaaaatgtccaaactttaaaggtaaagaaaagttccaaacttgtaaaaacagagacagagttgagtataagagttaaaccccattacgaaaagtgaaagcttttcaaacctgttgttcatcttctttgttttcaaccaactgtggagtccaaatcccatcgacccacttgcggtggagcctcatactctccttggcaaactccatttcctccttataatcaccaaagaacactcgaaacctcccatttcccaagtcccttgtcaccgtagcctcccaccacccatcatcgtggtacacgtcgacctcttccccaatcgtgcaaacccatttggtgtccggcggaagcgccggccggagctgagctaaacgcaccacttccctcaagggttggaacccatttggcgattcttcaaccagggttttgtattcgaccaagtatgagtcagaagcttgggaactcactatggaacccaagtagaaggatcctcggaaacctggctccttggagctgatctcgacggcggaaccgggagtaaagatgctgtttttagaggtagagattggttcgagtataggctttcgaggcattttggattttctttcgaggttttagaagggttttttgagtatttgactctctagtctttcaagtcttaaattgcattggaaagattcctcttttctttatatccttggggaacgagtaagagaggaaaaccatcaagatatcccaaggaccaaaaatcaaatctttaatgtcacacacttacataattatatatgtatatggcttgtactataagatatttgccttattttgcttgaattgatcccattactccattagtttatctaaaaatcaaatctttatctatgagtttggtccatctgagacacctttcttcagccataaaatccactctgaatcacaagacaactataaatgtatcaatcttagagacacacttgaacaaatgccaaaatttcaagcaatttaagcaagtactttctcaaatggtcttgactgggttcatcaaagacacatttgcagcaagtaggcttctcaagttctcaactgagttaccctttattcatgttgattactccctctatatattcaatctcattgagaactcaaatgggttcatttggaatactatgatgagagcttatgtacagagaaactgtcctcaaaaggctctgtttatgtacaaatctatgttggaggaaaacatgggtcctgattactacacatacccacttctggttcatgcttgtgctgttcggttatctcaaattgaagggaaacagatgcatagtcatgtcttcaaaatgggttttgatttagatgtttatgttcagaacacattgattaacatgtatgctgtttgtgaaaatatggctgatgcaaggaagctgtttgatgaaagtccttgcttagatttagtaacatggaattcaatattaggaggctatgttcaaacggccaatgtagaagaggctagttatatctatgatcgtatgccagtaaagaacacaatcgcttcaagctcgatgattgcgatgtttggtaaggcaggtttggtaaccgaggcttgtcatttgttcgatgatatgcctgagaaagacatggcttcgtggagcgctgtcatttcttgttatgaacagaatgagatgttcaatgaggctttggctatgtttacgaaaatgaatgctaatggaattaagttggatgaagttgtggtgattactgttctttctgcttgtacaaacttgttgatcgtccagacagggaaaatggtccatggtttggtcgcgaaaattggaatcgaaacttatgttaacctgcaaaatgctttgattcacatgtactcgagttgcggtgaaataatggctgctcagagtttgtttaatgcagctcatcttttgaatcagataacttggaacaccatgctatctgggtacttaagatgtggtttagttgacaatgccaaggcattatttgattccatgccagagaaagatgtcatctcatggagtgcaatgatatcaggctatgctcaacatgactgcttctctgagactctggcgttattccaggaaatgcagaggtttggagtcaagcctgatgagaccactttggtaagtgttatctcagcttgtactcacttggctgccctggatttgggaaaatggattcatgcctatataaggaaaaacagtttaaaggtcaatcccatattgggcacaacccttatagacatgtacgtgaaatgtggctgtgtagataatgcaatggaagtttttcgggggatgccagagaagggaatttccacttggaatgccctcattcttggattggctatgaatgggttggtagagaagtcactgcacatgttttcagagatgaaatcatgtgaggtagcacctaatgagatcacttttgttgctgttcttggggcatgccgacacatgggcttggttgaggaggggcgtcgccatttcaattccatgattcaagaacacaaggtagaacccaatgttaagcattatggctgtatggttgatcttttaggacgtgcaggtatgctgaaagaggccgaggaactgatcaaaagtatgcctatgacaccagatgtttcgacttggggtgccttacttggggcttgtaagaaacatggaaaccatgagatgggggagaggattggaagaatgctcattgagcttcagccagatcatgatggtttccatgtgctgctgtcgaacatatgtgcttcaagaggaaactggaatgatgttcttgatgtcaggggaacaatgatgcgtcgtggggtggtgaagaccccgggttgtagcattattgaagcaaatggtatagttcacgagtttcttgccggggacaaaacacaccccatgatacaagagattgaggaaaagttggatgaaatggcgacgagattgaagatggaaggttatgcaccagagactaatgaggtttcactcgacattgatgtagaagaaaaggaaactgctcttttaaaacacagtgaaaagcttgccattgcctttggacttatcagtaccagtcctccaacaccaataaggataatgaagaatctgagaatatgcaatgactgtcatacagcagcaaagttaatctcgaaagcatataatcgcgtgattgtggtgagggatcgacatcgttttcatcatttcaacaatggttcttgttcttgcctggagtattggtagtagaagataagatgtaagctaaatggccaactcttggaatcaaaacatcatattgtaaagatttggaaattactttgttattttgaatctttaatattgagttagcaattatttgaattaaggtccaaataccattttcatggagtctagcaagttcatccacaaaccatgattgtatatagttaaacagatcaataataaaatagcaagaaaaccaacttgcttgtttttattatcactttggttaacaaattaaatcaatagggtaagcagatattatacatttagaatgaatcttgaaatgtacaaataatcattctggttatgcatatgtatttctaccttcaatttcttcttgtttgttttcctttaaatctaaccaatactctaaaccccttctcaacaaagatgcattatttttcctattcttcacattatcctctttgtatagtgaaaaaaatactcttctgttcctagttggtccaccttcatgcattttgcaaagatgttgacaagattaaaatgccttttcggtcttcaataccagcttccttcttcaagttccatcttgtaggtcatgtattaagcaatctaaattaggttcatactctgtctctctcatctgttgaatcaacaattccaaaattgcatacaccctctttgtatgagaccctattttatctccaacaacaaaactatacacctggtttcttacctcaatccaactcctccctgcttctttcttgttccccatacctctaatcaagttcattgtctttgcatattccctccacttaccatcagcagcgtaaattatcgatagcaacacataggcctccaccgtatttggcttcaaatccaatatttcggtagcagccaattttcccaaatgtggaagcttgtgtgctttacaagctccaagaagagcaccccagacagactcattaggctttataggcatattttgaattaattcataagcctcagcaactcggccagaacggccaagcaaatcaaccacacatccataaatctcctgatctggagtaacattataatcacttgtcattgtatggaaatacctcaagccttcttcaacaaggccagcatgactacaggcactcaaaactgccataaacactatttgatcaggtctaattcctgatgttaccatctcatcaaacaattcaacagcttcttttccaaatccatgggatccatatccaatcatcatggaagtccaggagactaaattcttatcacacatttcgtcaaaaactttgcgcgagtcagctatgtttccacatttcgcatacatgtcaataagggcattagttacttccagattctggttaaaacctcgccgaaaaatcccaccatgaacctgttgtccacaggccaaaacagctaagtcggcacaaccagctgctacactgctaaatgtgaagcaatttggactaaagccttgtgattccatctgtgaaaacaaatatagacattcacttgaatctattctttgatatccggcaatcaaagtgttccaagtaatcaaattcttttcactcatttcaagaaagcattggttagcctctggcaaacaagtaaacctacaatacatatctagtattgagttcatcacagcaagattggattcaaacccacatttgatcacggccgcctgtatttgcctcccagaagtacgcgagccaattgaagcgcaagctctaactgcaattgaaaagctaaaggggttcagttctgcatcctcctgctagccaagatattcaagaaattcattaacatggcagaaagctcccaaattcagtaacacaacttgaattcaagtgatcattcaatcaaacgttagagattgtaacagtcatttacctgtagcatttgctggaaaactcgaagccccatataaccatcacctctgtgagtgaaaccagtgatcaaagtagtccaggaaacagcatttttcacacataaatcccgaaaaacccgacacgcatcgtccatggtagcacaacaagtagcatacatatccatgactgcattttccacgtaaatgcttccttccatgccaagcttaatagccaaaccatgcactaaagccccacatgaaagagacttcattcccttacaagctttgatgacactggtgaaagtaaaagcatttggggtgacttcattctttaccatctcagaaaacaaaacccatgattgggtatggtgattgcaagaagtgtagccttccaccatggcagtccatgcaaccacgtctctgtgaggcatttcatcgaacaccaagcgtgcatctttgaccaagccttggtctaagtaggatttcattagattggtggccaagattgatggtgctttgggcaagaagggtgtgtttggttgggttatggggttttgtaaggagcttcgaaccatgtgtgggattgaatggaaatgagctttggacattatgagttttttagtgctcatttcatttcaatatttcataatcaaagttctctacctcttcagttctctacctcttcttattttattttattttttatttttcaaatgacagaccatcaaacttacttgaatttggttttcaaacgacaatattatggaataaacgacatatattaaaatgattcttttttatcatttttgaactatggaagttcacataaatgattaattaaaagttttagaaacaaggaaactaaaaagactttaccattttctttcaaatctctccaactagtaattaatctcaccattagccattgcttgatttttttagcctgactagggtttgccagcagtttcttagccttacactatggctctggtcgagtcgtgttaattcccacactacttttgggattgttgctatccttctgtctatgagttattttcttctccatcttctttgtttagaggtatgtcttagagatttgagttgttcattagctttggattgaatcttcactggtgttgattttcttatttttatttgctatgtttatttttttgtttttaataatgatgttgtttcaccaccttgctattgttatagtagtagggcttttaacattcatggtagagaattttagtcttgtttttttttcttttggacgtttttagttttgtttctttttgggacattggtaaaatatcaattagctcaaggtgtgtatgtgttagtagcataattatctttc

SEQ ID NO: 186194 - DNA, 7935 bp, Cannabis indica
tttttttttttttatgaaaactaaggcaaaggatttttcacatatgtatatggttttaaatgtattgcagaccaaaggaagggcacacgatgatgaagctattgagaaaatgttgaatgatttatcattaataaagaaatttgagtagcggcttcatctgctatttttatttactaatgtaatttaagaaatttagaatttggaagaattttttatcatgggatcatttctttgataattattatatcatccgcactttgttttaatgtattaatagggaacagagcgagtattaaaattttaaattatgcatgaatatttatgttatgctaaatgtaattatataataaaattattgtttttttttcttaatcattataaattaaatttaaattcattacacattataaattaaaagaattacgtaattaaactaaaattattgttaacaataaattttaaataatattacgaaattttataaagaaatttttattgcaattagcagagcaatttaaattacaattaaaaatcgtataataattcacattaaaatttaaaactactgaaaaaactactttaaagtaattcaaattgtaaaatatagtacatgggtaattcttctttttcaattgtttctttattttactaaagcacatcattattacaataattatgaaattttaagatagcatttctaaaaatttaatacaaagtgtaatagtaaaaaatatatataaaaaaaatatatatatattttgtaacaacaccaaaattgttgtaagacccgtaaagtatattaccttgtagtttttaagcgtaacttatgttaagaagttaacagctcatgttgagaagttttgaatcaaaggaggaagtaatgaaaatttacagaaagatcattgacagcaacaaaaacgtgaaagtctattaattgtgtgtaagtaaatatacacatggtgaagtagccctaaaacaataagctacccaacctcctcctactcctttcacaaggaaaagaaactatataatactggtgaattttgaaagaaaatgttccaattaattccatctcttggcatttttggacccttttgattttgctttcgcttgttgaaatgcctgcctcttctgtttcttcattgcttctttttcggcctaaatcaggacgcaactagaaatgttagcccacattgccattttatatttaggttttcagatacaactaaagcaaaggattacctttgacatctttgatttggctttgacttttggagccttttcttccagctctgcttcacgctctagctctcttgcccttgcatcaagattcttttctagataatactgcagggtgatgaaaattgagatcagaattcagaattcagaatcaagtaaaatcgacaaggagcggaagagagcacttacattgtaatcacctgcgtaattttgcaaactgcaatctttaacctccactactctattaactatctgctttataaagtatcgatcatgagaaactgtgatgacagtacctgaatactcgtttatggcatcctgatagaagaataagaaacttgtattaaaaagatgggatgataacttttatggaacatttgcagtagttaacagcataatggagagagatgagacacaaacctccagcatttcttttgaaggaatatccaagtgattagttggctcatccaaaactagaagtgtagaaggcttcaccatgaacttgcaaaaagcaagacgtgcctagaagaagagaaacattaatgttcgcataaaaccaaccgacaccaaatcattgatgaaagcaagatgattaaaacagtgttatacaaaatgagctcgtttcaatggtaagtaaaatctttgccggagattcataagttaaaaaactaacaaggtatcccagaaaacccaagcattgtcaggactgaacgataggaagaaaataagagttgtataacatagtaaaaacccaaagaataaaagacaaatttcacgctaaataataaagttcttcctaaagaatttatctaagacataatcgctaatgtagatttaattcttcagaatcatgcatgcatattttatttattttaaccagaaaaagaatgttgatttgtttaaaatccacatcaaaccattaagaaggcacacaacaaggttccatgaaatcataaagattgtctggtgttgctgcctgcttccaactagttcaaattagatatacaaaacacgaaacaacacatatcacgcaagcacccacaaaaacgagagaaaatgcctaataaaatagagacaagtgtgtttgagacagaactcataaattctctaccttctcaccaccacttagaagcgaaacctttctatcaagcatatcagctttgaaattacaacgcccaaggagaccctttatatcatcaagtctccagtcctcagcagcttcttctactgtctcaagcacagttttgtctaaatcaagagcttcggcctacgaggataatgaaactcaataagcagtcttgtactccattatgaaaaagccatgcctattagaccacccaacaatagcatatgatattatattcgcacctgattttgttcaaaatagtttggcaggacattatgctcccccagaagaacttcccctgcttttggtttctctaatcccattattagtttcagcaaagtactcttgccacatccattggggccaatgattgcaattttttctcccctttcaatagaaagatttgccttattaaataggacctgtcacaacacccatatcgcagttataattatgaatatatgcttgtgcatgtgtgcaaacatgtatatttgcacaagtactccataattattttcattcatttgtggtgtgaatcaactcacgttatcctcataagcaaattccaagttcttcattgttgcaacagatctcccgcttcttccacgctcaggaaacctgatcttcatttgttttctttgaaatggcttctcaatcaaatcctcttcttgaagcttctccagtttctgtggttatccaaattggaagacaaagaaaaacaagaacttgctaggtgagtgattaagttaaatatatacaccaaatgccataccgtgaaaataatcaagattatattgtgaaaaataggacagaataaaacaaaacaaaagttcccattgcaaggcaagcaagaaaatttaaatctttgatttaacattgtaacaaaaagttaagcggcagaattatgaaacatactgttaaaaagattgtattttaggtctgagcagtgtaagaatttataaaagtctagattgcatattgaagtgaaaacagaaagtagagatatagtaagaaaatcagggtggcagaaatagtaagaatagtgtagtaaatatggcaactgaagcttccagtagctgaaaataataaaccaatttctttttgcccaatatccaaaagaacttatgatggaacaacatattgcagcatttgaaaatgaaatatttcctcaacaactacaggtagaaatctaaaattactatttgtactgggatgataaatgaaactgtatgcattcttattatacatgtgaatgcattgtaccttttcagcagaagtagcacgaccagaatttgccccagcaccaagcctacttatcaagtctttcgtatgttctatttccttctgctgcttctcccaagctgcatactgagcctcaatccatgctgcttttgaaaggagatactcagaataatttccaacataagttcgagacacacccatatcagtttccactattttagtgcagagctgatcaagaaacgctctgtcatgggatatgataaccattggtacttcttgcttagcaagataaccttcaagccactcaattgtatcaagatcaagatgatttgtgggttcatccagtagtagtaaatctggatcctgaagaacaagattcaagacagtaaaaaacaatcaatcacaagctgaggatagcacaacagcaggaccaggtatgcaggaataaccgaagggactcaaagaaacactatatgcagtctcttagtcacctcataaactgtatcaaccacaatgatacaagaattgcagcattcaacaaacgaatagcactttgaagcaatccttagtattaaagtaaatacatttatattcctatctgttatagtttggtaataaggacttaaccttcactaaactaccattaataggttttgtcacataactgaaaggtgcacaaaaatctacttgcttgattttcctggcaaataatagaacctagcaagcataattatcgcaatcacttgcttgatcagcacctgtcatctagaacatttaagttattatatacctgaagtagaatcttcccaagagacatcctcatttgccatccactgctaaatgacgccaccaacctttctgaatcctctggtgaaaatccaagttccggcatcagtctgctgacttttgactcaacctcgtccaagtcaacagcctgtgcccgcctttgaagcgaatcaaactcatccaaaagctttcccatcaaatccaagtcatcaaccgtgctctccaaagccttctgcaccttctccaacttcgctgaaacctccatctcctccttaaacgcactagtgaattcttccctcaccgtcctgctcaacgaaacctcaaattcttgactcaaaaacgcaattttcatattggatttcgccttaatcacattcccagaatcaggttcctctaagccagcaataattctcatctgggttgttttcccagctccatttacaccaaccaaacccactttctcccccttcttcacctcccaattaatatccttcaaaacagtgacacccttataggtctttgtcacattttcaagcttaacaccagaagaaataccagaagccccattattcgaatgcttaccattacgtttccgatcaaactcatcaacagactcattggagaacaaggattcaatgtcctctttgctcatagtttcagaggacgattcttccacagccacagtggataaccgagctgtgatagaagaactggcctttcttggggtactaaaatttctggttttgataaaataattgttacttctagtggaatgagtagaattacgagttgagacagagcggggaagaggtggggcgacggtgtttcgggcatcgaccagggcggttccggcaaaaaagctggagcggaggtcgaggcggtgaagcttagcggctaagtccatgtttggggactaagaaagagtgggaaagttatggataaaacttcaaaataaaaacttccgtttgctttgcaggaatcaggaaatgaaacgaacaacactgtgagaggctctcctgttctgtacagagcaagggagagagatagccaatgaaaaaattcagatataatataataagattacaaatctccacctttttttaaattaaaaattaaaaacaaaaacaagcggttaagaatgtgaaaaataataagtaatgagattttatttttggctcttatttaatttggaattttcctatctttctttttcgagcgaaaatactatatagttctgttgacagtaacgccaatagttcttccaaaatttccaacactatttttttactcttacgagtttgtgacatagatttttatccaagcttttaaaaagaaataataataataattaggaatttactgaaagtgcttagacgaatgtataaaatataaatacaaagaaagtgaatggaaatactgaggttaaaaaagtaaaattgctgagacgcacaattttattttgtggctgggaaaaataaagataatgaaagttataggataacagagcccgtggcaaaaacaatttctgtggtgcttattaggtgggcggaatttcaagaattcgatacactcctgcaacttcgcgacacgtgtcattaattttgaggtaaaagaaagcccacgccatcacattcggagatattaaagaaaaatatgttcattactgccctaatggtttaagacacgtaaaaaaatgaaaaacaatgaccacaagtggaattcattagtatttgttaggacatacttgaaagtaatggatatatatccctttaactcctgacatttatgaagttcttaatgaaacttaataagtttatcaaattcttctatctacttttcaatatactattctctcaatattttatcgtgttcttttatttgcaacattattattaagagttatcagaaatgaaaagaatagtagaatatttgtttttctaaacaaaaacagttgcaattcagaaatgccaaaaatacccatgtaccaaaacctttttctcttttttttttttaaccaagtctcaaagaaatatcttggtcgcccccttgtcaaacagctacagccattaaagataatactcaactcaccatataaactagctgttattgttattattatttatcttgagaggtgaaagaacaaatcccaaagacattgctatcctgctgttcaagagcaagacattagcttcaagttaagaagtgatatcttggccaagaagagttcagagttaaaatcatacatcacaactccaattcttctaggcaaagagattaacacttcaccaacaactttgataagttacataagaaatatatcatatctgcaatcacacaaacttcaatttaatacctattccttcaaaaaataattcactgcacctgataaatggaaccaaacctcacaagaaaaaatttaaaagtcagcataaatggaacttcagagaaacacttgtcagtgagattttactcttttagaataagaattagagatgagacccccttcttgtacacaatatatgtatacacacatggtatatatctataactcacattactttcgataattgatatgactgttagtactttcttctaggggaagaacaaagtaacacatctgttgttactgaaattaagcaaacaagccatcaaaatttaagatgtaaccaacccaagtagtttcgctaacaagcaatataacaactgtttcaccaacaaatctagcaattaaagccaactcagttggcaatattatataccttaccaaagataggtccatcctttgagcaaactgaggacaagagcaacaagtgaagatcaactcggacttattaacatattaaaacctcactgggacatttttgttcaaagaggtagaatcaaatagaattggaacacttgcgaagttaaacaaattgcatctaacaacttaaaaaaaacaagacgctgaagaaatttgatttaataaacttagaaacaactaaaacaaatcttatataaaacttgtttaaaacacaacatttgaaatttttacaaaaagcatttttttgttcaagctcaataacttaaagagtacacaaattgatcattataattaagtactgaaatggttcagcttttaaacaagagaaaactacaaatatttttaaagggggtgggagaggaaaatgcaatcatgaaaatagaatttttcattttaagattttttaagattctgctctttgcaataaccatcagctccttaacttcagaagattcagcataccagtacaaaaagactgatacacctatgtggatctgcacattgaataaaaaaccataaagaaacaatttaaaaaaaaccaaatcatttcaaaaccgtaactcttttaaaacatttcggtacatgcaagcctaaaatgcaaaaatgatgagtggcgataagtatagtttacaaagaaattaatgctaaaaatgtgaggtattatccaaacttttaaatagcgcatgtgtttgtgatttgtcatgtttcaaactttcaattgatggaaatattaatacat

SEQ ID NO: 186195 - DNA, 3562 bp, Cannabis indica
taatctgaatgagccaaacaaaatcaaagttaagctcaagtatctgtctgcttttgcttcttctgtatcggttcctccgaagaacttccaacctgcaattttatagttaattcagaattaatgcgtgtttggaagttaccataactgcaattctagacagatgaaaagcgaaaggctacgaaattgtggatgtcaaatagcactttcgatattcattgtcatgtttggcagtacagttagtaatttacaaatgaaataaagcctatacatgtttcgatataattacactaattctcgcgcttgtcttagtgaattgaagttttttcaattacctctaattaaatagttagaatatagttttcgttccaaacaagctttccaaaaaaatcatgagaaattaatacattcttaattaaccttttagcttttctgtaagaagttacactaatgatcagttttctttcatttttattataatttcttaccaatgtcaatttgaagtttcatttctatgttacaatgcattaaagaaagaatgtatgaataaatttgcttatcaaaactaaaaagagagaatccaaactacttagggggcacattgttcgcgtttgtccgattgaaactttaatacaacttcttcttctaagttcaaatgactaagaaaaagatgtgttgagttcgggtttgggcgtgagaaaacaataaccgaactcctttaactgtgttgcagatttggatggatttcgggtattcatggctaggtcaatgctggcctaaccggtatgcctctagttccttatgaggctcagctttaagttttttttttcttttcttttctcctagactgactctaccaatattgtttctttcatcaaggccaaacaatgtaaatgaaaatcgaaaacatccagcttagcttaccattccagaaagttgatcattaatgtaagtcaatgatctcaacatagcatcaagtgtatctttagtgagttgaaacttcacttccacttcacctgaagaagatttcaaatagtcttgcagctaccaaaacaaaatgagaaaatgttttcggtgtaagaaagcaaaaaaattatgcatccttatgtaaactatacaaacagataagagaatgatagacagttataaattatctgcaaacctttagagagatgattgctactttctttgcttggtctgagctgcaattttccatggtccaagtcatcgacttgaggttcggaaaagatccctgcagattagttgaatagccatttattagaaccaaccaactgctcatttcagttcagctatagattgattgtatgtgcttgtccaaagaacaaaatacaataaaatcaaacccccaacaaaagaaaccgaaaccaaaaaacaaaacaagtaagagattcattcctcctaccatgttttcggggacaattggtgtggatgcagctccaataccagtctgatctaattgagcaataggatcattctggcgagccaaagtattcgacgaaggttggaaaggtgtgaaagtttgtggtgtgctcagtttataatgatatgaaacattggtccttggcaataaacgctagggaatttacaaaatgaataagagcataagaaataagaaactaagctattaaaatacaagcataaatcctgcatattcatcttctcatttagctcactttagttgacaatttctcattcacctcataactattttaattatacaaatattcaattttgatgtacacatgtaggaggagacaaatttacaaagacctcacactaatttactaatcaacctcactcaaaagtgtgttaaaatgtctcattttaaaacgttgcattaatccaagaaactttaagttggattaaggataaggaatggctgatggtggttcttgagacagattgtttagtagtggttcatgctattcacagtcaattatctatgagtttgatgtttgctctagtagttgatgattgtcgaaaactttttgatttgtaggtctctttattgtttatttatcggtctgctaatagaattgctcatagtttttgctatttgctaaagtttcttgttcttgtccaaatcgtataatttaaaacaccctttttttctttctttctaattcagaatggaagtatagcttaatctcaacagggcattgtgtctactaaagatagactcttagagagagctgaaattgaagcaaatattggaatttttgtacattcaagctgaaatatttttattatgtaatttgattcaatgcaagagtttcaatataatccactacataaaacttagtagtgaaacacaattgagattgagagagagagagagagagaggaacctgttcctttgaaacatcttgtttccactgactctgatacttctgaaacaaaatcaaaagaattctctgaagctcaataggcaaatcaggtggaacaaccttaagaacatcatctccactaaaatttccataagcacattttctaataacgaagacatgctaaaacctgttcaaaaatcacaaaagagcaaaactttctttcacaagagcacacaaaaaccaaaacccaccaagcaaaaaactccatttaagaagaaaaggaagaaattgactacagggtcgaggtctgagagagaagggagattgagaagggtcttgaaatgagacttgtcatggtgaccacggagaccagtcttcctggtttgccagagagctgagattaattggtcaagggcttcttctgacttcacccctgacagcttgtgtaattgctgatacagtgagttttctccaatctccattgttgtcttcttctttttcttttcttcttcttttattatatcactttaggtacctcaattttttgtttataacactttagtcctcatttttctttgttttgtagcacttatgtccctaatactagataatattttccctctactattatacttgtaggattttgttctcttaattattcttttgtaaaataatattctccaaattatggaaataatctgggaataattgggaatttctctcaaaggttatattttgagatattttatcgatatagctagaaatcacaggtatataattacagtataaaaatcttatttaattaaactaactgtaactaagtataataactttaaatactcatacactagttcttacgaatgtacaatattaaattttattattagataatgtaatttttttttcgtttataataattaaccccaatcagtctcacgtggagaaacattaaaattggcataagttcatcaaaacatgtacaaaaccttgttgaaaatagtgaaaatatttgtatatcatcatgacaagttcatcttattatttttaattacaataattatgccataatttaggaaatggtttatgagttagtgtcaagttattcataacaaatacaattaaaataattaagaaactaaaaagttaacataagttaattattaaatacttataagattcactttaattaacttaaaaaaacatgataatatctcatc

SEQ ID NO: 186196 - DNA, 1699 bp, Cannabis indica
attacagttcttttttttttttttttggaaaaaaaccactattgaaactattaggtctaggtgctttagtgtcttagatggaaaaaagagtagtcttaatttcctcatctgtgtatagttgacaaaaaaattgtttctacttattagtaagaactgcccttcttgcatcaattttctcataacttttctcttgtcactcaatttagaacacaataaattcttataaaagtctgaacaattgcctttacctccaactgcatgcgttatctttccaatctttttagtcatttgttaatgcataaacagtgattttctttttttttttgagctttaagatgtagtgaaaaagccttcagttagcatccccatcttgatttcaagctactagttttgacttctgctttcataatggaatgtaatcatttaggtagtgtttggttagaaataatgaaatgaaaaagaaacaatttttatttcattcacttgtttgtttgcatattaaagtattagaatattattctaatggaatagtcttttttgtattttagtgggatgactattctattttgaaatgaaaaaaaaaaaaaatcaattttttttttattatattttagattttattccattgtattcttatttctattcccactctcattcctattctcataatttcattcctcattaccataatatcttctgatattcttccctggcattaatttctagttgaattaaagtagagtttaagggatcctgctgaggctttacttgacaatcttgcaacttcagttcaactttaactgcaccatcttcaatatcccaaaatttttctttatcaatctcctttaatacatttttaagtcaatgtagtttcttacatagttaaaacatggggtaccttggagaacccaataagcttttactctgtccagaaaatcagaatgattatgccatatattgaagtagctaaaaggttttgctccatcgttcttaggataaaaaggataatagtgcaggggagtgatcaaaatcaccaatagaaaaaaaattcactgaagcagtagagaaattatcaagccaactcttaatatctgcgttgctgttgcaattatattatggtttttttgtctcttagtttttttagatgtaaaatattcgcacagtacaattgacggggaattacagtgattcataattttaagagcaataagggccaaaaaggttttggttcataatttgaacacagttattcgctctgactatactagacaaagagaagatttggatattagcagccgaacacgtggtgggttggccattatgagagctgacgcgatacgaaaccgtggtatatagctaaaaccagggatttatttaaatattcaatattcatcaatcatctctaaatcgatactatactatacttccaagtagtatttatatatataattatttaataataatgattcaaaatgcaaacaaatttattcattacatattgatacattatgagttgttataacatttggataccacatcaagttctccaaacatatatgtttcttattttaacaattttcctctccctaacttagaatctacgacattaccaccatataccgaagtataaagaattaattatcgttgtattatgctgcactaattagtataaatcttatatattgaaaaaccgtgtttt

SEQ ID NO: 186197 - DNA, 3579 bp, Cannabis indica
aataatctaagagtgtgtttgggattaacttagtaattattaggtagtaattacacattattttataataaaaggtgtgtttgggatatgaggtgagaattaccatgaattcttaatgtcttatttggaaaaatagttcatgattacacacaggccggtcgtgaaatttagtgggccatagaaaaaaaaaattattttgggctcttatttaaaaaaatgtggtatttttaaaaatcagtaaaaaataattatataattttaaaaggagaaaaaaaaaaattgggccccttggctaggtgggccctaagcacaggcctagtccgcgtatgcccaaggtagaaatagacttccaagaaactcatcgttccgggccttggcaatagggctcgcgatgaaaatattgagttagaactgtcgtgggcccagcctacacgaaatattagttccttaaaaagctcgttgctcaaaaaagggccaaagtaatatttttgtgtgaaactttatgtaataaggagaaagtagagttactttgtagaaatttggaatatgaaggttactttgttgttgaggcccataataggagtaggggtctcgctttattatggaaaaaccaagaggaggtcaacattgattctttctctacgaatcacattgacaacttagttcattttaaagtatggagagccaaaccgtagcttaaggaggaagacttgggatcttttaagaattttgtatgcacgatcaaaagagccttggtgtatcatgggtgatttcaataatgttcttcacaatagggaaaaaggttgggggtaaactttattcgacttggcttattatagaaggcttccaagaggtgactcaacaatgtggtttatgtgactttgatatgtatcggcatccttttacttgggaaaagtgtagagatacgatttcacggaattttgaacaattttattaatttttttttattatttacagaaaatacggtctttttatgttgtattcttattaatttgttgttgattttttgttatctgtattttatttttttattattgtttcgatattatttatatattatttttatatagttttcttgttgtttctatgaaaaatagtaaaaatatatttaaaaaaaaaaatctttaaacggaaaaatataagttttttacaaaaaaaaaaaatagtagctttttatttttaaaaaactccaaattaaaattattttgaaactgcactgaggcaccgattagtccctagtttctaagagataagttgagaaatatcgtttttttgtatcaattaatcaaaaatacccttatattatatttcattaaaatctatccacttttgtgattgagttatctaatatactcttacccattcacttaaatgtagtacatgatttatattaatctaaagaatataacagaacatcatatataaaagtgggtatatctcaatgaatatagaaatgataaagaaaaatgggtatacaatcccatttcctcattttcaaataatgattatgggctgaaatagaaagcccagcccagccgaagaaacccacaataaaattaagctttttaacaattttttttggtcaggagactttttaacattttttttaaacactttttaacaattaaatcaactaataataagagtaaaaatggtttagtaataaaaaaaaaaatgaaaaagaaagtggaaaaatggtttagcagaggttagagataggaatcggattatcttattcgggtttgggattccgatgtcgattagagaattcattctccaagaagtgccggattgggacgacgaactgctggccagggctcgatttaaggctttcagtggccaaaggtccgattggcaacccattttccttttctggagagatttgatcatcaacatcgctcgccactttcgcctccccctcctccgaccttcccaggtctgtctttttctttcttgttcttttttctttcttcttcttaaatatatctgtttttggatgacattccaccatatttgcttccctgatgatgaaggtaaaggattggttcaatcgaggagggttgaccccattatgcctcgaccatgtattggtgagtgagttaactttgatcccatccaccttctttcttgctttatgtattttcgttttttttttttggtttaaaagagagaaagaaatacacacatgggtttctcttttccattcaatctttttcttcagcttgtaatgtataatgaaggtgatattgtaccaagcgagcaacttgtggatcctacaacagggcaactctctcaaattttcagaaaagtaagaaatttgattgttagacccatcactactcctcaacccatcaatgcccaagatgttttcgttgtcatgtcagtgatgaaggataaagctacccaggttgtcaatcttttatctcaaactcattggacctgctcttgtattgtaactatggggaagtttcgagaaatatgcggtggtagaacagatgagtcttctgctctcttaagcttcctttcatcccaaggaaaggcacgccatctttctgtgaagaggggggacattattcaggtacatctagttctacttcattatatactgtttcttatatactttccttaacaacatgaagtaatgagtgcattgcgaatacttgcttaaagaatttagctaatagaagaaaggctgtcacttaccatgtcctcaaaattttagacaactcaatgtatgcgaggttataatatttttgcctattgtgagtgtgttttctggttcccaatacctaaatatacttgaaacattctgtacctttgactttttctttttgaagatgtcaaattgttactgtattttttcttattagggcgttaaagtctccctttcagaatcacctgtttctagtatttcaagtttagactatgatgttctgcacttgatctggactacagaaaagcttgagcaacaacttcttgtgattgaccaacgttgtgaaaggtaattagctttttgtgtatcttgattgtcagataaatcatgaatgataataagatgatccttgttgagtgttggaaagagttacactacctctatattaataccgacactgggagaaggaggttaattaattcttgtgaatgttgaatgagatgatgattctgtgatatataattgtttgagaacatagagatttattctagttggtaggaaagtctcacacattgaaatggcagcaggcgttcttaataatagaaggatttggcagaaaaatataaatttgtctttcccaaaaacattattatgcagtaattaagaccacttgccagtaaatcttaattatttatatagattacattaggcatataaattagaggactgttggagcttggatatatgtttatctgtttggtgaagttaggggtaaacgtgctagtttagtttggtctctttcacttttttgtttatattttagggaaaagaaaagatattttgttaaacgctgtcttatcctatgaatgtagtagatcttcaaacttttttttgttttttttttt

SEQ ID NO: 186198 - DNA, 3816 bp, Cannabis indica
aaatatcaaaaatcaaggatgatacttaatcaagctagctgaagttttaaaattctcaaaatataatttacactcttttgtacttgaatccaatatttcaatttttactcaaaagattaatctttttctttctaggtatgctgcaccagagcagtacatcatgagcacacaaactccatctgcaccctcagctccagtggcaacagcactttccccagtcctatggcaggtgaaactttgaaccatctcagcttttttttttgcttcacttttttatttctttctctaaagaaaaccgagtcggctcatgattttgaataaattattattttcagatgaatttgccggatagatttgacatctacagtactggtctcatattcctccaaatggtgagtgtcgaatgttactgaattaaagctgttagttctacacttatttactttaatagttgttatattaaagaaaaatatgatagtacgtattttctactatcatttgttatttgttaacgctttcaagctggaagaaaactgtgggattttaaaatgattaaatcagaagagcctaaactgtttaattcatgtccacgtgcatgtccttatgtacagactgcatccatatgtaacttctactgctaccactcattatgtaggatctcctctgcaacaaaatgacaaacaaatcttcttctttttcttcttcttgtaggcatttccaggactacgaacagacaacggcctcatacagttcaaccgtcagctcaaaaggtgtgactacgacttggttacatggaggaaaactgtggagcctcgggcctctgctgacctcaggaaagggtttgaacttttggacttggatgggggaatcgggtgggaacttctcacatcgatggttcgatacaaagcccgacaaagaaccagcgcaaaagcagctttagctcatccttacttcaaaagtgaaggccttttagctctgtctttcaggcaaaacctcaggctgcaactcttccgagcaacagaacaggactatgaagaagctgccaattggattattcgactaatggcaaaatcaggaactgagcaggatggtggcttcacagaagctcagctacaagaactcaaagtatgaaaatctgttatatcatatgatttatgtttgagtatgtaatacaataaggatctctaatcctttttaaattcttatttagtttgatcagaaaattgagccaaaaaagaaggctagtcctcaaaggaatgctcttgcttctgctcttcggtttcagagaaagatcataaagactctgaatgagagtgttgatgagcttaatagacgcaggaagagcctatggtggagtagatggattcccagagaggaatgaaagaggtgttaaaagtacatattataattttttttttaatttcttgtaaattttgtgtagcaatcaaaactgaccatctttgatcacaacagatctgatatgtacgatccttaagatacaagaaaattagctggaatctgatataaacatccctggaatcttttgaacacacgtgtaaattcttccatgggtaataaattaatatagcacagtattttaagaatggaaacaaagaaaatcattctttaactctatatctttatatgttgattttagagctttaattaaataaaacttgtgtaacttcccttgatactgctttgctcgccttataaataatatcttgcttgaatctaagtctcacttctactgtttggtttatattaataagggggaagaaaaactaaactaatctttatttattttctttattactattagtcttagtgtgaaaaatattggcagcaagagagttttttttatttatttttttcttcctccaatagtttaccttatctctttgagatcaacattattttgtaaaaaatcttttctttttgaacatttaagttgtacagctcttgatctagattagacctaatcacatgcaaacaatctctcaaagtagagtcatctcaaacacacaatacttttacagattcaaaatttaaataattagtccatataattaaaataatatctttcataagtctaatctaatcttcatttcaaccaattaagtagtccagatgggattatttggtgagatacatgaagcttctctatactcaataattcaacttatttgggtaacctttaattgtatgatatcaaactaactgaaagaaaattatccagcttagctatatacttacccttataatttgataacttactttcctagcacattgagaggttttttcaacaccaaaaatctctcataacattataaccatcaacgaccttgctggccttataaaaatagtcaacgtgcatacatataatccctttgtacgacactaaaaatctataaaaattaacaacataattaaacaataacatggtttatggaaagctaatttgctgtcaaacaaaggttacaacaagtgagaagacaactgtaattggtaatagaaatagtactatcccaactggtttttcacatgtttagagtccaaatatgtagctaattatgggcatttttgtttattttgaagttgatgggaaagaggtggaaggaaaaaacatgtggggttagggacttttaacttagtttcttaatgagaaagcaccatgaacaagcgtggtcatggagaatctaataaactatttgaatttgatattcaagtcatggaaatggagataaaataaatattgatttatatctatgttaagtctatcacaggcaacaccattgtaaatcacgagaactccacgtgcaactctgacctttcttgttctgtacagcccttttttttctttgtaaaagaaccctcaagcacacacattagacacagcttcaaactaaacctggagcaaaaagaaattataataataataaaaaaaaaactttgattacagagcttttcaaggcattaaatttatcactattgtccctagtttttctctgtttgaattcccaaagcattgggtgtcttgtactctaccatgagaatatgcttaaacgtgtgaaggccttgcaaaaagaggcttattctgacacagaaaatcagttcaaaaataaccatataaggtaaacaaaacagaacaagcactaaattttgttactgattaatattgtacctaaaataatatgttgaagacacaaactctgtatatatgtatatttatttatgcatgtaaacaacactactacatctcaccatgtatgtcccctctttacaccttttgaaaaaatcagatgaaaaaaaaaaaaagatgacaaagtaagctccttaaccgatactgacagcttaaatctactcaaagtagaatagaaaaatgaaaattgaagggttaatggaagttgatgccctcaaaaagatcattgaaatgggaagagcacgagactaagcaagtgggttttgcttgcttttcttttggtcaagccaaagcacatatataaaaatataacattaattaaacttaacaataaatccacacaaatatataatttaatcaaccacttaattgggttttgtgtctgctcttttattgaactcctcttcaaagtgatggaatcttggtcatcaccattatatatacacagatagatagatacaaatagcttcaccactcactcactcacttactcttctctatatctacataaaagtgaaatggtttattattgggtttctaatacgtaccttttgatccatttttataaaccaaaatggctttttaataaatatggcaatatatatatatatata

SEQ ID NO: 186199 - DNA, 2033 bp, Cannabis indica
tttatccccatctccccaagtaaacagtttcccagaaacgttactattacaaccagaagaagttccagtagaaacttcaaccaccgcagcagtgtgccaaacaccacaagatgtcctcacagttcgcagtcctttcaaagtttctacttccctagggacggctgtgctgtgacgatcaccatgtccaagggcaccaaaagttccatcaccaaatgtaaacaactgacctgctgacgtaacaaaagctgtatgccaaggtccagaagagataaatgacacttgagcagagtcctggccaatgagtttttttggtatccaatgactggtttcatttccatgcccgagaataccaaaatcacgagcaccatctccccaagtgtataaatctcctgaaactgttacagcacaggtgtgaagttccccacaagctactagctcaatctttgatccaccaagaccatcaatgagctttggatgagaaacatcttcctctactccatgtccaagtttgccacctgaaccctcaccccaactaaacagctgcttctgcttggtaattaacatggcgtgctgtctcccacaagcaatatcataaggatcaagcacagcagtagattccagagtctttggaagcaaagcatccattctgaccgccgtagtaccgattctgtggatgccaccacccaacagcccatcaccaattccttcaccccaaatgtaaacatcattgaagttatcaatgtcttcataaaaggatcccttgctggatgaactaaaggcactggattcactacttcgaaaagtatcagtagctgaagtgctactttgtgtatcatctaacccatcaggcgataacaagctgatatgttttgcaaatgactcagctctgttgtatcccttccctgatgcagtgcatgagaagacctcggcaaatgcctttcccaaactattctgagaagaattctcatacggaaccaaaattggttgactgccttctacatcctgtcgtaaaaatctatgagatagaaaatggtgatcagaaatcaaagataaaatatcttcaatgatatcatcacaaagaaaaccttgtcacttatatcatttctactgcatgacaggtctgatgttgattttctttgtgtagggatacatgggccatctattgttccactttcgcttcttgtttcactacaccaatgtctgttatcccgagaaatcaaggccctcagagcagcaagccagacttcagcttcatccttgtccttgcatatctgcccagttcaacaaattttcagaagtcttccatcaaatttaaggaataacttacgattgaaaacattgacacttcaactggacataaatatcttaagaaattaattggattactgtcaaagagtattgataagaaaaattgctggatacagaaggaaaaacgagcacacattcgccattttttcttgattatgacaaaagttctaattcaagacggctattaatatatgaagtcaacaagccaaccgtcaaattcagcaaaatagttaaaccatatcttcaggattgttatggagattagatatgatcaaaatgggaattcaacaatccattatcaatttatcatcaacgatagaagaacctttgaggagccaatgagctattctgaatacaagttaaaaggaaaatataataacactggcataaagcagctcaaacacttatattgtgtcatccaggaatcaaatggtttaagacataatatcaatattgatgaaaacaaagaatattcataatcagtaaacctgtttattacaatcagtaagtacaatgctgaaagcatggtgagaagagtaaaaatggaagagaaaaaaatttataagaacgaaccaagtccaaggacctgttactgtatatcagagaaaatgattgatattctttctccggctgaggatagcgctgaaatacagcctgaaatatacaaaactttctcacttgttattgtgtcaagctaatgcagtaaaatctaccacaaaaagatg

SEQ ID NO: 186200 - DNA, 2135 bp, Cannabis indica
acaatgcaccatacgttaaaagggggtgcatcaatgcactcctttctgtttcggcatctcaaagaattctttttgttaaatttttttcatgtttgtgtacgttgtaattatttaagtcatgttgcaaaattttaaaaaattcagaaaaatttaacacgccaaaaacatagttcaaacagtttgttgtatgcaagacttttttatatgtgaaattgattgtttggacactattttctttattgtaagttattccgaatttttagaaaaatttcaaagtgttttaaataattataacatacacgactataaataattataacatacacgactataaaaaataattatgtacatcactgtatatctttttaggggcattatagaatcaccaaataataataatctacctaaaaaaattatattttaaaaataaataaataaaatgaaatcacacgtttcttaattgtggttcccccattcaaacaaataacacctttccttctcctcctccattcaaacacttctcaaacaaactcacacacacttctctcataaccaattctcacaccataaatatacatatacatacataatatatatatatatatacacacacaaatacacttactcatccacatctctataatcaaagagagagagtagtgttcttctaataatatggctccaacaacaatatcaaccaccacactaaccgatttatcagcagaaaaaactctccaaaccaagttcgttagagacgaagacgagagacccaaagtcccttacaacaaattcagcactgaaattcccataatatccctcgccggaatctcatcaccggagaacagatcccacattcgtaacagaatcgttcaggcctgcgaagaatggggtatatttcaggtggttgatcacggcgtcgatgcctcactcatcggcgatatgactgatctttctcgccgattcttcgctcttccacctcaagataagctccgtttcgacatgtccggtggcaagaaaggcggttttatcgtctctagccacttacaggtatattatattaattgcttcattcatccactttttatggagaaaaaaaaatggtgataaacaacatgaaatcggttagagcatctgctgtcagagtgtcaaaaacctccatattatttgaaaatatattattttattttattttatttctttttcatattatttttttttgcaccttttgttctaataaaatagtggattaatagaaacatgcccccatatactatttttttaaatttatggtttgggtttctaaagtggttgtagttgcaatatggatttttatatatttttttttttgttgtcaatttaggttgcagccctaattgcaatagggatttctatgtaaaatttcgtaaaaatacaaaaaaaaaaaaaatgaaaaaagccctagaaacatctctaaaaattattaaaatagtattatattcttatttattatatattaaataaacaaattttcttagttatgataaaataatatcataataaaataagaaagggaagatataaagaatactatggtatgatatttttttgtagtattctttttcattccaataataagtattaattaaaaaatactaaaaatatatccatgtcatcaaacatccttcttaagattccagtaaaactactgtagctttgtaggaatctaactaatcacgtgttgacacgtggctcaaaaggttggatttcggtaaaacacctctcaagccacgtggcacttcaaggttagtgaattgcgatcaatctcatagtatcatttgactcagaataattaagacacatagcacgatataataaactattttttttagagcatattgtgatttgtcacattatttatcaaataaaaatgttaaattagatattcaaatgtactaatgatagtatttatgtaccattacaaatgacacttcttagtgtttgacatcttataataccacctaatattttttttaagccgaaataggatctttatgctcatacataatatgtacatttttttgttagttcaattctaataaaagtttcatttggtattgattaaaaaaaaaaaaaaacttaattactttcttttttaa

SEQ ID NO: 186201 - DNA, 4733 bp, Cannabis indica
aaacaataaagatcagaataaaaacatactaaatcaaataaaaaacaaaacagataatgggtaaagtcgttaagacaaaattgattcataatcaatttcaaaagtaaaaactgtggtaaccctttacatttgcagagcatatatatatttaccactgctgctaatatcatcatcaagcaaacgatatccaaaaaaagactttcacctgagaccccttaaacttttcaccaaaatgaactcttatcaagtaaattccatcagaaaaactaaccccattctccaaccaccaaagtccaaactgaaccaaaaaagagttagaacaagcttataagagatctgatttctaaacgtagaacataacatctttcacattatctttaatcatcgggagagggcggaatgttttaggaccagctctaccaccacttgatgacgatgcagactcggaataatctccttcaatgtaataccgagcgcgaaatgctgccaagtgagcataatatgctggaggaactgcaatcgcaaacaatcaacaattactacataacagtgatgaaaatactgaaagggtaagtagtgtcaaagacacagctcagctcttaccgatggacactgctttcgtacatcttgcatacctggaaaaccaaaattcaggttgttaagaaaaaataaacttgaaaaaacaaagaacggaaaatgaaatggagaacaaggaaaaaggaatatttacgtgtaacagagattgttcgtgagaacttgcaaggcatcggcagtgaatttgttttcatcgtacaagacatggtaatgagaaggacgactagttccctgaaaaagtacataagaatgagcaaccattaatattttttctatgttaaaaaaataagacaattagatttctaaatgataataaaatttggacctgaattccagcatgactattgaggtagaaatcaaattcagtaggatggcagatttgggtgtcaacaacagtgcctataacaaataatcaaatcaattggatttccctggtaatttttagttatattgatgtattggtacgctatgtattaaggaaaaaactaaacctggttggatgttgccactcctgtccatcgaatcacggttgttgtaatcagctgggaaaaggcgagtatgatgccttttctgaacaacaacaaacgtaactcgaggaagatatccttcctcaagcgaagaacatgcctgtacatgaatgaacaaactataatcagtataagtcacagacatgttataggactcgatcatttgatggtaagagtaataaatacctttcttatggcatccatctcgtaaagcagaacctgactgaactgcccttcactaacaccatctctgccaaagagcacaaaacacagtcaattaaagcaaagtaatgaaaaattaaatttttactgaggtaaataaataacctgtagaatataatcctagctggtttgactccagttgctcttctgaaagaaatcaagtgttccctgtttgaggaagaaaaaaaattatttagtaaaatatacaataggagagtctcaaaagttcaataaatgtaaacatggttactctcaccttatcattcctccatgttttttatcaccagtagtttctttataaaggtcttggatgatctcttcacggtgctgctgtgcagagaccaaggctctatatttggacacctcaggccaatccattgaagcaacaacctgattcaagtaaaagcaattgagatgttatctctcgcagaaaaaatagagcaaaaagactattaattagtaattacttacagctgctatggaagggctagaatcctctccaggttgtggatgtgttacatcagcaccgaagattatggttgggacatcagacacaaaaggaattttcctgtttagagcatcacttaacacggtattccggccaccaacctatacaaaacagatataaaaataaacaacacagtaacaccaactagaacaaataatgaatcgatatcgaattcaggtaaatgaaccttatggttaattttcaaggaaagattctccaaatactgtttattgagctttacagcctgtttaggttgacagcactgtgaaacaattccaagctcagtttcacatattcgtttaatcgtccctgaaaaagacaaacaaggtttatttagcaaacagaaaattccaaacttcatatttacaagtcttggtcatgttgctcaccatatgtgccagtaaaatcaggcaagataacaatcaacagctgcaattgtttgtttgccttcttgcattgttcgtgaacagatctcaaagcgttctcaatttgatttgcaggccaagcagagcagggaattactggtctggtttgaaacaccttcaaggtatccaacatgataaaatgtcattcataaaaaatcaattatgcaatttcacaataaaagaaatgagacaaaaacatccagcagcaatcataccatcccacgactgaggcacatattgaccaattctggacaaaatcggttgtgtatatccgcattgtaccgcgagaagttcacacatgtccaattatctactcggcctccattgatcattttctgtaattacccaaaacaaaaaataaagagatgaatcataaacctcttcacaaacatcataacaaaaagcaaaaaggaaaaccattaatacatataaagatatatcatttactttgttgatcatgttccattgcccaaaacggggttgttcactagcatccctcccagtaccatggtaaagaagcttcacacattaaacaagttagttccatacattaaaaaaaaactaataataaaataaagaagttcaaattgaatgtgtaaaatctaaattgaaaataccaatggtggagtcaaaactcgagcttgaactgaagtcatatcattggcaacattgataccaaagtcctgaacaatctcctgcttgctgaaattgttttgctgaacagtttgtcgaatgcttccttccctatcaattggtctttgacaagttgcccttaacagattggttacttgcctttcgttaagtttcttggagtatctttgcccctcaacaatggtacaaatctataaaatacaccacatttagaaatataacaataaaaatacttgttatccataagatctttagaagacaaaagcacaatgttattaaaactatcaaaggaacctccattggcaagtagataggcttggtagcactccctgcttgcagagcaggccatgtcacatatttcagtctgattttgtacttctgttgaaaataagtggcaaccgaaatctgctttggctgatcatcaagagtaaacctaaaatgcagagaatagtttaaatcaaacaatgaaaaatcaaatgacaacacgacacagcaaatacaagaatagaatagtaagatcatgacatataagcatactcacatcaaattgttcagaggctcattcgataccccagtaatcttatacgtccttgtgttctgtaaatgactacaagctactttgatccctctcaaattctttttcaactgtagcattgaatgaagaaatatattaatgaaaaaaacgctcaataatctaaatcaactgagaaactataaacaactaaatacctgaactcggacttgatcctgcaatggtcgtgagtcgtctctcaagttaaagtgtttgaaaacaaaatcaattacattcaatggttcataaaaagctcttgctgacacatctacaaaacaatttgaatcataaaaagaattgtcaggccaagaacatctacacaaaacagcataaaaactgtaaataagatatgatgcaataccgatattgagtgaaagccccaattgagttggccttaaactttgatagtatcctttccaatacattatcccatctccaagctcacccttaccagggcggcccagtgtgggatgaaaaaaggacctccccacaactgtatacctacagtaacaatatatacacacattcaagccactttagaacaatacatagcacaaagcatacccaaacaaaaataaaggaagactcttacagttcggatggagcccctctgagagcaacatccagagcttgtagagtctcctgaggagcatcaagttgcctgctctgtaaaaactgccggagatgatgtaaatccggcttagaagcaaacttgatcacaaccgtaaactcacgtttcctgcggctacttaaggccaaaacatgaaatcagaaaaataaaaatacaaacaacacaaaatcaatgaaagttaaaatgaaatatacatatataatacctttttgtagaactggagcctccaggtccagtgtcattgtcagctaactcgattttaaactcttttgaactaaacggcaactctccagcagtgtagatagactttctaccgtcataagcaactctcaggttgcctaagtgagaagcacggtaaagattccctaattggtttataatctctctagttactttcttagatgtaacctcaggcgttatagttacctgtaaaatgagtgataagtcaatgcaaacagatgtatatacattgtgatacgaaaacatatattacaatttcaaaaaaaatatgtatatctattaagattgcagaacaaatacataaccgatcacacagagaagatgaacaaagtttacaagatatcaaaaacgtattactaattca

SEQ ID NO: 186202 - DNA, 1104 bp, Cannabis indica
tttttaaaattaaaaactaatctacaacaaaatgaaccttttaagaatttttgctacgaatttcccaaatgtttaaaatgttgtatagctgtggaataaatgaatgattgcaattttgcacctctcatatattgtgatatgtagtgtacttgatacaaatgttttttttttcttttagaggcattcacattaatttgtagtttcaactattccaccttctccacacaactttcatgattcatcatatcatatttcatatcaatctttgtcaatgtacaaaccccgtgaagctccaaggtctcaatcctattatataatggatatttatttcataaatatatatatatatttccaatctatgtggtcattcatttactgcatacagatccttacaattttgacctgttatcaaccaatctgaaacgaagatcatatgtacctaacattggtgtatgtggaaaagacacacatgtcaatcttaagagcttggttgtccctattctagtgtaactttagcactactaatttctttattattattagtagtagtattattattgtatttccattaattcattacatcaaatattatagaacacaatatattttaaaatatagcatagcataaaaagacatacaaaatttagtatactatatatatatatatataaattaaatagattataacttaatggaacattaaaaaaaatatattaactttgctaagaatttgtctatattagtgaatcattatattctcacaaattcaaagatttgatataacacaacttaaaatattaaattattatctaatataattttagacatcttatttcatttttagaatttttaagaaaacatagcatatatatgtttttcacacattattatggttgctaattagaggcacaattttattgacacgtgacactataatataagagttattccaatatatagttgggttgtgcattaaaaaataatgaaaggcaaagtgatatatctcttatattatatatgattatttatagaaaattatttatttaacaattttttttttatttttttgttataattaatagataaagctaatccggttaaatt

SEQ ID NO: 186203 - DNA, 1559 bp, Cannabis indica
gtcctcctcctcctttgcttcttcaaatgtagtcttatctatttattcaaggcataaaagaaataaaaagcttttatagattttataagatttgatttttatgatcttgaatgtgtttttcatttcttagctttattattggatgagactagagaagaaatggattttgagttgaattgaatggtagatttatatatgaatgcaaggtgtataatgtggaccccactcaataactcaatagatgactattgtggataatgaaagtgactcaatttcaatgtgtcttcatttcaaacaagatacaattttttttagagataacccatataaactctaaatatattttatgtctttattaattgagatgcataaccttaatgttttgaaaaatagtaacaattaagagaagggtttctttcaaatattagaaaatgatttcttaacctttatgatataataggaagcaacctatatattagacaacaagacaaagacaatagtaaatttcaaaaaatgacataaaagggtatctcaaaacttatatttttctttttggtgtgataacttttgcatcataataagaataagaaaccaatacaatttttattcttaacctctctctatgtcactattagctaattgtatccctagatttgttatgtgttatgtttgttctttggattcttagcttagcttgtatttatacatgtataatgtatttactttatatttgagaagaagcaaaagaaaaatacctttttgtgtagcattaaccaatcaagaaagaatgaaataattcaaggaagagagaatgaaaaaaaaaaaaaagaaaaaaaaaccaattaagaaataaagaatcttgaattggcccaatagaattgtgaatcacattgaccaatctcaaaagagaagtaaaaaccaaatattccttgcttgttcttattcttctccaaaatatgaaactttttggatttgaaaaagataatactattgaaatataactttcaatttttaattagagtaaagattagtttaaattaaatattgttttcactaaacacatagagagctatatttatcggttataatgattgatgacaaggaaagacatgtataaactattgttatttagggcttaaaaagtgccaaatagtttcttatgaaaatttgtaacttttgaaataacaccaatcacaatgcttattcaaaagaatcacaaataaaataatagtaaaaactaaaaaagtactttttttaattttcttttctgaagaagttgtttgattggaatggtatcaatataaccattaggttattgtgagctttggataaaaaggaaaagttttctttaggttttttggataatttttttatttgttttggcattaagggtatttttttttttcaagatctatttattatagttataaattttaaattttttttgaataatataccgtataaaaaataaagtttaaatagttgattacatatgtatgaaaaaaaaataagagaattactctactatactatttttttaattttttttttacttttaa

SEQ ID NO: 186204 - DNA, 1652 bp, Cannabis indica
attaatccaaccaagggactggaatatcggaaatgcagccttaatgggtcccattatatgtgaagatcttgccaaattatatcgtcggcaagatctagtcacaatgaaaatatgctaaatacaggttagggatgatgatgatttgaacctaaaaacagttatgtcgaaacccctttataggttcaagttattgtcagcttaagtcttggccactttggttcaaagattatggtacagtaaggagattgcataagattcagaagatctcgccaaaaataataaatgtgtcgtttgcatgaactagctaggcttacaataattccaaattaacaaatccaacaccaacatatgatgatgttttggccaattcattttggcaactttggttgaggacaaaaatgatcagacagcactaggatttatgaaatgtttaaatttacatcatcacagcttatcatagccaaaccaaagactgaagtaatggcaagtaagtaaactgagacccaggtaagtttgtgaattacttctcatttttaagttgtttgagataaatatatatatgtaggtacaatgtataaataacatgaattgaatatgaataccgaacgaaaatttaattcaaggaagacaaaagccaagttcgtctttgttacggctgcattaaacacatgctgaacaaacgcatatcatgcagcaaatcttgactataagcagatatttgtacaatgactgtattgacaagatctaaattatagagttttgaagttctaattgatatacccaagaccaagaagatacagaaaaaaataagtatatgaattcgctttcctgttcaaaattgtggaatacaatcaaaactacagttaatctaccttctagtattcattaaaatggatggcacctactttccacacaatgaatgtggtagcaaacattacagtgctgataaacacgaatgagaagataataacaaataaatcattaccccctggaaactggaaagtgagtccctttggtggcatccctcgtttactgtcatcaagcatatttccaggggcttcaggaagtccctttttcttcccacgatcactttctctaatggcatctaatactttgctgctcatatctgatgaagatttagctgcccttgattcagtgttgttgtaacgattcaaaacccgggctgctcttagtctctcccttgctgtcagcggtgaccttttcggtttctctagctggctggttgctgatgatgtctcctcttgatttacagaagctgatgagctagtgttggaagcctcgggggcaccggaatcacctgatgaaatcacatcattggagagcaatcttcccgcgttgccagggccaccatcattgccttctgctgtaagctgatcaccttcagcaactgaaacataaaactccctccctttttcctttacaaatcttctcgaccaaaatgcacctacccagggctttccttggcagaccacccttgacaatgaagctgcagcagcagacgattttgagacattctggtactcacttcgcaacttctaaagaagaaaaacataaaaacatactcaataatttattaaacaaagatatagtcttcaaatggaggttctgaatcatctaagcacaaaaagttt

SEQ ID NO: 186205 - DNA, 3500 bp, Cannabis indica
gaagaaaagggtcaaaatattggtttgggccggaaaatagcaggcccgacccagcggcagaaagcccatttctggcttcttccccagttcaccttcacctgcttctgtacagactacattctccctggccattgttgtcttctcttctcctctacatttgtggacacttacaggccaacgcagcctcttatttcttatacgctatctttagaggaattgtagaaaacttttgtttcaaaggttttcgtttggcaggaaacagagaacgaacctaacaaaaagcataatttgaatggagtgcgtggttcagggaattattgagacacaggtgagattaagaccatttctcccatcttaatgttttcttaccaataattctgttagaatttggtgatatatatattttggtaacggtatttgaagtttggaggcaaaggaaatgctgattgatctattttcgtccgaccataaataataattttttgtaatttttgttttgtttgaatgtgttatttgatttaatttatttgttttaagaaagcagaagaaagaaggaagaatagcttgagaagcaaaaggttaatgggttaaattgtacgtaattacagaagcaggaaaaagtgaaaagagaaagtatttttatacatgtctttatatgtctagtctggtgtagttttatggatctcttctgttttgatatatcataatatatcccacctctttaggcatcattaatttgaatagaacaagaacttactcaactctacggcctaattcatttaagcatttcttgtaaatgctctgtttacacataattggcaatcttcattgtaattgcttgagatgcttagtagttcacatcactcatttctttatgcatatatcagatttgaatttcaagtttagattggtatctctattatttcgttggaaaagaaaagaatccttaaacaagaaatttctccgtcttttcatggtgcagcatgttgaggcccttgagattcttcttcagggtctttgtggtgttcatatagaacgtctaagaatccatgagatgttccttaaaagtggcccaaaccttggtgagtgggtgggattactagttttttctatttattttgcattcaaatgggagatgtcttgttgactaagagataatatcctattttttagggactgtaccttccgaggtccggcttctatgtgaccttgaacaggccgaaccaccatggtaattctgagatttcttctcaaatttaagtacttccctgtttttctttcttcttaaaaacacaagttcacagtaatcttcaaatctttaggactgttaggcatgtagggggttcaatgaggggtgcaggtgctgatcagatttcagttgtagtcaggaccgtggtggaaagcaaagcaagcaagaatgtgcttcgtttattttttgcacttggctacaagttggatcatgaattactaaaagtgggatttgcctttaatttccaaagaggtgctaaaattaccgtcactgtttcatcagttaataaaatgctaaagctacatgctactgatgaggctgtgcctgtaactcctggaatacagttggttgaagtgacagccccagcaacctccgaaaactattctgaagttgcttctgcaatatcctcattttgcgaatatctagctccgtaagattttgttttgtttttctgagtctatctttctcgtaggactgacatcactttcttatattaaaagaaagcctgaatagttaattcttgtgtctagcaattggtagccccgtatggatcctaggaataagaaggcatgattggttgatcacaactgtcaatgagtgtccgtttgtttagctcaataatatttttgcaagatatgattcataatagaggttgtttgacagacccagtttattttgacctcaacaagtagatgagctaaaaattgatcagtaaaaacatacttaggcttgtcttcctttatctagtttgatttttcaattgtaaccgcacaatcatacggtgttatttgtttctcaggctcctgcatttgtcaaaaccgggtatttcaactggggttgttcccactgctgccgctgccgttgcatctcttatgtcagatggtgggggcacaactttatagcagtaacttttaaatcgttcagaagcttgttcttgttggggttttctttctttttgcatgccacttttatcatcaaacaagattctcagtcatggctgatcaagaagaatcatagttgttatatacaatacttgaactgtaaagtaaattattagcatagaatcttattcgagatgtgtacatgtagataaacacattcaggctatcattaactattaaaactgtttcggttgattacacatgtcaactttaactttagatcgatatataatcatcatcagcagcatatatatatatgtaataatgtttctagtaacgtacatacaaagatacacaaacaagaaagagaatgtagacataacaattcctcggcttaaaacaagttaaaaagagataactattataaaagaagcaacacaagcaataaatattaatgtagcctctcaattatttaaaagttagacccacactctgcactgcatggctcctcctgccaaaaaaacagattatgataagtcgatggtcattggaaaattgtgacacatctggcacctagtggtggccaaggaattcataaagctgcatagctcacaggaccagtaagttccattagactccacctcagttagaccatcttccaaagctctaaccaagttcttaaagtagttcccaattacagatgtcaattcagctagcttcaaacgatagtccatgaattcctgaaccgaagaaccttcaccatcaagatacttctctagctccttctcagcacagtaatgaagcctttccaagctgaactctgcctcaccctgcaagtactcaaaaaactgttttttagcccattgatgctgagggaagtaatacccatatgcataactccattgaagcactcgtctgcatcttataatctgttgccatgcctctgttatgaatctcagaagtggcttctcttggccatacaagagactaagcctatctaaatattcagcttgtactaggcgtatggcctccacagctttctgcctcgatcttaaattggctacccaacggttatagtaatgagtgtatttgagcaaagacgccttcaccatctctcttcttttgatgtcattctcatcagcttcaggagcaggagcctctggtaagtatttgttgcaagaatggaatgattttgtggtccattcaccaagacaatgccagcaaaattcatatctgcatggagcagcacacctcatgtgattacatccatggtctttctcgatcagccgcttgcattggggacaagacttggtattgaccagaatccaattcgcattctcagactcgtccttgttcttcatgttccattt

SEQ ID NO: 186206 - DNA, 2024 bp, Cannabis indica
tctatccaataactaaattaaatctggtggcattcactaacccttttcggtcattgttattataacattatcttatttggttgtaaagagaggatttagtgaaccctccacactcaatatcagtccatgtcactggagaccaaataatcattttataccatattccatgattattttttatgttattttcccttcttttagaaacacaaaccaaactattcaagctatgatgtaaaccaacacgttaaaaaataataattaatgttcagatcattacttttaagaaaagatgttccgaccagacacagttcaaggaataatgagaaaaaaatgttcaaacatatcagtatgtctaagtggaaaaataaccacaaaaatacatacataagatcacacaaatcacataataatgtagtacctacacacccatgcactttaagcagaccacaatatttacatctattcaatattattaaagcataagcaaaatagagtatatgacaagccaacaacaccttgccctgtttgtaggatttctttggttccagtcattaaatgggccaaaaacttagaacgagcagcatcatttgaaaacaaagaacgtcttacagaagctagtcgcaccaagcactccagtgcctagaaacaacaatagtgaaaacccaagagaactgatttactgcagcaagcaacacataaatctaaaaagaaattcacatttcaaagaaatataccatgctgctaaaatgacatcttactgtttcctcagaacaagaaaattatgttttacatgttttataaataaaagaactgacataaaatcattaatttaacatttgtttgattcatataagaaagccaaaatgttggcttacagtttttcaattatttgagaattacaagtgttatcagctatctagaaaataccagaaaacacctaactaaatgatcaaatgatcaagtgttaattgtcagatggttatcaattattagtattatatagttagatcatgataatatcctcaaaatgaaaatagtacgttatgaagaaaattgtgaaatctaagaacacggaaaagcaacagacacaatgagaaacaaaaaatataggagcaacagaacaacttcaagacacctaataaaatctatcaggtaaaggacgaatgtggacttcaatgtcatatcacaattttcattctttcaaaaataattttaattctctgtttcaaaaaaataaaataccacaatcctctctccataccccacaactgcaacacaaaagaaaaacaatattctgtctacgtctattgatttttctcattgacagcacagcacacaacaaaatcttagtgttaatttctaaaatcatcacaataactttatcaactctacgaatttagttatgaaatggtgatttaaagaaaaaaaaaagtggtgtcatagcaagggtaggatgcgggtcagcaatcagacttcatttaaaagaccgtggaagcttaattttggttgttaccctaaattcctcaattgtgatgagatctataataagaaatggaactaggccactagaagctggtttcctatatttatatacaatatgttagttgaagaaaagagtgatatctgagctttatttgactcgtaggggagcaatggatgatttttcttcttgaaatgtttcattttgaagaagtccatatggcaagtgaattcccaattagtgatatccatataaagtccatagcaagtgaattcccatcacagtgttttagttgtacacagtctacagagcacatcttcttacattctcaatttgcagggaatttttatggcctaagtttctcgctaaatttaacatacaattaattgttccaaagagctgttagaaaatgatggcccaagagtttgtaaaagactttaattttttattctttattctctattcgtttaagttgtggtgtgctggccatttggatggaaaggaatggtagtaggactttcaagataaggagaatgagatggag

SEQ ID NO: 186207 - DNA, 3103 bp, Cannabis indica
ttagtacataaacaatcactgaaatagtaaaattgaatgaaattagataaaagtccttaaatctaacaatctcaatagtcgagagagcatttttaacgaccttaaaagttcacagtgctcaaaaataaaatatttaaaatttaaaagaataaaattaaaatatttttgtcaatttaaaagatgtcaaaaataaaatttacaattatgaattgtttacagtgctcaaaaatatatttaaaatttttgaacatgagtggtggtaaactgaaatacatgttagaaagtgaaagtgtgataaataaattatgatgaggtttggtgtatagtaagatgcatgagtttccatctcaaaattaattagcaattagaatagtaatacatgcatctaatatatattattatcttttttgctcactaatcttagacgactctatcacaagtgatacttttagcttgcaaaaactctttttactcataatcaccaaatcacaaataattcttttgactttttttttggatcgcttattgaatttgaataggatacccgttagagtttattttagctctgataccatgttacaatgtgaaagtatgataataccatatataactataacgaacatcgccataaaaaattaaaaaaatatttcggcatgtattttaggacgagaaggttaaactaggaggttgagagtagctattctcatgtctaaattctaaactaatcaatctggaaactgggtatgtttttttaaaaaaagatttaaatcataacacaaataattttatacaacaatgatatgaattaaataaaaaattaagtatttttttttatcaaaaagggatcaggtggtgcacatcttattcttaactttttcagcttaatagcaatttcagagaccactaaggagtcaattgtagcttatgcactttccctaaggtagttaccaaccaaatccctctcaagcaatatccagggcacaaatacttgttacttctaaatgagcaccatttttaaggcccacgataagcgctaccacgagaactcaaactccaaaaggcaatcaaataaggaatttaacgaaaatcatccaactaactacaccatacattcaattagtttttttttgtttttcttcagaaaagaaaatatgatatttgaattttgtattaaaattgctttcttttgtaagatatttgaattttgtattaaaattacttttttttttaaaaaaataattttatattaaaatcattcccgataggatatataaaagaaattattagaattattgttatagatgaaaataataataataataataataaaagtaaaaaaggggattatataatatatagattctttctttgcaagtgcacccaccggcaaagagaaacgcagggaaggtgaggcgagctttagttgcgcccattcatagcttttgtcgcctcagaatccaaatccccaaaaccatttttagaataccattttcacaatcttcttttctcaattccaagacttccccaatcctatttcataccttcttttattcacaactctttccctcccctgatcgatcaccttcatctaggtactttctcttttcttctcttatctctctgtatataaatatatttatctattttatatatttatatatatgtatgtatgtatgtatttctcatgtactgttgaccttttgatttgaccagaatttgataactttgctgcgaaattgatatatatttttttttcttcaaagggtatatcgggtttgatcgatttagtacggctttttgttttgatgattgatttatacatggggttttggtaaaattgatcatcgattatcttttttaccttgttcatgttaattttttcttcttctgaaacgcatgttatttgtttttagctggaaagaatgggtgtttgttttattggtctaacatttatgaaaacgttttgttacttgcactatattctaaatcagtagtatatttttctatgggctgattatccgtatttatttttcccttagctttaacggaaataatttctcctgatttccatatgggccaaactatagtgttcctttttatgacaaagagataattgcagggggtttggggaggttgtgggtatggatgatctctttcaaaggcttaaatggtgataagtttgtcaaaattctttactttctattttttattttaaaaaaaaatgaacaaaataaaaacccaatggaacaattaactgcatggcaacttttgtataagtactcaattatttgctggatatttaatatataattttgagttagttgtataatctgaagtgtttagctacctatttcagtcaaacaattagcttgggtgcatgtggcatacgttatagttaatttggttacgagtttgctgaagaaagagcattttggtgtttgttattgggaatttgatcgcagttgtttaatgttgttgtgttctgcatacaggtgaagaaaggaatcggcctcaatcttaaagggcatttcagaggagggaagagggagggtacttgttcgtggaggctacttctgcgagctttgggtcctctctccttctttgaaaggagtattaagctgttttagaggaatgttggattaatagtttgaccgcgtttgttttctttcaatgagttgaagaattgttgtgttggattttgagtagtgtgaagctggcataatgggttctgtttgttgctgcttgaatgtggacgattttgaagattacgtgaatccaaacagttctatatacaggaactgtatgtgtcttagttgctttattcagaatttcataaatgtggtatgattttttcatccccttttgtaaatttcattacattttgactcgtatatctctagttctttttgtgtttgctttctttgtgagataaccttcgcaaaagaattagtgtaaatgcatcttccactctttccccccttctccaattcctcatgattgtcattagttattctagcatgctactgtttttgggagcctcatatgggaatgagggaaagagtattgcaggaagaaagttatgaattttcactgttctaaattt

SEQ ID NO: 186208 - DNA, 1723 bp, Cannabis indica
aaaaaaaaaaaagctttcatcttagtgctcactcatctagttcagtaaaacccatttcctttttttttatttggagaatcagtagaacccatttctatttgtctttaataattgaaattgagcaagttcaaattagtctgttcttttccggagaccaagctcactgctcacacattactggcttatttcttgtgaagaacatgaccaatatttacaaccaagctatacaaaatcaaatgacataaaaggaatgcatttattgacaaaaatgacaaataaattttcctcacatttataacattttaaaacagcgcaacacaaagaagaagaacaaaaaagtaaacatatatactgtatgtgggagaaattcaaacccgacagcagttacaaggttggtcattgtgtcatgagttgctcgcctaacttccctgttatagtccatcaacagtcttttgtattcaaatgcctgagaatacaaaaacaaaactataaaataaacaaaagcttcaaaatctattatgagaataaaattcagaaacttcataaccaatcacgataataaaaaaagacaaccgctgatagagttcttcacttgagtaaacatgctaatatagataaatataggcatcaagaggccccgaaactatacccattgtggaattacggtcactaagtccttcccaggcttttccttgatcaactcagatagagatgataatgctttaagctgttgaaaaacagtgaacgaaatgaattatcgaaactttaactacagaggcaagcacacacacataaatatatataagcatgttgaaagtaaagaaaatagaaattttctgcgaatagtaaacacacaaaaatcataaacaaattttaacaggtaaaccttcgtagtcggatctttcctcgcaagcctcttcaaatgaactgccacttcactatctatatcctataaaatccaaaacagaaatcacctgtgaattaaatatatacacattcttataatgcataaagattaaaattttcaacttcagacttattaataaaccaaattcaaatgaaaaagtaaaagtaaaatggaagcgtacctgaaaggaagcagaatcctcgccagcgagagaagaatcgaggcgagacctaccgatatagccgccaaatcccacagctgcagtagaacccgacggcaaaagcgatgccgctagactgtaaaaaattcgagtatatacaatatatcggatttatacacacaaatacatatatatatatatatgcaaacacgtgtgttcttgataatgaatacatatataaacaaatacctgctgcttgaagggcgagccttgcttcttgctccttctcctttttgcctgcccatcttagtagttgatacaaaagactcggcggtggaaatgggtttgaggttggggtttaagctttggtagggaaacccttcttttctgttaaagaaaagccgtcgttcgtttgagtcagcgacggtgcattgaagaggaagagagggccgagagagatcgatacttttggatccactgcggacaggtttatgatttgcttggcgcggcactaatcgtatgtggagatccgcatatcaaaagcggtagatacttgttgaatatttttaaatacatttctttaaaatcacatataggtgtgcatatttagctcaatcattgttaaaaagtatttttttcatcattctcatcatata

SEQ ID NO: 186209 - DNA, 4285 bp, Cannabis indica
tattttatatgaaaacctcatatttggacatcgaaccttttatctctctcgcctccatagatgtttgtaaaccatgttagctgttcttatatcttaaaagaaaatgttctgaataactgttgggtaatatcttctatttgattaaatgtttggttctgctttgttatattgttcaggaaatcgagactagagatctcgaatataataagagactaaatatggattgttggattttgcagagggggatttttgttgctattgcgaattgtccataattattacttcttctaattacgtaatcgtattcctaaaatattccctaaaataaaagagagcataggggcttcatagaaaaataaatttatttcgatcaacataaataggtcagttatgtatgtgtagtaccttgacccaacaatattaggagacatgaatgaataacaatagcaacacaggtatcagcataagttgggaatgagaagtataaaaatgaacatcgaattattctacgccgaataacaaattacaaatgaaagcacattcgtattatcaataatgatccaattacatataaataaaggcctcgtgaacacaaatatcgatatatataattcgatcacaagaaaaaataataacataagaaatccttactacattgttgaaaagtactccatgaaagtaacaaaatcaaaaactgataattaattaagccgataaataacaagatagtgacttagacgtagtggtggatagtgtggggtgttaattgatttcaacaaacaccattggtcttcttcctgtccaagacgaacttcttccaaatggtagtgatctccctttgcatctccaaggcactcttcttagcaatgacagggctaccaggaggaacaaggtcattgtcatcctgagtcacagccatcttggcagtgagaagcttcgatggaagagcatcaagctcgttaagaactttctggatatcgttcaccagacgctcggccaaggtgcgggagaagtcctctcttatcacaacgcgcagcacagtgatgtgctgggcatcaggaggcatggtgtaggccgggacaatccacccgaatcgcctcagcatgtccgaaacctcaaactcgttgtgtgcatggttatctttcaatgagaaggccaccaatggtactccttggtctttagagattatgttgaaccgacctgttttttccaaaccttcttttagtaccatcatgttctccgtacaattctccatcacattcctgtacccctcgtaacccaaccttattagttggtagtactgagcaatgacttggctagaacctgtaaattatatttacatatagttaatcacaaacttattattaaaatgggtttgagagaattcgtaggtgtatgggtagtatgtaatgataatgaatatatatatatatatacctttaagttgagtgtgaaagtgggttgatccgcccaagatagttgatgtggaagatgagttcatcaggtaagtcatctttgcttctccagactacccaaccaattcctgcatataccaagccgtatttgtgcccactaacgttgatgctcttcaccaatgggagccggaagtcccattccagttccggatatagaaatggtgctatgaagccaccacttgctgcgtccacgtgaatgggagtatcccatctgcatacaaatatacatactaaatcattaatcgtaatcattattcatattcaattcacgagttgtttaatttacattaatgtacgcacccagtttcttcattctttttcacgagaagatcatttagtagtttgacatcttcaaattcaccattaagagtggaacccaaaatagcagcaacgcagatggtgttctcgtcaactagctcaacggctttctcagggtccatcacatagtatccttctcttaactttacctccttcaactccacctcaaagtaccttgcaaatttctcccaacacaccttcacaaatgaataaggacatccaaatgggctttgttaatttacattttataggaaatatatttaagaaggctgatgtagtgtagagagcccaaaagtaatgggttgaatacctggacattggctccagtaacaatattgggcttatcaacgggcaaaccttgggccctgcgtctgttttgccactttcttttgaaagccaaaccagccaacatgatggcctccgaggaccccacagttcccactcccactgcagcctctgattcccctaatggcgcgttgaaaagatgagctatcatgttcacacaccggttctgttcacaaaatacaaatataaataatcctgacttgttaaaaaagtattattatgactagaagaattaacatcagttgtctcccattagaaaaaaaaacatcacttgtctctatctcttcctattgaaaaggtgttacaactctaggactttattattattattattgttattgaattagataggacttaataaaaacaaaaaaaaaaataataataatataaggagggactttatattcatttttaaataaagggacggtcatattcttagtttttttttttttgatcagtggttaaactgggaaccacaacccgagcaaacaaagaaacaggaaactagagaaccaaacaaataacagtcagagtgctaacaggaaaactaaaaaaacaaagtaacgaaataaaaaactactactagacagtaccaactaaacaactaggctgggccatgaccatccgcatatgccatatgcgggaaatcatcaaaattggccaaatcgatacatccaaatttgttgttgcgatttgcccattgagccacaaagtgggctacaccattgcaggttctaggagtccacacaatttcgcagaggttaaaaattgctgcagtagaacagaaattgaggactttgtcttgtatattgtaatgaagcttatgaatttcggatagtttgctcttcaaggctgctaccgcattgagagaatcgcattggaagattatattcctataacacaacccagctgcgacagttgcaccttcacatacagcagccacctctgccggtaaagcttcacaattgttcagccgaaaggtatggattcccaggatagtaccattatgatcccgaaagacagccgctcccgtggactgattactcccaatggctacatccgagttacaagctatccatccctcaggaggggatttccattcggcattgcaaggatctgttgggttggtggatgggaagatttcttggattctgttattgatggagttgattatgatagctaatgggatagcctttttctcatgtatccgcccattgcgttctctccaaatattttcacacactatcgcagtcccttccataaaagtgttgaagtcgaggaaaggggggcggttagcagcatctgaaaaccattgaaaccaactatcccaatttgatacggtcagttcatcagctcttaggttccaacagcacccaaaccagatagctcgagcataggtgcattcccagaggaggtggaagctgctctccacagaattagaacaaaatgtacaagaagtatcttgaatgggaataagggagcagagttttccttttgttggaagacaatttgcaaggatcttccaccagaaaaattttaggcgattatgcatctttgccccccaaatacgattccacttcctggcctcctccaagcttggattaaaattctttaacaatttataggccgacttgattgaatattctccagagggattcggcagccacaaccaagaatcattaatgctaatttcaggcaaattgatgttgaggatcctttttgcgtcttcttgttggaaccactgtctaaccatctcttcattccattgctggttattaatgaaattactaaccagactcactcgcatcgcctcattaacagctgggattggttgacggttgtcgccgggaacccaaggatcgaaccaaattgatgtggaattgccatctccaatcttccgacagattcctctttgtaaatcattcctcatttgaagaattgctttccacagaattgagtccgacgccttaacttccaattcaaggaaattttggttcttcatgtatttctcagacatgacccgccgccaaagacaatcgtcacttgttaataacttccaagcccacttcatcaagaatgctttgttcatggtttctgttgtgcggaaacccaatcctccatcgcttttgggcttacaaaggcgatcc

SEQ ID NO: 186210 - DNA, 3309 bp, Cannabis indica
tttttttttccaattcaaacaggatatgcaatattattttcaatttgtatcataaatgttggctgatcattagagatttgacaaatttatttctctatctacaggctggttatgttggggaagatgttgaatcgatattgtataagctactcgtggtatgatttatgcattttccctttttttttttcatgtatgtcttgttcaagtcagatgttatgtgttgggttttatttatttacttattcatttatatttggtcatttaacaagatatactattttggatgttcctacaagtaacggagttgagtaaatttgattattttggtgtgcgtaggaagctgaattcaatgtggaagcagccgagaaaggaattgtgtacattgatgaagttgataagataacttaaaaaggttttttttttccaagcatatgattattcactttagaatttagatactaaagttattggttaggttaaccaagatgaatgttatgcaggtcgagagcttaagcattggcagggatgtatccggagagggtgttcagcaggcattgcttaaaatgttggaaggaaccgtgagtaaactgatctttaagtagcttcttatgcatgtaaataagcatcatgcacgtactaattgttattgtttacaatagaggatgcaaagttaagattgttcatctccttgggttcattcaccattttactctaaattgaatcatgctatcttgatggttggagagtttgtcacccatggattaaggaaattgtatttatgcacttattctcattttctaaattactatcctatacttatattctgtttctaactatgcagccaaatggtattttttttattgtgggtttctaaattggatttgaaatttccaagtgcatggtgatatttttttgagtaaccatcaatggatatacggtatacccattgagaagtgttccatatatactggtacaactatagtagtgattaattttaatcactacctataagttgcaactccgtttttttacatgaaaatatataatgtagttacacggaaccccgacaagtattttgtaggaaattcaaaataatctaggatgtcttaatcatgattcaaatttgtaatgtagtttaggtgttagtcctaattttgacattctatgttcggaattttttgaaaatttgtgtgaggtcctctgtaattatattatataccgtcatgtaaaataaaaatagaattacaatttatctatatactgaaaatacaattcatcaattggaataacattagactacttaatgttttggatgatagtagagtgtggaaaccagatttgagtggggttttctcctgcaaatcaatgttcaattggttccttgcgagtcagaatcaaagagagttgtgctgcactaagatcttatggaaagctagaggcccttctaaagtcaaggtttttggttggttagtggctctaggtaaattaaatgtgcacgaaatgatgcaaaagagaaggccatttctgggctggtgtgcatgttgtaaagaagtggggaagagctggcacacttgtttttgaaatgtagcttttctactaactttggattcttttgctgaatgaatttgatgtaaatgggtaatacttgactttgtacctctaatgatggtaagcaaagtgggtggaagtaagcgtaggaccttgttgtggaaaactacagttatggctattttctgggcaatttggttggaaagaaatagcagaattttgaaggggttgaatgttcactagaagaaatatgggagagggttagattttggactaccacttgggtttacaagactaagcacttcgaggacctaacattcttagacctgactagggaatggagaactttgatgtaattatttgtaaaatctcctttgtggtaatctgttttgtcttttgctaagttctttttatgtaaccacggtcttcctccgccacaagtgaggattatctatacataatgggagggagcccggtctaagacaagtggcctccttctctttttcaaaatataaaacgaaaaatacctatagatagtaattaaaactaatcatatatataattatacaaacatttcaagcgctaggtttttttctgttagaaatttgatttaatgtagaaaaacacgaaagtccttgggttatagcaaactagctgatgcaaggacttctttgtttctgtgttttggtagaattggcctaggagaacagcagattaaaatattcagaaactattgttgaaaagttttcttctgcagaggtttgcccttcatcccttagggttgtggctacaatgaccaaattattggcgggttgaaatgtgtttatttatcaagagctctttcttttttgtcaatatactagtcgattattctggcatcagtcctaatcattgagcttatggagaagctgctgagagattttctatgggtaggagatatgaggtgacttagaaggaggagatcacttggtctgtgggagagtatatgcttgccaaaatctaaagtaggtctggggaattggacagcttggtgatagaaatataaaactttcctcatgaaatgattccttggggcatggcatcacaaaaggtaagtacacgatgcacgagaatgggtgggattctaaaaatgggaataagatgtctagaggaatatggctgccctttattaagaatttggaaattgattaaatttaaagatgataatgggaggttaattcgcttttgagatggcatttgctgtgatgatggaagtcttagagaggcttcccctagtttggctaagctcttagagaggaaaaagtattgttgatttatgtgtctagcggaagtacaggaagtgaattggaatttctattttgtatgaaatttgcatggtacaatggtccctaatcttatttagctattaaagacattgaatttaaaaatgtgcatttctttcatcattgtagaaactgacagctactaatggattatctaagtttagtgcccggtttgttttttgtctgtacatatatttaaatagttttctttaggaaagaagttttcaaggaatttcctcctagactcctagtgagagtgcaatggttggtcccttctacctgatcatttcgtcaacaagatccctaaatatttaaaaggacaaatagtatttttttttccttgaactatgatctttgtagagttttgactcataaactctttttgtgtgtgtgaaaaacattccctccaattatagcaactattgcaatctatcatttg

SEQ ID NO: 186211 - DNA, 6090 bp, Cannabis indica
acagaatatctggttcttcatagattcaaaggtgtgtgcatcctcttaacgttttgtaaattctctgttttattagtttcaagaatatatactcttgtaggaagtaccatttattttatttattactttttcatggaataaaatgtagtgaattattaattgctacgtacatctagatataactcttcagtttttattgtgcttaattttaatataagtttgaatttcttgttaactgctcttcttgtattgattagttgtgtctggtggggagcatgttgatgtgataacaaggatgttgttgctgtcaacataagaaacagaaactcctatgcaaatttagagtttgtactccacctgtatgacaaaatgcttacttttcaaaaagttcattttttaaggtttatccttctttattgcctctttttttagcactgctgacttgattttctacaacattattgcataagtatcatttagtatgggtggtggtgtcttgtttcttatctaggttgttttgtttgtttaaatggagcacgtttgtcggttttaacaaattgggttttcttgctcaattttagctaattgtcactcacaaatagcaagaagttgagaggctgcgtggagagaggaacgtggtggcaaacaagatgaaaggaaagcttgaaccatcagagcgccagaagctgatagaacaaggtatgactgattagcagtgccttcgttttgccatataagattattcaatttgttctcattattacttgtcatttgtttatgttttttctcatgaaagaatctaaaagaagagcttcttattttggaagaagacctgcctaaactcaccgacgaccttcagcagcaagcttaatgtataccgaatttgactcatctagatgttccaataggcggggaagattgtgcaatcataagaaagatggtattcttgtatcattctcctaggttaaggtgtcttggcttttgttttgttctggttgcttcttacttaacaatgtgctttcttaggttgtttcaccgcgagagtttagcttccctgtaaaagatcaccaacaacttgggaaagagcttgatcttcttgatttcgatgttgctttagtggtaccgtcgtcgatgattgttaatctttaatcattgtattttaacatgatggtctaaagtcccataaaaaaataaaactaaagtccttattttcaggtgagtggatcaaagctctattatctgaagaatgaagcagtcatgttagaagtggcgcttattaattagacaatgtcacaagttatgaaaagtggctttacaccttcaacaaccccagaatttgtccatggagaattcaattgtatgcagatctaaaataaacgatgagtccaaagtacaatcaattaaccattcaaactgttgagtccatggaagattaaaataaagttttactatgttttgtgtaattttttataatgtattctatattaagattttatttaataattcttttcctctattttatgatgacactttttttttttagttttgtctacataatgtttcctttaaattttacaaaacacatatattgttcctttaaattttcctagaaacaaataataaatgttaagttcatatgttgttatgacttatcataaaccatttcttcacattaaggataactactatatatgaatatgtaaatattgagaataactttatttttttttatttattaataacaatgtacatatcataagtttatatacacaactatgttttacttatcaaatacaatgacacacagtttactttaataaaacaaatcgttcatataatcatacctttagttattgaaatttaaaaaaaaaacaaaaaaagaaataccaaaactttaaataaaactaagatttacgtggctcggcacgtcacattcacctatagtattataataaaaagctagtaattctagtggacacccttaaggggcactacaagaatatgtgtttttgtaggcctataagggaaagtgccggaattgttttaaaaaagagacgctaattgaaataattttgtctatatatataaaattgtgttacaagtttaaaatgatataaaacttttatatcattgaaaattatagatgttggaaaattgttgtgctccaacagaaatatcaaaccaacaaaattataattatatgacaaataatataaaggacaaaaataattattaagataactaaataagcataaacataacaacttaaattttccattaagtattaggtcccgttaaaaaaaaaatatcaaattaaatataatttaatttaataattattataaaatatatttattattcgcgaagtattatcactagaacaatattaaattttaggtgaacattaacatatatatagacatgtctattagtaggtacattaattttgttcttatagtaagagtattttttatagccatagataataaatttaatagtaacaaattgataagtatacaacaatctatctctatatctatatatataatttttttgttaagagtgataacatgacatcttaattgagctttgtttgtcattgcatgattttttaaatttttatatttttgttattttttttttatcatttaataaagtagaataatttaattaaaaaaataataatgactttttattttttttataactcatgttctattcttttcaaaaataataataataaataaataaaggagagaagtgatataatttacaggctctcattaatatattattgttcttaactttttcgattaaaattaagattataaatattactagctaggttccactattattattatattttcttaactttattaccattaaattaacaattaatatgatttgaaaagtatctttaccacagggacaaaatcaaagtctttaccatagacatttcttatatacatatatatctatataatactattgttagagctgatggtgtggcaaattaccatgttaggaacttcattttcttaattttttcctagtttcttgcttaatacttttgttaattagattattagttttttaaaatatttgccaaaattagattttcctttttcctacacacaaaacttaattttcatatatcatctcttctcctcctttattttcgcctcttcatattctttacttcctcttcatgtgatttcttttctcccttctcttccatctatgtctgcatcaggtaaatatattcctctcccttgatattctctctctcccctctttctatatgccgctctctttcacacttcttttctttaggattgttttgggattgtttctaaagatgaatgggattgttttggaactgtttccaaaaatgaaaaatgaatcttttctcccctctttatatctttctctctctcacactgccttttctctgagatttgtttctctattcttcattttcaggtttgaagatttcttttttcattttcattttcagatttgtagatttcttaatcaggtacacgtaactatatatttttgataatatgcaatacactcaaaaatcatatatatcatatatatatattttgttagaatgtaaattggagttagaaactcaaatttgtcattatgtttgtatggaagggcaatcataaacacacatgcatgcatgcatgcatgcaaatacaacacaagcaaaaaggtcgtttcaaaatcgtggcgggaactgcgaatatgatcgtatgaatataaatatacaaaactatactataaaagataaatattatttgcatggaccgtttacatattattattagtcataactttatatgaagaaggattaagacgtaatttgatctaattatgaattgatgaagaaaatagattagaagcgatgatctctccgctttctctgtggacaacaaattcttttgataaatacatgtaatttacgacagcgattagatattgacgataatttgatcaagtttcgcaattgatcgaattgtttgcatttctgaaaccattttatatgtgcatgtgtaaataagtttatatgcattttgtttgatttttttcttcttcttcgctgtgtttattgattcatgtgtaaaattgataatcatatgtgcatgttcatgtgctttcagattcgaaggtagtagttcaagcgttggattagcgaagatgtatcaatcctaattggaatttctagctgtgttgctggtactgttcaaggggagagaattccctctgtgttttccatctatctttcttagttattgaaagcgtagttctttcaaaaaaaagttggaggaaattggaattggaaataatggtaggaaattgatttgaaggtttgtgttgaaattgtttgaaaattggggttcgatgtcaatggggattatcaggaatgatcggtttcgaagattggaatttaaaagacggtgattttcataatttaagaagttgagagattggtgggagttgattttgtttgatggggaatacatgcgtaggcccaaatcttggttctggtggtttcttgcaatctgttactgccgcggtttggcgaacccgaccgccggaggacaaccttcatcctcctcctctaactaatcaagaaagtgaagctaagcctgcccaaaattcaggtcttgattcggttcgtggttcatctaaaggatcacatgggtctaaaaatggtgatcgttcaatgccggttcagaacacacctcctgaaactgtgaaaattgctaatgatcaacaagatcgcccccctcatcctcagccatctcaggctcatcccctgcctttacctcagcctcagcctcagcctcagcctcaatcacaacctcagcctcaacctcaggttcagcctaaggaggtggaatctaataaacctgataaggaaggggtaaaggaggaaggtgcaaaggctgcagatacttcaaaacccaagaaaccttctcatattaagaggctttcgagtgcagggcttcaagcagaatcagttttaggaagaaagactgcaaatataaaggatttttacagtgttggaaggaagcttggacaagggcagtttgggacaacattcctttgcttggagaagatgacatctaaagaatttgcttgtaaaacaattgcgaaaaggaaactgacgacagctgaggatgtggaggatgttaggagggagattcagataatgcaccatttggctggtcatcctcatgtgatacagattgttggggcttatgaggatgttgttgctgtccatgtagttatggagctttgtgctggtggagagcttttcgataggattatacaaagggggcactatacagagaggaaagcagcagagctagctaggattatagttggtgttgttgaagcatgccattctcttggtgttatgcatcgagatttgaagcctgagaactttttatttgttaaccatgaagaggatgccccacttaaaacaattgattttgggctttcaatgttctttaagccaggtttgttgtagctgtttttgggtgatatgcctttcttgtttctttgtggacttaattttgtgatgaattgctgttggttttccctgatattatagataaagtatgtcctttgtaggaaaaagagctgagtcctaacaatccttttggggaggattaaaagaaatggcttaaaccactgttttccaagtggcttgtgcttaatttatacatagtttatatgagacaaagtagctaacattgatatgcataatgttgtattatggcagtgatagggtgttttagtgaattagccaagtaacactgatcacactatgttgaaacgcacctaaaataagctctgagtgctttcctctttatttagaataagaattttctatctctaatataggaaaatgttaatattctcaggtgaaacgtttactgatgtggttggtagtccttactatgtcgccccagaagtgttacggaagcattatggtccagaatgtgatgtttggagcgctggggtgatcatttatattttacttagtggagtcgcccccattttggg

SEQ ID NO: 186212 - DNA, 3574 bp, Cannabis indica
gtattcttgtaacctgatagtaacaaattgaagccgaaatctaaaattttttaccaaaataaaaatcgtattaccttgaatcgtttgacctgcgtgcttgaaataacactcctaacttcgagaagtgtgtcttcaacgactataaacacctttatttcaaatttccctctaaataggaaattttctaagcttagtacacatccaatctcggttgtatatcatattattaagctattacaaatgttctaagatcttataaacatcatatctttcaaaatactttccaaatacactagagccaaattagtgattattcatttgtaagtgtgtacattttatatctaggtttgtaaattattcatttttaagtgtatacattttatatcaccaaaagtccgtattggtgacattggcaattcacgagaataagaaattgagactacaacaatttaggattgaaaggaacaatatgtttgtgataggtttaggtaaaaccttagtgaaaactacctcaactgtaaaaggattagtcaagtccttaatttggttggcttgttagttgcactcaaagcttacaactttgaagaccaaagacgcaggtggctgaaattccaccaaactttataaaaataagagtttgcatcctcctatctctaaactcactggcattgtgcttttcttgcttattacattgttttctgtccatttattgctaagatttcttaagttgctagaaattttttccataataattccggattcaccccttttaggagccattcttgggctaacaggatatgactttgccaatgcttcatgggattcaaatcttttgattccataccgttaacacttgtataatttagatcacagggtcataaagctgttttgaaattcaggtcacgctttcgtttcgaaaaaatcaggcttgaggatgtagaagaatttggttgaaatttcagcattggtgaataaaatttacgagtcaatcacaattgcacatgtcgaaatacttgtatagtacataaatagcactccacatgacctgctcataaaaagaaaaaagcaataacaaaaaaacacttcttgatttcgaagatgagcagacacaaagcgcattgacatgttcatcacaagtgagtacaaacatgagaaaaataggaaagaaaattagagggttggagctctttctgcagttccagcaatgacagtaagcaagttgttgccaaaaggatcactgagatgtttagcgaggttctccactgggccttctcctgttacgtaagcttggaaatagaaaccgagcatggcgaacatagcaagtctcccattcttaatctctttaaccttcagtagtgctgcctggtctggatccttagctagccccaaaggatcaaatggaccaccagggtgaagcttgtcttcaaagtcctatagttccattcacaacataatcgacatttagattatttcaaaactaaatttaatgatagtaatgttttattagatactcgggtacataaagtagcataccaagccattggtgattctgtagtattcagctcccccaaggagaactatctcagcaacaacggcaacaactaaattgatgggaatgttcttgccaaagtagttcaatgtgttcccgtctaggagaagagctcctgtctgaattcatatacatatacaaacatgtatcaagttaagcagtagcatctatacccgaatttctcttctattttcagagacttaatgcaaattaacacaaggatgatcgttgattcataatgtttttaactcatttcttctatttattaagtttgtttaaaattcgaaccttgaaccaaacagcctcaggaccgcagttggcgccgaatttgttgaaggcctcggggataatgaagccggcagctccaagcatagcccatcgagcatggatcaactcaaaagcttggtacctgcacaacagccgaagcaacacgaataagccttgatctattaatttatagagttgaaacagaggaactaagtacttacttgctgaagtcttctggcttcttgcttaacccaaaagggtcatatccatagctgaaaaaaaaacaccatttaaagcatatatgatgatctcatatcagccaccactatcacaatttgttaaagccaaaaaagaaagaaagaaagaaagacattatatcttactctccaggaacttctcctgtcaagtactctgggatctcagaccggtctagaagtccatcgggcaaaaagattcttctatcaggacctgaaatgaaccaaaacataaagtatatatataataatacaatacaattacaaagaaatagctgtaggtggtaatcaaagtagtgatacttaccataccacttggcgagttcgtcatcagccggagcaacaggagctggcttggcctttggtgcgggcttctttctggagaagagagcaacggtcttgaaggtggcagggctggagggagtgggagcaggcgacctggccccgccgatgaagttgaggggctttccaagcatttccgacacgccaagggaggaaccagctgccagagaagccatttcaccaagagagaaaggaaacctctgtactacaatcttcagttgtagaataacaatagagtgtgtgtggaaatgagaagagtcggaagaagatacaaagataaatgtttgagcccgtggatgtccacgtgccacgtcggatttctcttcattggtccgcaatggacacgcgatcctatgtccacttttgattggtcaacttctgctgctgacgtggatattctactctgaattggataacaattatccgaaatctgttactgtaatgaagtaacccaaaaaaaaaaaaagaaaaactacttagttcaaagtaacaataattccgaaaactaaaaaaaaaaaattagaacgtagtgaattaaaatgaagctgatatgctctttcaattctacccatctgtggtggtggtgcaacagacaaagacggggttgaggttttcggtggccggaatatggctggtgtggctggccgtgctggtgcgacagagaaagacgggaagagagggagacagggagagattgggagatggctagagaggcagttcgccggtggctatggctgttatggtgagaatttttggttagggttttaaagtttagtgtataaactcagttaatcataatgacaaagatattaatagggagagagataggcattagtgacttaaaatttcacattaaagtcagctcattatagatgagtgaatttttgttgccatttatgtaaccgagatactcaagggataaatccaggtttcttcttccatcatatttggattgataatatcgatgttcttttactctcattttataattaatttattttatttatctcaacgcctatgtatatatatctcaagtgatttaagttgtatccatgaatgtatgtttactttttttatatagtggtcatacttttgaaaattgttcaatatattggatgataatattgtacaaactcaagattacaaaaaagaaaaaaaaaaa

SEQ ID NO: 186213 - DNA, 2219 bp, Cannabis indica
catacctctcaactaccaagactactatatatagcagagcctctcctttcaaattgacagatcgcagcctgggcaagattgagctccaagagagctagagagagaagtattctcaagtgagaaaatagaagagatcagttgagagaaaagattgaaacaatttgtaaaagaaagatatttgagagaggaagagagtgatcttgaaattattggtcagtgtatgacttggaatttccacaacattgttgtaatctgagattgattatagttcaagggcaaaccagttctatgatgagctcaacggagatacaatcctattatttagggtgaacctcggaaaaaacttgtgtttgttctcttcttttcttgcattatctttctttaatgtttgttatgattgtctatatttgaattgctaattctactgtttttgtgtgcaaattgaatcctcgaaaattgatctattgagtttgtgtccaatgattagaatttgaatgtgaaatgtattcaatcagccatgtcatcattgtgattgtgaattgtttgattgaatgctaaggtcaatttggacattgatgatctaatgtgtatgatgagttggtgtagggattgagtcgagaaatcccaacaatttgtaataataataataataatacggtatatttatagtaccttaagtgcttcgtgtagaacaacagtggttgctctatgctcccaggctgtaaggttttgaataactaactcatcaaactgtttaaggaacatagacaaagacccagtcgataacaaatatttggttaaacgactgcgtatcagcttgtgttgttggtgtgaagcgcatagaaggctttcatttccaaccaactcacctaccgaccttatgtatcttttactgtacttccctgactcgttcttcagaatcgctttcgctgactcagtgctcgaaacaaacacatgcgtttccccaaatatgttggttctaaaacaattcccatacctgaaataattaagtactactaattgtattatattgttaaaaggaaagaaataattgtatatatgtatataaatatgttgtgcacctacctcaagctgcgaactctaacgaaatcatagaatcctttggtactattgatggcagccatgaagtgtaaagtttctcctataaatggtagacctcgagagccaggaggaatgtcacatgtggattgatgttgataattacgatcctttattttctttaacacaaatctgtttattagatataaagaaggcactaaaactatcaaggtgtaacaacaaaggcaaacttcatagttattaggcaataaaagtgtagccatttttttactcatgaaataagtttctatatgatgttcagcagtacatatgtatatatatataacattacatagtaatctgttgagcatggattcttcccattaaattttaatataagacggatgtggtgtagtactgttgacgaggctgtaaatggccgacatgggcattaatcatgtgattttgccattttggaaatgaattattagcaagtcattccattgaagtaatagaattataattatatatattgttgatttaagtggtataaatttttcagttgcccaccacaataggtcggttgaatccaaaagcatatatagaagcacatcacagagcatgtatatagctagttagtggcgcttgattttgattatgagtacataattatatggtgtttttttgacatcaccctctcctcatcatcatcatcatatttcaaaaaaaaaatcagggataaataatgatcgttaacttaaaattgggcacttgagttaggattattaatatctaccgtatgtaagaaaatgaaatgaaaagagtcatgtttaatttcaatggaactaattattgatgttcacttattactccaagccatttcacactaactagactttcggcccagttatatgtatttttatatcgagttaattgcattgaaaaaatctgtagtacattttttttaaatggtgttttggtagatttatattagtttaattttacttccaatttgttttcttcatgattgtgtgcgttgtttaaaaaaaataatcattcgtataataaatatttgaaccttattttcggtattgtaaaatatttgaatattttaaaaatttataagtgatcataattataaaagtaattaagctaaaaag

SEQ ID NO: 186214 - DNA, 3597 bp, Cannabis indica
  modified_base (3490)..(3490): a, c, t, g, unknown or other
ctcgcctcgagtgcatccctctaccagccctaaagaataagagagcttgccgagtactatattatagataatcaaacaaataatagcctctttaacagcaaaattagataaataaaagaaaaatgtcaacaacaacaacaactaaagtggggatctacttaaaacttggtcccatgcttcattgtcatattaagtttgctcaattatcatgtttaaagatgatgaatgaagctctactacaaccacaagttatccaaattgaccatagaaactctccaattcaatcaataataactcaggctgccattcatcacttcttagctgtgcaaatagctgtcacaatcaaaaagactccaatgtgattttacaggtttccaaacactaaaaaatgaagcacttttgggtgcaatacataaataaataaccattttgttcttttttgctgaagtgacaacaaacaaacactttgaggaagtaaatcttattatatctatccagaatttttcagttccctcttttgagcagaagctgaaaaattacatatggcaatataataaagcctgagcaatcagttgaatctacaaaacaggatagtcaactgtatcaaccttaaaaaataattatttacttcgacaaaaaagatgtcgttttgccattgggggcacaaccacttttgcccttcaaaatcagaatcctgttgtaagaagccacgaatgcagagcctttagctgataaattccattgctggttgaaaaattttgaaaagaaagaagctttaggaatgtgtgtgtgtcaaaaccctcaaatagtttcttatcttcaacactgacaagacaatgggaaccatttggtcaacaagtaacgtttcattttcacaatcaagacaaatgagccatagcagggtatgtgcattactgcaaccagcaagtacctgcagttcagtagcaaaagaagtctaaaatttaacactaagttgagaaaaattagtggcattattaccaaacatgttatagagagagcataccacactggagcatatggagatgacaagtcaaggaatggatagggccacctgtagagccagtgttacaatctttattgtttgatcgaattcaatttagtctcgggtagatttgcagaaagaatgaaaggaattaccaaaatgatacacatgcatgaatgatccactggaaaatgacgaaagcaccagtccacaaaatgaagaaagtaatacgaaaggcgggaacttgctgaaggattaagccttataattttagtatgggagaaaatttagggaaaacgaatcttatattggaatagaatagaatatgcacccaaaggctatttaccaagcaattcaaagctgtatcgccaaggagtaaaatggcattgaatgaatgcaagttcacattcatctgcacaaatggcaatgtcaaaaatggagaccacaactaatgaacaatattaagggagactagaggataaagtttactcacaaaacttaggttgtaatctttgatagtaagaaatgggactataataaaccaaaagacagaatcagtaagcatcactgctccagcattcatctgttaaagcgaaaaaaaaaaaagagcaacgaaagaagtagcaacatgaatttggtgagagtatgcagccaaaaattatgcttttacattttgtcacaagctcttagcttgtcagcctgaaaaataagtaaaatatttataattaactcagcctaagatgataatcatctttatcagcacacaacctgttcccacccaaatttaagtgataaaccatcaaatggcaggttgtacttgctgctaacataagtttcttactgcttcagatgagtgacacaagaacatcaaagaaataaacccagaagagaagaaagaagaaggtgtgagacatgagctcataatgctaatcatatttgtgaatatggaaattacaaaacgttttaaggaaattacctggaataaaatctcaaaaacataagtaaaaatccttggcagttggaactcataacagtcatctccttttggatttgagatgttcctctctgtatctttactgatgaggggcatgtatgatccttgcccggtatttgtatcaacatggtaaacatttgacctcaagttccttagtctatactggtaacaaccataaattgatagcagggctccatactacaagagattttaagagaaaacaacaaaggaagactgaagacattagaggtgacatcagattgatagcaatgaaggaaaaacaaaatagaaaatatttcagggtctcactgtctgaaatcatactaacaaactaaacatattaacattaagattcaaagaaagaaagaaagcataccccaaaataaacggtcagtaaggtaaaagtcaatctgttgagcatccacaacacatcatgaattaataattatatacaatactagaatcacacccctttggatggtaactggtaagtaagccatgagctcaaaagaataagagaaagcttactgggtataatagagaaatgtggtagctccactgataacaattttgaaaattaaggttgtcaaaagtgagaagaatgcaagaagtcgaaaacccagtaaccaaagggggtgaatttgtttaaggcttggtctccaagcttcattgtcacacaaagagtgatctacactttgctcaacttctcctgctccagattttgaatggtgggggtcttcatatttccatataatatataaagctaaaaccataggtgtgaacacccaaattgagcatagaaggactctccagttcaaccaataactcaaggttgtagtgtcaacctgtacctgtagctgcatcctgctatggaaaatagagaaaagcagattcagggtgctaaatctcatcatcaaaataagtgatatatttttgggaaattgaacaaatgggttacttacagagccaagccagttaaggcgtcccaactccaagggaataagaagaaatatgaatgaagcagaagaggaaatgaggcctttactcaaccgactcagctggttgaagatttgccatcttttattataccctctttggattcatgtcttctggattacgactgtgatgttgacaatatcttgtgagggtgtgagtgtggatctctttacaattatcaaccatgctaattgctatggctatggctatggcttcgctatccctttctttctttgaccccactgccatagctgcttgtggtcatttcatttaatatttccatattagtttcttaccaaaataatttatatttaaaactttcttaatatttttattttctaattttttaatcacgaaataaaaataatattttaatttttgaaaaaacaaaactgtggtaatcacttttatttttcaattttaaaacaaaaaataaaaataatgttttataaaattctttttaattttatttaagtctaggcctaaattcggcgtcngattgggttcgggtcagaggttgggttctagcactaggaccgtagaaagatttgagtctgagtctggtcggagtccaaaatattgcttaaaaaaactgattaaaaaa

SEQ ID NO: 186215 - DNA, 2899 bp, Cannabis indica
tccttgatcaatgatatccttgaagttcctgtttctggttttcataatagggatgggattatttgggagcgagatagttctggcctgtttagtgtaatattcgcctatcatttagctttctctaaacaggatacccactcctcctcttccttttctgattcgaaaaaattttggaataaagtttggacctcaaaaatgcctcctaaagttaaactttttgtttggagaatgttgtctaatgctattcatgtagcttcttcccttttcaagaattgtgttgttgactctcccatctgttctctttgcaaacttagccctgaaaccaccaagcatgctctgctagactgctccagattgagaaaagcttggaaatcttcaaggtttgcaatacattattataattataaatattttgatattgatgaattttttctaagtattactagtgtattagataaagattatatctgtatattatattattttttgtggacactatggaatcaaaggaataatgcatttcataaacaacatactctttctctcaatgaagtgtttgattggagtgttaattttttctttaagtatttggatgcgcagcaggttcaagctcagtctaacaattctgttattgctcaacatgatgttttggaaactggttctatgggtacctttcagatttttacagatgcatccattgatcttaatcataaaaaacacagtattggcgttgttgttctagaccaattcaataaggttaaagcagggttctccaaaccctttgttgggtgttttcctcttgcagtggcagaagttaaggccatctttcaagccatccaatgggctcaaatgttacaccttcttgtggatgttcttaaaattgattgtaaatctattgttgataagcttgtttcttgtaactggactagtagtcttctggatgatagtttaattggtgtaaagagctttttatcgttcagtccgaacctatctctactttccttgtgaacttgtttgttttgtattctctgttttatctaatgaaggacaagttattttcaaaaaaaaaaaaaaaacttattcattattcaactcttacttcaccacagatttatcttatttttataggtatttattaaatttttaatttattttctgaatgatttgatcatactgacttttcaaataaaatcttccaagtataaaacactgttaaaaataaataaataaataaaaggttaaaacctttaagctcctacttttgaagtcatgccaaatacagtccagcttaattattattctttcttttttcttacaactttttcgtcacgagcatattagtatttagtttgtgatgaaaaaacaaatacatagccgacaacaaatttccagtccaaatttaacttctcttttattttattttcagaagatatgtgtatttagaaatttaaagaaaattcatccttacaaaagaaaaaaaaaattatcatttcttcaaaagctgcgaaagtggaatttatcttcttagtttaaataaaaaatttagattttttttttctaaatttatagcgattaaagattggtaccagacctaaaattatattttaactaattactattatttttattaattaaataataataataaatatggtgcaaatgcaaacgtgaatgaataaattttggaagaaggagagagagatttatatttatccagcagtagtagactagtggaaatggaaaacaaaacatagaggaaagggacacgtggaagtgtggtagccaagtgaaagggccccttcatgctgacccgatattctgtatcaaaatggatggcctcaactacctcttcgtaaaacgcgaccgaatttcgtttccagccttacacacgtggacaccaaactcaccacaacatcatttcaacactacccaatagtccaacgccaactcagcatttatttcttatacttgattttaccatcttctccctcccctcaacctccacccccttcaccttcacctgaacactaacaacaacgattcaacaacatattccagaaaaagacattggtatgccgttgctaataccattttaaccaatacattttctttcttttaataataataataataatggagatcatttaatcttttttaagccaaaataaaagaggtcataaaaggcattgcctttcttctttcttttctctcgtcctttttatactgcaactttagcccaatatggttcagcccatcacactctctggtcagcttctttctctatttctctaactcatcaatggaaataatctcctatttctatcaccaccctgtaaatctttgaatccaaacttttgagttttctctgtacaatgttaccatatcataatctatgaaaactctttggtacgtgagtttttcagtttatttaattgaaaaaccttctgttaatgtttctctacgactgaactctctgcagatatatataaccagagaagcacagtacttgattggctggaaaaagcttcagaatgatatatatacacaaaagcaagtttgatatttcaagaaacaacacaagaagaaggaaagaagaaaggtaaacaggaaaagagtttcttcaaccatccattcaagttaaaatgatcatctagtcatgaaataataatattacacccacttaaagtgatttattgagagaaggctctattctttttgagggtttatcaccttctatttagtagaattgtagtacttaatcctagcacagccgttggcatattacttatacaccttcaatattaatacagtcccatatattcaatcataaaagctctgtaactatctactgcaaacgcaccacatctgcatcaaggattctaatggctcctgttatgaa

SEQ ID NO: 186216 - DNA, 3423 bp, Cannabis indica
gaagactccgttaagggttctgtgtttcaagttcagcttaatgtgtttgaatactatatgttttggttcgcttattaccctgtttgtagaggaaacaatgagagttgtgacactgttgccataaagagaaataaaaggtttaaattggagaattgggtttcttccatttctgggttttctagcagtaaacggggtagtccggagagtaggaatgagtgcagtctttatgttaggcttctttatgcttatctccgtgcatttgtgcctgtgagtgatttgaattcgcaccagccttatcggagctcgcttcttcagtactccttgagttatgatggttctgttatcttgcaagctgagttcgttgtcaatgtttttattcatttttggcttgttgacaatgacttttcacccttacctgttgatttatgcaagtcgtttggagtaaattttccattacggtcggttttgggtgatacaccgcctacagctgggcttggtgagatggtgaaactttttgtcaagtacttgaatttgagttcagcaatgcagtcagatgggaatgagaattttgaccttagcggcagtccaaggtggagttccggttcatttgatggttctaggtcaaggaatgctattgtggcttcaccatttgtgaattctaatgggtcttggaacttgtcaattcagaggccactgtataggtttatattgagaacattcttatattgccccatagaaacttcaataaaaaatgcatccgatgtgttttcggtttggattacttatatagagccttggacgatcagtttggatgactttatggctattgatgccattgttgatggatcagctaagactttgaagagggaggaatcgcagttccaagcttgtgggtattcacctacttggcagggttatgtcttgtccaactacttgtactatagttccttggttatgcattttattgggtttgcacacaagtttcttcatgctgatgcggaaatagtagtccagatggtcttaaaggttggcttcttgtcgttttctctctctctaaattcaagctatatgctgtctaatttgtcacttcctactttaataagctcatccggcccgtcaccattaaacctatttatttatcagtatccagtgatttattataattcaagggtttgatatattaaccaatttgttgaaagaacccaatgacgttaacaggttcagagtttgattccttttaagtactgacatagcttattgctatatatttatgcttctcaaggattttagggttgaactgggaggagaaattaataattttatacaatatataattgagaatatttcaatggtgcatcacgaataggatagattttaagttaagctatatatgtatgctattgattttgtttagcaaatcttaattggtacgcctgttgtaatgctgtgtttgtggtagaacataagaggtgatatgtgggtgacctactacatctatcttagctattcgactttcatataaaaaagaatacgtaggtgacctactataaccatccagcttccataggcttacacaccaccacatataagcccaaagtcaaccttgggccttggctaagttttttccaatgctgatgaagtcaagcttctgcaactttgtaagacaaaatgctcttacacattttgccgtagtgaatattgtaacaattgaaatagatgaagttgcagaacaaaatttatttgtgtgggagtttcgggtgagtaggtaccgaacttctattgatacttttacataataaaatatatataaaatatcacatgtgaattatagtttcaactctagtcaatgttctttgctataagatcttctgcatccccaagaggggtagctcaaatgtcagtcgtgtgggactcccacaaggtctgaactcccacaagaggggtagccagttcttatagtttcttgcagcgggatcctggctgtgtgtgtatatatatattctgcatccagattccagacttactctttggctcatttcttcttgactgtctcttttaactgagcttatgtttatctctgccgtttttacaggttataaatattttgacatcatccaaagagttacttgaccttttaaagatggtggattctattttccattccaaacagactggaattgggaaaccaatgcttaatagcttgtatagatttgtaccttcaattcgtgaacagttgaaggtacgctcaactctccctgttatttttagtcaaaagtgtgtaagaaaaccatctttattgtcactttaaaagtaaaaataaaaaatataaactcgtggaatatacagtcagtttaaagtatatataattggaatttatgctatatctataagtttgatgttcgatgtttcctgttggggcatttcctaagtaagctgtattgtaatgcaactatcgatgataggccctgtgttctacttgaggcagaagaaaccaattacgcagcaactggtcacctaatttatttttctcttgtaaacattaggactgggaggatggattatcggagtctgatgctgatggatctttcttgcatgaaaattggaacaaagatttacgtcttttcagtgatggagaagatggcggccagcagctacttcaggtttttatgctcaacctttctctcctttgctcctccttaaaatcatgtatacactacgagatcttgaccaattttaatgatttcattgtttcagttgttcatattacgagcggaagctgagctgcaagccatttctggtgacaatcttgctcgaaatctgcagtgcattgattcactgaaatcacaagtggcctgcctattcggtagccacacgataaagccattgtcattttctccggaaccaaaacagcatcagcaggtccgtgatgatatattcaagcccagaagagtcagcagttgtacaatgaccaatgtcaattacaagggtgactggatgaagcgccccatctcagatgacgaggttggatggcttgcgaaattcttggtctggttgtcggattggttgaatgagaatcttggaataaaccagccagataacattcaggtagactcgccttcatggccttacgtggaggttttaagtggtgaggtggacaatgtttatggacccacagatactatgaaggcaattctatgtgctcttggttcatggcttcttatgctgggaatgacagtggtacggataatgagaaaacatggtgtgagagtgaaccttagaatgttggcgtctaaaaaggtagtaatggttttgtttttgtatgttgtgtttaatatactgaggaaagcttttggtgttcttcatagggtgtagtgtagatgacactagaacaagagtttctaagaagataaaagaaaaaaaaaa

SEQ ID NO: 186217 - DNA, 3033 bp, Cannabis indica
atgaattaatgtcaaacttttgtcatttgcagcttacttcttggaagcatatcgtccagtaagaaagggtgatcttttccttgttagaggtggaatgagaagtgttgaattcaaggttattgaaactgatcctccagagtattgtgtggttgcacctgacactgagatcttttgtgagggggagcccgtgagaagggaggacgaggatagattggatgaggttggttatgatgatgttggtggtgttagaaagcagatggctcagattcgtgagcttgtggaactgcctcttagacacccacagctgtttaaatcaattggagttaagccaccaaaaggaattctactgtatggacctcctggatctggtaaaactttaattgcaagagctgttgcaaatgaaactggtgcattctttttctgcattaatggaccagagatcatgtcaaagttggccggagagagtgaaagcaatttgaggaaagcttttgaggaagcagagaagaatgccccatcaattatttttattgatgagattgattccattgctccaaagcgagagaagacacatggagaagttgagaggaggattgtgtcccagctattgacactcatggatggactgaaatctcgtgcacatgtcattgttatgggagctacaaatcgtcccaacagtattgacccagcccttagaaggtttgggagatttgatagggaaatagatattggggttcctgatgaaattggacgtcttgaggtccttcgcattcatacaaagaacatgaagcttgctgaagatgtaattatcagattccttttttgtttcatgctttttttctcattctattcaagcatgttgaaccttttgagctgtttttggacaggtggatttggaaagaatttccaaggacacacatggttatgttggtgctgatcttgctgctctgtgtactgaggctgcacttcagtgcattagagaaaagatggatgttattgacttagaggatgagtcaatagatgctgagatactgaactcaatggctgttacaaatgagcactttgctactgctcttggaacaagcaatccatctgccctccgtgagacggtaattgttttaatgatgtgtttgaagtgaaatgtattctttgatggtacagtataatctgtcttggatgaaatctaatttgaagtttaatgatttaggttgttgaggtgcccaatgttagttgggaggatattggaggtcttgagaatgtcaagagggaacttcaagaggtaattgaatacattgtgatgtattctgtgcttgaagagacttcatatatctgtctgcttacttttccttttatttatgtccatgcagactgtacagtaccctgtggagcatcctgagaaatttgagaagtttggcatgtcgccttctaagggagttcttttctatggtcctcctggatgtggaaagacccttcttgccaaagccatcgccaatgagtgtcaggccaactttatcagtatcaagggtcccgagttgcttactatgtggtttggagagagtgaggctaatgtaagggaaatttttgataaggccagaggatctgcaccatgtgttctgttctttgatgaacttgactcaattgccacccaggtttgatatctctctctctctctgtcttgctctttactctgatggattaaaactgtcatttggaatctatagttagtctgtaactaattctctgtatcctaaaagagaagcgacgatttaacaatttttatttgtagtttgtgcatttgttttttgggattttgttaatattgagctcagtatttgactgcataagttttgcatcctttgctgatgcattgcttttctttttggctacaccatgcagagagggagcagtgttggagacgctggtggtgctgctgatagagttctgaaccagcttcttactgaaatggatggcatgtctgccaagaagactgttttcattattggagccaccaacagaccagacattatagaccctgctctactacgtcctggccgtcttgatcagttgatttatattccccttccagatgaggaatctcgttttcaaatcttcaagtcctgccttaggaagtctcctgttgccaaagatgttgacctcagtgctcttgccaagtatactcaaggatttagtggtgcagatatcactgaaatctgtcagcgtgcctgcaaatatgccatcagagagaatatcgagaaagtatgataggagaactcttcccagatgcttctatattttcacttattattgatttatgtttcagaattaaccattaaagacttgctcttctgcaggatattgagaaggagaggagaaggaaggataaccctgaggccatggaagaggatgtggatgatgaggtggcagagatcaaggcagctcactttgaggaatcaatgaagtatgcccggcggagtgtcagcgatgctgatatccgcaaataccaggcatttgcgcaaacattgcagcagtcaagagggtttggaactgaattcaggtttgccgaatctggttctgcggctgcaggtgctgacccttttgcaaccactgctggtgcggctgatgaagatgacctttacaattaggcttatctttgatatttgtcctatttatgtttgcaattggattgtaatgatggcaggatgctccatgttgggctcctgtggatgctctctgacttagtttacaaacattttacttataattaaattgaatactgccaaatactctcttgaatatcttcattttttttttgttattgtttttcgttatagagcacactcgatctagcacactcgatctagcaaaatatttcacctttccttttgtagtttacaattacattttttttttatatttcacttcacatatttaaataatatttttacttgtttaaaatatatatatatttacaatacaaatataataaaatattataaccatccactataacttaagaatattgtagttaagtaatag

SEQ ID NO: 186218 - DNA, 2975 bp, Cannabis indica
gaaggttgataagttttagagaaaattgtaacaaaagtacctagtattttgagttttagttaatttagtactcatttatttttcacgacaaaagtacttttcttaattaaaagaatgccaacacctccattgcattttttctcaccccttgagacactgttcaatatcaaaccagactacaagtcttttagagtctttgcctgtctatgttaccctaatttaagaccatacaatagacacaaactccaatacaggtcccaaccttgtgtttttcttgggtatagactgtctcacaaaggatacaaatgccttgccaaagatgggagcctacacatctctcgagatgttctctttgatgaacatattttttccatattctaaagtttctgcaaaagaaaatactaccaatacttcctctcccattttctctttcgttgttcctcctaccatacaacttgttattcctctcaacgctccaacatctcctcaccaggatcctggtccctcatccacaaccatttctattgggcctattccctcatgctctcaacatgtttcctctgccactcctcccataaacactcaaccatattccctaccagctatatcctctttccctccctttaatgcagttgatgctacaccaacatcacctactgtctaacctaccactgacccaacagtcctaccatctcatgaaagagttaatgaagctacaattatcccaccaactacactttttcataataccattgttgcaccaattgtatttatcactaataaacatggtatgcaaactaaagcaaagtctggtatccataaaccaagaattctcactacttctctttcaccttcttctgtaaaggaagctttaaaaatatctcactggtttaaagttatgcaaacagagaatacaaccctcaagaaaaacaaaacatggatactattaaaacttccacctggtcgtgttcccattggctgcaatggtttgcaggatcaaagaaaatcatgatggttcaatttcaaggttcaaagcacgacttatttccaaggggtaccaccaacaagctggtttcgattttcatgaaaaatttagcctagctattaaacctttcactataagagttgtgctcactcttgcaattacaaaagggatggaaagtgaggcaattagacattaacaatgcttttttagatggtgatctcaatgaagaaatatacatgattcaacctcctagattcatagatcccgaatatcttgacatggtatgcaagctcaacgaagcgctctatggccttaagcaggctcctagggtctggttcgaaaaattatcaacaactctatttcaatttggcttcgtctcagccaaaacagaccaatctctctttgttcgtgttaaaccaaactgttgcatatatgtactggtgtatgttgatagatattttagtcattggcaaccatgatgatgaagtctctgctcttttaactcagttgagcaatgaatttgctctgaaagatcttggcctagtgacatattttgttggtatactggttctgtctatactagatggtattctcctctctcagaagaaatacttacaagatctcatctgcaaggctcaacttcaaggtctaaaacacagagtacacccatgaacagtggtctaaggctatctaattttggcagtgatccagtagaagatgtcactctctatagatcaattgtgggggctctacaatatgcaaccatcactagacctaacattacttttagtgtcaataaggtctgtcaatttatgcataatccccttcaatcccattgggttgttgtcaaaagaattgtgaaatatcttgcaggcactgtagactatgggttgcatctaaaaccagtgtccaacttcaacataactgccttctgtgatgctgactgggcttcggatccagatgacaggtgttccacaactagtttttgtatattcttaggggagaatctcatagcttggaagtcaaaaaagcaaagtaccatctctcgttcctccactgaagctaaatttcaaagcttacctaatgttgtgtccgaagtcacatgggttcaatccttactaagtgagttgaattttgtcccaaccattcctccttcaatttggtgtgataatctcaaatcagtaatgcttgcagccaatcctattctacatgctcctacaaaacacatagagattgatctctatttcgttcgagataaggtgttgtcaaaacaaatccaaatttagcatgttcctgcatcaaaccaacttgcagactgtctaactaaacctatatctagctccaagttttcttttctagaaacaaactatgtgtggtctctcaccccacttagtttgaggggttctgttaagagttagtcataaagttagttattcccgttgttattcaattagtttattacaatgtcttggttcttttattggttttggttcttgagctactggtgttagctcattcactttgtatatataaacttgtgtactctatttttttataacaataataaaaaattctttctttcattgtctttcttcttacaggaaggcaactattattaatttcaaattttcaatgaatttaagtctttctcttcccgacttgtgaattgagatccccccattaaagagtaataatgctaaaagatattatttgtgtaaaatactctcctgatatcatgatatcgtgattttaatttttttaattttttttaaaaaaaatactattaaggctaactataaaagtgcccaaaattaggggtgttcatcaaatcgctcaaatcattagcactacaccacactacaaaaaaaatacggtttgaaattctttgctgtgcagtcgcggtttgaatttttcttaaaccgcgcggtgcggtgcggtttgcagttttgaattattaatatgcggttcaaaccgcactgcaccatatatt

SEQ ID NO: 186219 - DNA, 1882 bp, Cannabis indica
atttaatgagtaatagtacctcagcattttttgagctgagttttcacctttcttgtgaaaaggtcaccatctttactagcaatgctcagccctaggaatatttggaaaccaataatttaagtattgtttagctctctttcgcagtttctctctatgttgaaaactatatgcatgcacaagtatttgactttaaaatgtgtcataatcagtgcaaattgtgcaatataacataagacaccttcttttcatgagaaaataataatctattgatggaatttcaaattatatattgaataatattactctatatggattaaatataaaaatattaatagatatttataaatataaaaactactccattcattaataattaatttgagatgattatatatattcttatcatggtatatttctgagtcatataaattaaatgtaaaaaaatattgagtcatattttagaacatattacattattaagagctattaggtaatttaaggtggcgtttggttggaggtaatgaaatggaatggaatggaaaggaaacaatttttattctattcttttgtttggttgcattttaaatgtaacaagaaaaaaaatttaacgatttttttatcaattttttttatgcattttaaattttattacattctattcttatttctattcctattctcattctcattcctatattttcattcctcccaactaaacgtctcctaagttcccaaatagtaccatactgagccatgtaacatttataagtggttatataagggtttctcatactatatttctttagtcaaaatgtgtgagaatgagatttaataataaattacattaataaggatatattctatttggtacagtaaattatgtcttaattggcatttgtctacatgcatatattaatgtggcccacatctttattacgtcgtcgtagcaatatattttgtagaatatatattaatgtcaattataggctcacatgcatttacgtacgtacatttatatatttattatgacatttcatcatcaatcacagatattaaaatcaacaccagtactacatcgatagagatcttcacaaaaatctaagggacatattataacatcttaaaatagactgtactacgtacatatatacttacgtgtatatatatttatagttgatttcgaatcaacgtgagacctacagttcatcaatgattagatttaacatatagaattgataacgttattcatttatatggtggatgttgatttttcaaagttccaatatttgttttgatttcagtactaaacacaatattttttatctgacatgattatatatatttacatgtgtttgataaagattaaaagtcatagaacgagtatatatatatatatatatatatatttattgaaactcaaactaagagaacttgtatttatattggagattatagaaactatgtacgatcgaaatttgatatagttctcttgtggtgttcttatttttcccattattaattattatttttctctttatatgtatatatttatttatttacattgtaattttgtttttgatataaagacaacgtaataaatgttaataacaaaataataaaattttagtattaatttgttcttcaattccaattacaacactaaaagtacactaaaattatattctttattattatattattttattaaattataaataaacacaaataataaatatacaaaaaaacattaaatatatagtgccacactaacaatagtaagacactagacaattaatgttataaataataagatagattttaaagtgtggttagaataaatttagtgtaaaatctcattaaatttaatattttcctgttttat

SEQ ID NO: 186220 - DNA, 8466 bp, Cannabis indica
  modified_base (8386)..(8386): a, c, t, g, unknown or other
attgacgttatttgctttgtctctttcatctttccaaggaatttgggaaagttttttcttttcttgtgacattgggagatggagatttaaatttagaccacgttcttaaacagtgataatgtaattagcggtaagtacattccatttagttccaataaaaattgagtgtaattatattttctaattacgaaatattatcaattttaaataatcaagtacacaatattattattctgtctagttactatctctttagccaaaaaatttaagctaatagcgattgccaaaattacttaactgtacaatttataagatgcatgagtgtctataacaatttaagctagtcatgtgtatcacaaacatatagtagtaactttttaaaacactacgtattagtgcaaaaaatcatttacaattccctcaatctgatactgccatttaagaatgcaactaaatactaaaaataaggataagcttaacatacgacatcctcctatgcacttgaaaccacaagatctagtagtaacaattaatcttttgggcttttaattaaatgcctacataattatgtctctcacgaacaggattgtctttagcttttatggagtttgggaaaaaattttaaaaatgggtcttttatttgaaaaataaaataaaaattcaaataagtttttatactgttgttctagcaaaacttttttgaggccttaaggattaatatttaaaaaaaaaaaaaaatctgaaaagaaaaagaggttggaaggccttttcggcttagggccctaggacaatggccccagccgtcccaccaaacaactttccttaagaggatgaggcaccgacttcatgattattgaatcctactagtactaagaatgacaaatagcatgaataaaataaaattaagaaaaacaaatgacatgcacctgacaagccgataggcagacatagtcattagagatgaacccagtacaagaaaagcatcacaatcctttgcagcctgaattgatctatcagctctacattttgggacattatcaccaaaaaagaccaccttcaaaatcatcaatcacaaaggaaaagttcagagatacaagccatctgctaagaaattttttgtttagattgtttatgaattgaaacaaattgaaaatgagtatgaccgaagtcaataacaatagaacatgtaacacaaatatacaatcaagttgattaacgtacaaagattcaacaattcaaacgaataacactacagaaaaagagtgtcatctatatctcttgcagttcggtctgagaaaataaaatcaaaacaatatactctattcaagcagaagatctcaagaagatgatagccttcaaaagaaagtaagaacaatataaactattttagaagaagatgaagacgttgaaaaatacaacaaacaaacgtcgatactatattctttttaaagcagctcagctcgtgcttgagatggccagcatctcacttgcattcatcaaagcatgatgtgactgtgacatatacaaaatgaaaatttcattctcggttttacgagaacctcaaacttaatgggagcaaaccagaaaccaaaccacttcagctctctttttggaaacattaacaatgtatcaagtattaaaaagtcctactgatattttggacaccgacagctggtcagaaagtcagattcaggaccgttcatttcactatgattgcttcttgtgggaattcttaaaacgtttaatttttgtgtgtaacaggaatacatgatagtcatctcaaagtggtacgttactaacatacaaaggtagcatattgttagactaagttgcaagcattggtgctgagaggtggattggcaatcacataacatgaagtggcgagaaaaacatgtgatgtgtcaagttgaaggcagtttgcaacttgactgggcaaaaggtcattttccctgaaaaaatctaatcatatggcatatttttatcaagaaaacatgtggctcccgttgatttattatccttttgttgagttaatgaaaggctgggaacctgcttgcttgtgtgaactttgcttaacttgagtcatgaaggtttctattgtacattgtgtatgttctgtgcaaatttgagagggctgattagtgtaaaaggtcccaacaatacacggatgttttaagtgagtctagaccctttgacacatgtttttctttttcaaaaatgagaaagaggtcacttgtcttagactctcccccgcgtattaagaacctcacttgtggcagaggaataccttggtaaacaaattaaagtataggtaggctaaactacactcaggaacaaagcaaaacaaatcataaattctatttacatcaacacattccattccctacacaaatctaagaaggaaacactctcaaaatgctttgttttaaagacaagctttaccctctgacaataaatctatccccacccacataagacatcgaatctatgttcacccacataagtgataaatgtttaaagagagcattaacataaaattgaaaaccttccacctcaaaatgagttaaaacttttaagtatggatgcaaaattaattgagtatcgtattctagttgagttaagtttgaataattaaaatgtcatcgtctagagagatcaataaaatataatattaatgatgattatatctgattattggaactatcatcaactaagaacatgtaatgccacatttagcaacttctgataataaatcaataataaattagttaaaagcaaaatttgtaatttacgagacagaatgcttacatcaggtttaagcactccattgcacatttcacaagtaggtatgtgaaaatcctcctcccaaaatttttcatcaatctcgatatcaccgtcaggcctttgcttcatgccgaagctcttatctgacccagggctaccatagtccaaacattcaatagctgatgcccactgcagtgaaaaatatttacttgctcgtcaggtgactattgcaattaaacaactcagcaaaaatgagtgtttcagttgctaaaaaggaaaatattcctgagatcgtattttcctcaaaatattaaaataagtaatattgtaaatttgatttatactgctttaatagtttggttgcttgtttgctcaatattcttttctgagtcacttttctgaatggataggacatatagctgccaatatgtatgtccaatcctctgtcggcccaaccatttcaagcaaaaaaaccatacctaaacatctcataacatagagaccttaaacagattccatgaactgacactaaatcctccatgatagttgtagatgttctcatggtcatgctcacagctgcccaagtccatttctttacttgttttagaaaatgctagaaatgttatccattcttctataccttctacctaaattccagctactttaaaattacttttccactgggcaatctaacccattcttcattaaaactgccatttcactaaaagcctaaaatgaggattcttcagaaaacttgacttcactgacaagagttagtataaatacgataatcttataggtatttggcattaaataaacattggtcagacccaacctttggatttagggacttcacttgttcttgaaagagatcccggcaaacagaaaatccacaatctaaacaaacaacctcatacacagtgccatgtaattcaagggggttgctacctgcacgctgatgcagcctgaaaaacataagttagtcctaatagactttccctaggcattatgaagcctccacaatgtttgctcaaagatagaggcttttaagcaacctgtcaacattttgagtgatcataaaatttatccgtccagctttttcaagggatgctagagcgatatgagcagcaccgggttgtgctgcagtaaactgtctccagccagcataacttcttgcccagtatcgccggcgagctcggcttgagcgaataaactcctgttttggagaaccagacaaggaaacaaatggaaaagattactataaaggcttcagttcaaagttaagaaacattaaaaatcagtttactactaatttccatgggtcatatgctctagtttgtttgaaagagttgtacgtcatctcaagtatctcatatattcacatgttacatccaaaccctaatatagatagtaaatgcataggaaaaaataccattttcaagatcatccaacagctaaaatgaaggtgtgattaagtcattgaaaataaaatttctttatgcttgccaaatagtttacataaagagctcatttggtaagccgttttaggttgcattatattatattgtataatattaaattaaattatatgtcatatttttatataatactttgttaaattgtaatttatactaaaatattatatttatatactcataaaagtcaataccacatataattttacataagaatatgatatgaaatacaagtcaatataatactatactatacaataatactatatgaaataatacggcataccttaaactctccaactttttagttaaaataaactcatgtcctatagaacatatcaatatatcaaactacgatcatcataattccttttagtctcatcttacaaactaataagtatctttctcatcttcacctgttcgctctaattcttccatggacccctaaatgttatatttgaatgatacatcttttcttattaaaggcgaagaaaaagataaggtagatattcctagtacatgccttcagttcacctgatgagtaattggtttgaagccagaactataagctccatttgggctgcattacagaaagatgaaaataaaattaataagtacttaaaaagaagaaaataaaagaaactttctgagaacaaattgacagcttgtaaaacagtatagagcttagttaaatgaattatgttgatgtagcctgtgcaataaaacagtaacacaccagtagagaaagccaaaaatagaaacgaataagaagatggaattggaattggataattttgttttgttttttgaaacagagacaaggttaaatgtcttagaatgaccttctaccaaatatgttgggatcctcacttgtggctgagggaaaccatggttacaggatagcgcaaatagaaaagaacaaaacataatcaaaactttcttgtacccttagagttagatcattaccaggtattcgagatatttttgaaatacctattctaaatatctgcataccttactcacactctctacacctcctacatgcttcttgcataactaactctgaaattacaaaagtgccctcaattctgaataactgcataccttactcacactcgctacacctcgtatatgcttcttgcataactaactctaaaattacaaaagtatcctccccaccactcacagcactctaccaaaactaccttgcgccacagctggctgttttcccctactagcatatgtgaacctgatttagggtctaacatatctatgtgtactagtatttgaataacttgtcactggaactcagctaagatgacttaacaaattttcaggcatgatcagatagaatgcctgcatagatcatagaatcttgatcttaataaatatcactttcaaaaattaaggtaacacaagacttggggtttttctttttataattgaatcacaagagtatcaataaaggttatcagatattctaaaacaaagaaatcatttaagaaatattttcatcaaggttatcaggttttgtaaaagggtaatcattctacaacaataaaatgaaaatacttcaaattaaaagtgactgactacctcacctgagtaatcaaacaaaaatcaaaaggtatatcaataaaagtccattatttggaatcatgaccttaagaatgaatacatgacacatatatttcacaagagtacgtctaatgcttctctgtatcagaatgggtttccacaagaaaatttaaacaaaaacaaagcaaggtaacagtaaatggttacaatcagacaggaattagaaactacacctgtttacccttcttgatgctggcaaacattgagaaagaacataaagaaagagtgaagaatacaataagtgagagaaaactgaaccaagaaaggggatcagtgacgtgtttgtttccaaaatcttataataaccaaaaaaaatctactagaaaaacttaagaaacccaactatatatgacgagataatcttcaaataataacttataacaatcatcaagtatctcatactgcatactgcagcatcagaaaaaataatatctaaactagttttgcagactgtggaactaaacagaagagaacaatttcattgtgatcgaaagtataaaatcaatgcagcaaactcttgatgtgctactgcaaaaaatgtaagaataaaaacaaataggcagtgctgattctgagttataagcaatatgaaatttgagattatgaataatgtcagttgcagcaacatgacatatcatggggcggttacaaagcccctaagatagcaagaacaatgttctaacctctcacaagtcaaaacttaacagaagtgaaagtgagaataaccttctataatctggaataccacattctgtacttattcctgctccggtcaacaccatgagtttcttactgcaaaacaaacaagctgattagatagagaaatcatattgtaaaaaaatatgaattaattaggagacatcttctcttttattcaaaaggaaactttctaggaatagattgttcagttatttccttccttgtgtagttcagattctcctagctgagtaaactgtctaactataaatacctatgtatattctcagttcaatgtcaatgaagaaaatattttcctccaaacttatatgatatctgatcctaggtttaagattactgagctcttatcaccatgtccaaaattccaccagtccaaactccatctcctaccacagccacacctcctgccattcaaaatacccaaaattctgctgatttcagtaccaatgcttccattcaaatcactcctgttgggtttattcgtaagaacatcttaaaattggcccaatttgtgaaattagctattgatgatggtaggggaaaattagattatttgacaagggagatgacggaatttttctcaggttagaaactttctatctttgatttagaacacaaagaattgaatctcacagagaattgctctattgatgatagtggtaaaggttacaactagcttccgagaagctaatttctccaaatttaaccattcaagagggctggactcttccttagatttaatctcttctatttccaagctaccttacaaatgaatcccttcccactgcttatacatactggataacataaaattgtgcccgctaggatctactaaaaataagataaaacagccctttaaaataaaagccaaatgaaagccacctatccttgcaggttccagaatggaagaagctgtccatgaaggagatgcgagcttcggaaaaagaaccaaacgttccctgatcgagttaccaaagcaaaagaagatggtggattgcaaatggggtcttcaccctcaaattgatttatgatggatctctggaaaggtacaaaacaagactattactaaggggttcactcgaacatacggtaatgactactcagagacatttgctcgggcaaaattcaataatttccgagtgttactctccattactgtaaacttggagtggcaactgcagcagttggatgttaaaatgctttctaaaatggaaatcttgaagaagaggtacacatgatggctgtataggaccctattctctatgattttatacacattcaataacctataactactatactctttcttcaagcttaataaaaactgatactataaatctacattgagaagatgggagattcacctttcatcgaaaaattgatacaattgttggacttcctgaatgctaggaggttcggcatcaggaaccaacttcttctgcctcaaaaagttagaagccacgatttcttctttctgtgatgagattccggagactgaaattcgacatgatgtttgcacagattttaaagaaccctgaaaaggtatgactcttcttccccaactaaatggttgccaatttctacaacttgaatgaataatgcctgtacaggaatctaatgccaataaaatatcacatacttagattaaagaaaatcggaatgaatcaaacgaatcagtattcagaaattacgataccagcacatttgccttttaagatgcttcccatcactcgttctgcatttgtcccactctgtataatgcaaaaaaaaaaaanaaaaaagtttgtataaaaggtaaaccaagacattttatcaaataagaaaagataaaccaacacatgataaattactttct

SEQ ID NO: 186221 - DNA, 4124 bp, Cannabis indica
aaaaactcctaaaacaattgggctatatatctcaacgaagaaaagaggcccagcccataatcgaggacaaaattgtcaatacactactatgcatgatgcaccgctttcagcccaaaacccgacacgtgccaggacacgtgccatctctttctcggccttcttcctcattcacattttttttttttctaaaataagaaaaaagagaaaaaggaagtaaaaccagtgagaaataatactcggctatggaggaattttcagtagacgatccaactcagttgctcgaagcagcttcagagtatgcattttatcctggtaatcatcttcttcctcaagacttttatctatttctagttttactactattattattgttattattttcattttcattgtaaatttcttaatattttttaggtgttaaaaacgatgtctcgacgaaggatttcctcgatcgctttccacttccagtcattatcaagtaacagaaaaattatttagaaatcttaatttttgctatgttcgagtaatactgatatttttgagttcatataagtgatatatgtatgtatttattggtattgaaatctagcatgtgaacaattaattatttttttcccttcatatatatatatatatatatctttgtaataattttcagtagaggagaaatgaaattgtagtgaggcaatacaaaattgactaatagagtaggaaattatcacttagattattaggtttagtgactatagttgcaaaatttcttttgaattttagcattttattttggttgatatgttaaagtgtccttaaggatcaaatttgtggcattacttgatgttggtgttatttgcagtgctttgcaaaccaaatcagatgtgcctggtctagaaaacaccttggtttcttgcttagaaaggatattcaaaacgaagtatggtgcctctcttatcccacattatatggtatgcaactgacaactcatatttctcaagtatttcacttttagttgtttgggaagaatatatagtatacttcttcttggtcatcaagatttgggatttaattgttccttttgatttttcgctgcttaaatgtgaatatttattaaaaaaaatcataagaaacaaagattttgactctttcattgatgaaaagttgaaagtgcaaaaattactcgagtttaagtaaatttgatccttgatctcgcaccttcgtatcgtgaaaagaaaaagaaaaagaagaagaaaatgttaaaatgaacacaacagatacaagcaagcctcccgtcactaaatttttatattgtttagtttgatgaactctgtatgaggttcttgttgtttattttggtttatattttcaggattttgtcatggttggccttaaggcggactctcaagtggtcaaatgtctagcttgtaaaacggtatgaatatgcgatgcttaaccatttactgtcattacttgtattagaaatatcttatttccatatttcattaaagatatgctgtgtaaactctggcggtgtttcaggagctattgtttagaacttcagaactactgttctctctagtttattttttcaaaaagttgtttgaagtgtgttattttagttatattcttcttctgtcaaattttgatcatattactcgtctgcttcatgactgtttctagttcctgtatttgctatgctgcttgaagtgtcattcatagaattgttggaggggttcatcatttgcctgcttcacttcaacaaggaatgtactgaaccagatttgtaaccgagcttagttaatgctctgtttgtttgtttgtttgttattaagaggaatagggttactcatgaaatttcaccatctcttacttcccttgttcatgaatcggtgttacttggcattgataccaaactgctgctcttcctatttatatcagcatgctaagtagtgactttctgatacactcaaatagattaaacagagaaagaaacctggttctctccccctagagcaaagctcatacaaattgatggataccctcacacacccatatatctcttcactcttccttctaacagtatcccctaaatcccaataaaactgttacaacctcctgtgactaagtatcctagtcagccactactcatttattataccgagatggttgatccgtatgggaggtcttatcatatttttttggagattacctagttcactcaacaacaattaatgagtatcatagcacatttggatgaactcatttatttatttacgtttattaattctcaaaaactttctagaccttcctcctaggcattttaaattgataatttaatgtcaactttctgcaggttacatgcctcctggaacatttaaaggaagaaaatatttttggcgttcagcttataattgaatatggtgtatatccacttctgcttgattgcgtcataaatgggtaaagggtccattgttacttgttgtgttcgcactgtagtacttttattattttctgtttatcttcttgatcaccttttttattgttttttttatgttatctgaaatatttgaggatcacatccacggataagtaaatataactattaaattcttttgccaacaagctattaaaatctgtctatccagttgttcggagcacagttttacaatactggtcgatttccaaagaggaaaatgaatttctctctttgcactgaaatattccgtgaaagctcaaaaattgcaaaatatatattagatcagttctccctttgcaatcccttagttgaaaatctaatgaagtgtatttcataatttttgtagcaatgagcaagtgtcgagtgcatcaatggatgcaattaagacattagctggttttccacaaggcaaggtaggaggtgtaacttatatttctagtctaatctctaaatttttgagctgaatatcctttatgatatatcaatgtttgtgttttaaaatttgcttagtgactaatgctatttttcaggagattgtcttcccaactaatatcaatgacgccacacatcttggagtgttagcagcaaagtgctcatccctggtatggtgaatgctgatttctgctttaatctactatatcttgtttgaagcatggtgacatgtttttcgtttgaattagggagagactatttattgctaccacagattgttcttctatctgaaaaatattctggtgcaacttgtgtgcatagtatgatgagactgttgactttggcaatagcaatagcaattccacatggtatttgttataatttgttttttttccccccttaacttacgcttctcagggacaagtcagagttttggctttgatagtgaagttattctctgtctccagtgatgtggcagcagtaatataccagtcgaatctgcttaaactttttgaggacaaaatcaagaatacagatgacatccttgtaacattgagtgttttagagctcttgtatgaggtctgtcttcaattgcctaaaaatttatattaattttacccctcatatatttatttatctatttgaaaaatctgacttcaagttattttctatgaacagcatttatctcttgcattatcttaggacttgggatggtttagtaactagatttttttatggtcaagcatgtggtttggtcttaataagtttgagctttggatctcttctagttacctacatagcatttgtaatagtttcctgtttctcaaatattgttgggtttaggtgaggtgccactttcgaacaaagtaaaaaagtaaccagatcttgttatctgccaatttagtataatgattttaagtgtaataggatgtaattgtaatattttatatcttctaatactataatttctcatacttttcttgtattatattacttgagtaataatgcactagcaattttctaagaatgcagtagcaaatttgaatataaaattttacttatcaagacaaaagaagtaccagtctgcgtcctgtcaatgttaatttatgctaattttaagttagaattctctctccggaacaattttaatcttaataagttaattgtttttgtccttgtttgtagctgttgttaaagttgattgttttatttattttttttt

SEQ ID NO: 186222 - DNA, 3178 bp, Cannabis indica
gtgtttgcttcctctcctaaaatcacaattgttcatgctaaactttgttgcttataaaaacaaagaataattgactaatcttattttacttcataaaatttggcaagagcacgaacgttcatatttatcaccaaaaaaaaaaactagttaccgcctaaaataaccaaagattctgaagaacgtctaaggtaacatggaaattcgaatagtctaatatgaaatgaaatggaagaaaagaaactgactgagaaatcaaggtgaaactcagtaaaacggttgctaccaaaccagcatcattatagccaatgggaaatcgataccatccctggacaaagggcgtcgaaaaaattcatgactcgacagacctaagggtacatcaaacaggtttctgagtttctgcaaaactctccactgttgtgtgtctcctaccgctttggcatgtattagaacgttaaaaacctggtatttctcaactgttgactctctcaaagaagtacagatatcccatgtccttcggaggattaatggaagccccaaccttgtcatcgttaaaaatgacccatctcccatctttgaaaatgtgagccacgtaatgcccacattgagtcgaggttccaatgtggcttacaattcccataagcttgtaccctgcaaaacggagtaacaaattgagaaattagcagaataatttcattatttggcaataagaacactttagcttgtatactataagaccacacattgaaaaatgctatgctttctacaacattaaaggctgcaaacttattaacttttcctttcaatcaatatgtttgaacaatctaacagaacatgcacaacaaacacattgactatttatcaattattaaagacaagcaattatgattcagcacaatatactaacttcctcccccatcaggtaacccgatgtcagctggattagaatttgggtttgttgtcgtttcatccatatcagatgaagatgcagcatcaggattgctgaatatccaatctgttgctttctcaatatcaccaccctgcaatcaataaaaaaaaatagctatgtatggcttccagacaaaaaaatgtaatgtatggcaaatggaaatcggaattcacattgataaaatataaaaaatcatatatgttatataatcttagaaaatgtagaaccatcttttttacaaattaataagaacggaggctaaacattttgtcaaaaagaaaaaaaaaagtgtacagtgtaataaaattaccgatgccttcagtgccttccgagctacttcttctgaaaatccaaatgaaagcaacatttcaagttttgattggtcgactgcaggttctccaccttgagatataggagcatctatatctggaacataatgcatttagtataggttactacttactataacaacgtaaaattacagtcaaattcatagttcaattatgcaaatggctagtttttaagggtgatgaaacttcctttagagaaaatacgaaaacaagtacctgcatcgtccatgtgagaaagtaaccaattcattgcctcttccactccggtatttgaggtattaattgcagccttctgacaatgaagatggctaaaccccattgaaacaagctgagatacaataccctcatcggccaaaggtagatttgattcagcctcattgtcaggaactgaacaatcatattaacaatgccaagggcaacacaaaaatacaatattaattgaaaattaaaggagataaataaacaaaataaagctaaaaaaactgaaaacctaccaccctctggtaagatctcttcccctggttgcaatcccttgctgcgcatgtgactaatatctataatatcgggtacatctacatacacatctggattgaaaagaaatattgagataaaaatacaaataatgtaaattaaagatggaaatggaaaatcaaagtgatagaaaacacacctagctttttaggcacccagccctcctccattacgaatttccgcatgtgtaaaactaagtaatcagggaatgaagttagacctgtagtcctgcaaggtatcgaggaaaagaatggtaacataacagtgccttggaattaatgtcattatagaagaggagaagttgtatctagaaattcttagtttagaacatatttaggtgtatcttttaagagattagtccgcagttacataaggaagattgtgtacttaaaataagacaatatattggtttatctttcaaaatttggtagcaagacactaaccaacatggggaaaattttgaatcacatcccatcagggcctctaataaactcacatgtaacatgaattaaccagggttttgtcaaaattgaaatgtttgagaagagatatctccctaggtattcattcttgacaaaatatggttttcaaaaactagaactagtcaatccaataccaaatcctaaagtaatatttattgtttaaaaaagacaaacacagatttagcacacacaaaagagattgatgaaatatatcagaacactagcaattctgtgaagcttacttgacagctgttgtctttgccttcaacgcagtgctgtaaaaatcatgtatctcttctggagatgaaaagctagcaaggcatgcttcaagaggcacccttgggcgtacaatctcatcattagatctgccagatatggacacgcttagctaagactaagagtgctgaaaataataaaacaaagtacagaaattcaacgtacatttccttcccttctgaaagtttttctgctttcagcttctgaaaggcttcaagttcatctgcaatctcacgaagaaaacacaaaatgtaaattttaatatgaatgcccagttaaagttatagtgattcccaaacaacctcacttacccttattagaagctgcatgcaacgggatatttagagatagaatataatcaagccttctattgtaagcaacttttccagaagaacactgaatacgatcttcaacaccaaacttgaagcaccttgaagaatcagcctcagatctcccagcattagatctttctacttgatcaagaaaatgaaggaaaaactccagggcatcctaaatataagtttcaagtcttcaaaagagcaaatgtgtagagcttaaaaaatgaattaagtgattttccaagaattcacaaa

SEQ ID NO: 186223 - DNA, 1417 bp, Cannabis indica
gttcttctattataagatgccttttctatatgaatagctattctatatataccctttttcttaacactacgtttttttattgttttattatgcgttttataatgaaatctaacaattgtttcattttttctttttgcaatcttcaccaaaattatccacaaaaattatcatccagacccaaatggtaagtacatttttctttttattatttgaacatttaatttaattattgatttaacacacaattaattaactttcttttttttctttccaaacaggcccaatgtatttcaatggagtttatcacttattttaccaatacaatccatggggagcagtatggggtaacatagtttgggcacattcagtatcaaaagacatggttaactgggaatctatcgaaccagcaatattcccatctgaagattacgacataaatggttgttggtctggatcagctactgttcttccaactaacaaacctgtaatcatgtacacaggcattgacaaaaccataagacaactccaaaactatgccgtacccaaaaatctttctgatccatatcttagagaatggatcaaaccaaagaacaacccaatagcagtaccagacaagagtgaaaacgctagtgcatttcgagacccaacaactgcttggaaaggcagagatggtcattggagaatggttgtgggtggtaaaagaaatatgagaggtatgacacatttgtataggagtaaagatttcaagaattggattaaagcaaaacaccctttgcattctgtaccaaatactggtatgtgggaatgtcctgatttttaccctgtttcaacttctggtgccaaaaatggtttggacacttcttcacttggtgaaaatgttaaacatgttcataaagttagtcttgatattactaggtatgagtactatactcttggtacttatcttactcataaagataagtatgtacctgataatacctccattgatggatgggctggattaagatatgattatggaaatttttatgcttcaaagtcattttatgatcctgttaaactgagaagggtcatgtggggttgggctaatgagtctgatactgaggatgatgatgtagctaaaggatggtctggagttcaggtatgtataaaatatttgttatgtttaaattttgtttattattattattattatatgacaccattgttaacttttgttttcttttctttatagttgattccaaggactgtttggcttgatcctaatggaaaacaattattacaatggcctattgaggaaattgaaactttaagagatgaaaaggttgaaatgagcaatttgaaacttgaaaagggagatttttctgaagttaaaggagttacagctgcacaagtattatgtctaacattgtcattattt

SEQ ID NO: 186224 - DNA, 4547 bp, Cannabis indica
tcagcaaaagttgctatgcctagcatggaaaggcaaagaaggaaggcataagatgctgatcgaggataaccaaactaaaacatgtaaaaccaagcacatcactgacctcactgacagagtatggttgggaacgcataaggaaatggacaatcatataacctgtccgattgtgcccatgtgtgcaatgaacaagtatgtacttctttgagtgtttttgacgggaaatgaattgtgaaacctggaaaagaaaaataaacagaaatggaagtttcttatcacaaggttacattattgattaattcttactctgtaaatcaattaacaataaaacactcaaatagtaaagaaacaatctataaatactacaagactaaaacataaagaagcacatattatcatgaacctgttgcacacagttcaactactaattatgccaatcaaacattaaaagaaattgtcaatttgttgccatacacttccgggctgatgtacacaaagaggtggcaaatatgaaatccacaaaaaacaatctatacataaattactaatagagtaatagattatggttccaataagataatagagtaataagattatggttccaataagatgatagttgaaataattaaaaaaaatatatatcaatattgtatatgcgtgaaagcatctatttatgcataacaaatggatgtatcgataaaaaagcaaacctcatgaacaaactggttgacagactgattgtcaggtgcagagcccctccccctgcattgaatctagatcacaggaaaagtttagctcaaaatgtctgtgaggaaacacaccaaaaaagaaatgaaataatatgggggtcaaactactgaccttaacatgcttaataccctctttcttcagatccgttgtttgatagtagcgagatgtattggtcaaatcaatcactaaaccaagctgaaataatgaatatacatcagaaaaattttaatcaaacaaaattacaaaaatcaagtctggtaatatgttgtgacagaaaaataacctttcttcctaacaccctctgttgatgaatcacttgtttgaacgagtatcgttttccaggttgaatacaatcatgatatgcttcaccaagtggaaccttagaaggtatcatgcaacatatttctttaccagcgggagggcagtcaatccaacctgcacagaaacaagtattacttaagaatggaggcaaagacatgctctattgaaactagattctcaacctaaccctacaatatttagggaacacaagactatagcagttgctatgtaggtgtccaagagggagtcaaaactcagacctgtgttagcaaaccacatacgctactacatgcttgaacatttgagctaccctcaagagtaagacaaagacaaaaacaagtattacttaagaatggaggcaaagacatgctcttttgaaactagattctcaacctaaccctgcaatatttagggaacacaagactatagcatttgctatgtaggtgtccaagagggagtcaaaactcagacctgtacactactacacgctttaccatttgagctaccctcaagagtaagacaaaagacaaatacatagacaatgaggccagaaggtctgtgggagaaggctaagttctgggtagcagcttgggtttacaaggctaaatgatttgagagactttgagagactatccttccaagatctaaggagagattggggaagtttaaagcatcaatccaaaaccagtaagagtaaatgaaaataaagcagaatatcctaactttccaaaaataaagcctgaacttataactggaaaaaaaatgcatattaaacacagttttaataaaaataaagcagcatagttgtaaaatgagaataaacttccaatccatctctggaagactgcttaacatgtgtattcaacaaagcgttgctaatgctattactctagttgcccatgaataatgaatcatacatttcccagtacaaccatagaatgtactacacaataaattgccaagcgctattaaaaataatgtgcgttaagcactttcttcttttttgcagcaatttattcacagccttgactgttaaatgtatgattcattattcatggacgaaagacttattacgaaaattgttgagtgcttttcaaacaacgtaatatatttatgtatatatatacaaaaaaaaaatacttaccagggggaagcttgctcttatcataaactttttgtgtttttgcttggactgactggtcatggtaagatggttgagatgtttgcataggcctgtcatctacacgctctctttttaatcgcatgcgtctttcttcacgctcctgacataagaagcatagagagcatccatcacacacatgagaatatatatatatacgtatatatataattgatataggaaacgagggttgcgtttaaaccacacttcagtgagcaaagtaacagaaaagaaacaatagaaaagaagaaaaaaggaaacaacaatttacccgacgtgcaatatcaacagcagactccacacgttcatcgggtgcactatattcttctacatgactagcataaacgtcttcatcgtcttcaggtattggtgaggcatttaagtccatcgcaacgatcattcataatatgtatcacctgtttcatttcaaatcaaaacttgcattgacattgcaggcccagcatgagaaaaacacacacatgtcacatatacgtacaatcagtaataaccgagttatacctgactatcaatctatacgttctaacaattccagagccagaaaataagaatacctaatacgaatccaaccattagcctaactccgtatatatataactaagtttcattgttaaacaacttctcaggcaaaggacaacaccaaaattaaaccaatgtacgaatgtgaagataattaacaaaccaattaatgaaatcttcttttatttctcaaaccaaagctagatagatcagccaattcactcaggtactactaacaaccaaaaaccctaaaacgaacaaaaatttcgaaaaacccaagtgcttaatcccatgttccacacaggttcaaattagaaaacataaatcaaccaccaaagactcaaacctcatggaaacgtgtcagaattaacaaaaacaacgatccgcgcgccaagccaaccgagtaaacaaaaacccaaatcaagcaagacgtaacgtacgatctttaaaaaattgagaacaatcaaagaaaggttctctttcttcttcgatgtctgcttcggaggtgatttaagacgggagaaacgaacacgaaaccctacagctacaggcgatactgtaagtaccttccttcgttcctcgcaactgggaagctgtgtgcgaaaccctagaaagaaaaagaaagaaagacgagtgagagaagtaaaggttgtgtattgattaatccatgtcaagagagagaggaactgagatgagggaaacaaactcacgattcgatattggtaggtttttttttttaatgttaaaaaaaaaaaaatatcaaatatatataggtgattttccttttttttttttttttgttgtgggagaagaagagggtgaaaatgtaataagctagtggtagcggtgacgatgagtaatgaaaatgtaacttcacgggccaattacaaacaaaaaaaagaaaaagaaaaacttcacggggtaattttcttaaaataacttataacatagtatttttttccttaaaaaaaatggcatgttaattttttttttttttaaggaaattggcatgttattgaaaagaggaaattagactctactttttttatattgtacttttttatttttactctcttttttaaaattaattattttacttttttttttttaacattgtactaattttactcatttcacttcaaaatacttgtgactcccttatgttagggcattttagatacaatacatataaaaagagatatgtttcaattaaaaaaaaaataaaagtaaatttggttaaaagatcaataaaagaagcattttttaacttactcctattaaaaattaatataaatttactttttttagtattaattataatatatgttgagtagagaccatcaaatcaaaatttagctccttgtcaataattattatctttaattaaaaaaaatattggaaaattttactctcataaaaagagtgtatcggtgcaccccatctgttttgtaatctaaatttttttttttttgtaattgtgtacgttgtagttatttaatacattttataaaattttaaaaaaatcagaaaattaacacaccaaaaatagggtttaaacaatcgattgcacgtgtgactcttttattctatttgagtaaatagattttgaacactattttttatattgtaataatttattctaaatttctcaaaaatttgtaagatgtcttaattaactataacgtacacaactatgaaaaaaaattagattaaaaaattctcttaaatgtcaaaacaaaaaaaaaaagtgcatcgatat

SEQ ID NO: 186225 - DNA, 2700 bp, Cannabis indica
aacctaaaaaactcaccacttctcgaacttcttgttcgaacaatttagaagcagcaggtccactgaagttccgtaccactcccaagctaagttcatcaaccttttttagagattcaaatgtctcaaaatgcaactgactgtttgggtaatcaaatgacggccaacgtttttcaaacgactctttgtacagcctcccttcacgaatattgttggattgtaaccactgtacatattctccaaggaaattctatacgacaagaaaatgctaacatttcaatattgagttgaaaaaaagaatcacataattctggagataaaatgatacaagggaaacacaagtaataaatataagttatattagaatctatgatgcaatgatagaaggcaagaacaaaagcatcatatccatgcctccgagttcagacaaataatatgcatcgtcgttttgatggctcactcaaacagcagaaaataaaaaggaaaatgtttatggaaaaaatattaatattatcttacttgtgcatccacaagtgcaggacccattacatcattttgaatccttgaggtggcaggaaatgtagaagaatttccccctttgaacacatatgaggcaacaatatcaagatttgataattgcattgtactacgtatgagctccataacttgtgattttgctttatcaatctgcagtcatacacaagtgtagatcattaagtcaaggaacacatgcagatgtgcttccaactggtaagaatatgagttatacgagcttaccgttgctaatgcttttcttctccaagatatgctctcaccttccattttcattgcataatcttttacactgttaattatatcagttatcgaggccaagtcctgtttagcataacgacagtcctgtctcacaagagcttcacaggaagaaatcagtctttcagcaattgcaatgggtgttccaagtttaagtttcattctttccattccagtacttgttgacccatctaaaaagctatacaagtacttttcgagatcattgaaggtactgtgtttccagtgagaatcagatagtgctatttcttgatattccttttcaaggtcatggttttttgaaagctttgcttcaagggcagatcgtgctgacacaggatatattgttacatcttcagcattcaacaacttccgtgtgttttccttgatgaatgacatagcttcctcaagctgcaataaatcatagaaattagaatgtgacaaaacaaagttgattgggaagcacaagcagtacaagtttgttataggtattggacaatgaaagctgaaggtaaataatccattgacaaacctcatcagcattacgatagagatcagatttattcaagacaaacacaacttttttcttccactgctgaatatatcgaagaaaagaaacctgaaaggacaatgccagtagcagaaccaaaatgagtcacgctacactagtaaaaaagtaactggacataatacatatgccagagctcgtggtatttaaatttacaaatttcgtatgactagaacaatcaaaaagcatgctatgccaaattgacaaactaactaagcatacctcactttcggttagaggacgatcagcagatataacaaaaagaagcaagtctgcacggggcacaaattcctcagtaaggcgttgttgcctctgaagaatcacatttgttccaggtgtatcgactatgttcatctgcttccacataaactaaataaattagctccattttgatctcatcttctaccaaaacctttgtagcaaataaggttgtgcacaattttctttttccccctttccaaacaatcattgtgacagaaaagaataataatagcaaccaaactgtaagcacattactaactctatgttcacccactgcggcgaatttcagtttatacacagaatatattaacagcacaaaaaagtgagtagattagctaagtttgtgtgtactccatgtctaaccctacaatatctgagtaggaaacaatggcaatcgctatgtaggtaccagaaaagactaaaactaccttgagtaagcaaaccaccatctaaggtacccacccgtcttgggtgtgactagctattggcatatatatgcacatacaggtatggtttattactaaaataggtatatgactcacccctttaagaataggagcaggaaggtagcatataaattgaccatctggatgcctttcacaatgttgttcttcaccagaattcaagttgaaatgccgcaggaaagtgatctcattagttgtaggaacaaccccatcttttagatatcttcttccaagaagcgcattaataacagttgacttcccggagttaaactcaccctgatattaaaatataaaaccccaaaaagaagatattaggaacacttaaattttgagcaacattcccatacaagtttctagaaagccagctaaattttctcatcatgaaacttatatttctcttattattatatataaattaataggaaagaaaattcttattgtcagagattagaaattagaatgacaagaccaagaacaatgaagcttgaacccaaattgacaattggctctataattatccacaagatatgagagtaatcatgttatttcaccctcaaaatcaaaaagagaagaagctatattaaagatcaggagaacaatggc

SEQ ID NO: 186226 - DNA, 1675 bp, Cannabis indica
tcttttatatatcttttagtttttcctcttctatatatataaacagcatatatacattctttaattgaaatgtttcatattcagacaccaaaagcattaattcgatactaaaatacaacgcagcagagcaaactaaaaagtgatatactatgtttaaaaaatgcacatttacatatgagccaaaataattgcaagcccttctattaaaatcgaatgagtcattagtaaatttttcaagaaattgaatacaagaaagggatgagtctatttttggttgcgaacctatgtcttatcctaaaccatttaaaaataaaaagactgattataaatactctagaaaaggattattaattaattaattacccaaaagaaaaggaaacttgtagattaatgttcaaagtcataaggtctagctagcaaggaataggggatatgaacattatccattagcaaacaaaagcatctcctagttgtttggtgggcacatggtcttaattagttgcgatgagtactaacattttacacatatatattattaatttagttaggtgttgaggaagaaccatacagacacttgtaaatattatatatatatatgtgtttttttagataataataaaaaattaaagaatcaaggcaccatgattgaaggggaagaacaaaatgatgtgtgtacacagtaaagttagcaccaagaaaaaaggagaggcctacatataatataattaatattcaccttgagatgtaatattgcatattcaatggccgcgcccactccagagtattttgtctgcaagtaacaaccacttataactataagtcaaaggtacaatgataatatttaatttatttagtcatgaatataaagtttttatttttcttaaacatataattaattgctatatttagagttttagctaacctgacaatagggtggaaccatattggctatgtttcgaaccacaaaggcctctccaggttggaaattcagaatgtgtgaggggcaaactctagaatccgagcacgcaaataccaaaaactacaaaccaatttcagatttttaattaaaaaaaagaaaaagcaaagtagatattccactaagaaatgacataagattaatattgctcaccttggggctctgccctttggccagttcaccgtacaatttaggattcttcctgaaaaaaattgacacatttccaacaacaaaacaccttatgagttaaccagaaacttaatatataaaaataaattaagagttataataatccaaattggccaaccaattactacgtaaccattaattaagaaccaaacaaatactctaaacaatagctacttcagataaatactataaaataaataattgctggcgttttatgcttttctcctactatatgactactttagaatctttcttgtttagtacaaacaccatacattaaataaaatatatagtttttgctcaatttataccaatgattagaattcttgataagttcttctgattataatttacagtaatatatgtgccaatttatcaagtaaaggaaaattaatttccgtgtacgatctccacagattttaaccaatatttcaattttaaatattttacatttatcaattaatacatataataatcccattaaaaaataataaattaaacaacagtcaa

SEQ ID NO: 186227 - DNA, 1705 bp, Cannabis indica
aagaagatgagctatcacaattcacaagtgatagtaatatagtctttgttttgtttgtatatattccaataaggcagcactgtaaaattattgctccaccaacatatatagtggaccctaaaaaccctaaccccacctaacctttatctatcaaatttctcatgaaaaatcatatcaattatcaagtgccaaacccaaagccaaagtagtgggacgcatattttgtacttgagcacaaatattgaattttcaccaaccaaatttccattaaatattgtccctaactcatatataagtgtgtccataattaatcataagatataaatatatagtttctagctagctcaagtttattatttttttttttgtccaattataattccttgaaactatacacatgtaataaaaaaaatggacacagagacagtatatatatgtttcattatgaacactttaaaatatgtatatatttcttttttaaaattatgtatagtttattaattatatttatgtatggtttttaaattttgatgcccatatatgatgcatgcattttgtattaattatttgttagagaatattcaaagcatacataagagggtgctagtcacttttaattaagaagaattgttattacaataaataaattaattaattaagggagattgtaaattaatgaatttaagattttgaattttcaatttattaataaatgtaatgatcatggtatcattaatttatgaaaaatgttaacatattcttaagtattatattattattgatattagtataatttaatatagaattctatatatatttttgcaaagtaaaatttatttaaaaagacactaagtcaaaagctactacaaaaggtggtaactctccttagttgaaactaagcgagagctcatttggcgatagagttcgcaagaccattaaatgatcttggaatgaaaataaactcacaatacataaattgtttagagaacaccctaatgcgattgggcactgagatcaaaggccaatctggacaattagagacatcctccaaagatttgatgagtcgttgacaatctaagaagaaagtaatctttctcaaaagaattacaacagaaaagatataatcagtgccttcacttacaaaagatctcatataatttaatgtaataacttttatagaatatcactaactaatcgcatagtgcgtgcgacctatataagtggttagacaacattagtacataataatgttcttaatttattactaattattgtctccaattccaacaagagaggcttgtgcaattttaaaactatatatggaccacttcaattatatatgtctaaaagaaacaatattctatcttcttttcttttacttttgttgccttcttctttttctcatgggttggctcaaaaaccataaatattatgttactagattagattatatatacatatagaaagattcatcattattaatttgatgtataaagtaaaagaatttcaaccacaaaaaactaataattatgattcttttgcagctctgtgattaagaagaataaaaaaaacatgtgtatatatcatatagagaagagttaaatatgatatcaattaaaaagaaatgacatgtctttctttataatatttgagtcttattaatttacaagtgcacatataatcattactcgttatatatatatat

SEQ ID NO: 186228 - DNA, 2869 bp, Cannabis indica
ttttgatgtttaattcacgtttggtgcttgaaattttttctcaatttgttgtgatgtacatacactaattttgtaaacaattttgttttttcaattaaaaaataatcaaaataaataaataaaaaaaaatgagggactgaatacaaattcaataggttaattttatattttgcattataaccatatgtttttatatagtttaatttgattcgtttctttctgtgaaaattaagaataaaaattgggcgggtaatgaataagaaatgtattttattggatgatccattggatacccatgaagcttcaaatattataataataaaaagaataacatgtaatgtaatgtaattcaaataaaactaaaaaataatttgaagttgaaataaacattctatttaaacatgcatattgtttatacttcatactttataaattgtaaaagacaaataagtcataaacaaaactaaccacatatattgatgttaaatgtagtaataaattaaataaaatatcaaattatgaaaataataaaaaagattaaggatgaacttttgtagtaactttaatttgattataccaataaatatttaaaaaattatatagaaattatatattgaagtttcatataggatattgggtacgtatcactttgccctaacctgcttgtcccctacttccgcccataacccaccaagcgggtaatttccacccccaataccatacatacccgtcctcaattttcatttatagtaaaaatgttaaaaatagactattgatcaaatcggtcaaaatatatttaatataatttcttacaaaccggtttaaataaatataatattaaaaattaaaagtttcaagtagaaaatataaattgtgtaacgaaaacaaaatctacaattttttttttttctaaaacacgaccaaaggatgtagaaatgagtataaaccctataacatatgataatctatacccaacgaattctaataattaatgttgcagttattattaggtcttttgatatataaatgtttattacaatactaattatatctaaccacaagttgtcaataaatttatgtgggaaatttttttaatgcaatattaataaattggcgaaatgtatcacacacctttatttgggtccttttgttctgaaaccagaacttaacttgttttgggtctagaccaagctccagccctagttgacgccgttggttttcatctgggtgtgggcattccgtgaaaaatcttcaccattcaaattaacaaaaagcgttatattcaaaaataaatttatattatacacacatatatattacattgatccatatatataaatattatttatcgtgaataataactatttccttaaatgaaatcaatttaccaaacagtcatgatttaacatttcagtaaagaaacaaaaggaacaaaatatcttcatctctatgtgcgtggggactggggaattaattatacttcaaaaatatgttacaataccttttaaatgtatacaaagaaaaactaaaaaaatttgatgtttacctttctagttgggttatttgatagttagtatggcgatgataagtcttcttttggccactgcgagaattagagtcttccccatgttcgttaccggtgcctacaatatgtcccaattccttcccaaactccatgctaactcttttttgcttaaacaactatgatgtgaaatggagtatatatgtcccttggacaaatgcatggtatttataaggctctagctaaaacaaaataataataataataattataataaatataaaatcagtgattttttcttcttttgaggaccctttagatatatgttgtcatattctcatgaatatattgctaacacctgtcatttccatagaaggtcatccagtattcacattagacaacccaataaagaaatatatctgattcatgtgggcattggtctggattttgtttggtttttttcgaaatcttttaccttcttagaccaaatcaatacattcaactaaccatatataacatcacatgaagatatatccagagggcaaaatatttttcaagaatagtagggactcttggagatataatttgaaaagatacaatgttggagaaaaaaaaaattaatttagataacatagaatgaaattgttttccattaatgtcctaattagtaataacatatctcattattccaaattaagattatttttagtaggaagtggttgaaaaaaaattaccttatattatctatatcatttgacgtggcaataacataggggcagtaagtaattttggcaaacatacatttattattattactattattattatgtgcttgcacatattacaatagtattataattttatgagcaaagaaaattcacagagaatgcaaagcacatacataactaaatgtgtaaatgtttttttgttttatgcttcattaatttagtaatattctaataatatattacttggtaagcaattataattttgctaggaatagttttatgttatatctacaaaaagaatttgtaaaccatataaattttatatgcattcactcaaaaaatttattttgaattgctgtccatgataaaagacaatctttattgatattgttattaaataaacttctatatattaaaaaaggataatgttgattcggatgaaaataacaaaaaaaattttaggagtgcaaagtatattaaatattacttttataaaattgataatctcatatagtttgtaaccacagtataaaaataaatatgtgtctcgtcaatataaattttagatattacaatcattcaaacaaaatcttgaattgaattcaagggcagaatcaga

SEQ ID NO: 186229 - DNA, 1943 bp, Cannabis indica
gtagggtttgaaaaatgagagtggtatttttggatttaatgtaacggtgacctatttttaaaattttaaaatgtataagtatgcataaataatcaaattttccttagcaatttatgaaaagaaacacatttttatttttttgtaaagtttaataagttaaaagttattttcttaaaaaaaggtttaaatcagctttttataatttaatttttatcttaaaacaaatttttaattatttaaaaatcaattacattgaccaaccaagttagttaattctaatggatatgaattattagttttctgtcaagtaaaatatgtataaaactccaactaaaaaacaggtagttgatgtaaaaccagctcaaataaaaaaataataatcaaaagtgttgaaacttgtgttgggtcccaaatataaacccaactttatgaactgagctatttgaacaagaaaacacaaagcaatgcaagaaagcttattatgtctccactaggaaataggaatgtttgtttctaaagtatattttccaaataaatggtagtgacagaagcaatacacaataattttgaaaacaagtgaccaataacaaataaaacaactgctaatttacaagatatgaaacaatataaacctcttcaagggagacaatcaaaagtgtctccctcacttaaatagggcataaaaatttataatctggggggagtcaaaagaatatgatgttacacatctcacccattccaaccttctcaccaagtcatgacacaagagtagaaagaaactagcatttcatcatctcagccactctctaaagcaaaaactaccagaaatagttccatcacctgacttaatcagctctgaatatctgtggaatcggaaccttcatccaaactaggtgcaaattacccgaaaaccctgcgtgaattgtagttcgattttctttctaggtaaggtaccagagtaattttcggcctgcgggaggggctaatccaggtatatcccggatggtcttgttgttcggatttacaagctgaaaaaacgtaggtgaagaataattattcagcattggctcgctgatttgtcaagttcaaggcaaattctaaaaaaatgaaggttacaaagcaacccactttggtcctctctcggtgcaaaagtgaacattaaagcaaatactttcctatagtgcaacaaaaatgtctctaaaagaagttacattgcaaaagctctctcctcattattggaataagaaacaaagactcattgattaaaagaagaaaagaaatgaacactaccaaactgcaattaaaagctacaagaaagacaaagcacataaattttgaaaaaacaattccttccagctaagaatatgccacttacaaagcatataactttgagggaagcacacatttttcagtgttatataaactgatatgaacaaacagagaaatgtgcaattagctttatgcaatcaaggcgggaaaagtaatatgtttgtggaccgtaaggacgttgctcattaaaataattcttgaaagattagaccttcaaccaatttaaaaaaactaaaaccatcagttatataactactgctgcattctctgtacttacaatacaactattctacatgccatcttattctacttaaagtcatcttatttaagctaaatccctgaagaataaaaaagtgtcttatggcctaaaagactaaagaaatcaatttatcatttcgtgactagaaaatttatgatttctgcataatttagtacaaggacaatctcaactcttagtaacatttgaggatgtattgtgatgagatgtaaaacaccaaatagacaatacatacctacattcaagtcttggaaatgaattttcagtaattatcttgcatagtacagatgagtaaaatactcttctactaagaaaaggaaacaacatgaagcacaaa

SEQ ID NO: 186230 - DNA, 3334 bp, Cannabis indica
aaaaaaaaaaatagctattgctagctaggtagagagagaaagtcaaaggggaaccttattatttcttcttcattttagtattttaatgttttaaagtgtaatactaggccatgaatgagcatgcatcaatttgcatgtgcttatttacttggtaaagtttgtcattcttgagcccttcaatttgataggttagaaaagtcgtaataataactctttctctttctctctctttctcttcttcctatctcttcctttttccgtgttttgacttttgggaatttgaatatcattactctctctatatataaaaagactcttcatatctctataatctatccaaattcacatctctacttctcttttcataacgccccaaaaagaaaaataatatacttctctacaacaaaaataagcaaacagtttggtactaaagctaaatattcttactatacttattatggatgagattgaagttcctcaattcttcatctgcccaatctcactggaaatcatgaaagatccggtgaccctttcaacagggatcacctacgacagagaaagcatcgagaaatggttattttccgggaaaaacgagtgttgcccagtatccaaacagcccattattcccgattctgatttgaccccaaaccacactctccgacgacttatacaagcttggtgtaccatgaacgcttcacacggaatcgaaagaattccgactccaaagccaccgattaacaagacccagataatcaaactcatcaacgatgccaaatctcctcaatctcagatcaaatgtctccggagacttcggtcaatcgccgccgaaagcgaaaccaacaaacgttgcttggaatccgccggcgccgttgacttcttagcctctttgataggcaacaattacaacgaattagaaaacgacatgtcgtttagtgaccacttcgctagagccagcgacgaagccttgtgcattttaaacaacctccaactctccgaaacagttctcaagaatctcatggctcgaaaccaagagttagtcgaatcattaacgaaagtcatgcaacgtgggacttgcgagtctagagttcatgcagttgtgttgttgaaatcactactagaagttgctgaccccatgagaataatcgggttgagacccgagttattcgtcgaattagtccaagttttaaaggaccaagatcaagtttcgagggcagcttttaaagccgccctccagctcttgatccagctctgcccttggggaagaaaccgaatcaaggctgttgaagcgggagctgtaccagtcttgattgagcttctcttggagactaactcctcagagaaaaggcggtgtgtcgaggtggccatggcagtgcttgacacgctatgcggctgcgctgagggccgcgctgagttcctacaccacagcgcgggattagccatggtgtcgaagaagatacttagggtttctcaaacggcgagtgagaaggctgtgaggattcttcactcgatttcaaagttttcggctactagtggagttttgcaggaaatgctgcagcttggagtggtggcaaagctttgtttggtgcttcaagttgattgtggaagcaagacaaaagagcgggctagagagattttgaaattgcatgctaggacatggaagaagtccccttgtgtgcctaccagtttgctttcttcatacccagcttaaatattaattagagaacttaagtgaaagaacaaaattattctcttcacataatttctcttcttttttctttttacctttttgataattagtgtgtatataattgattgggatattggatatgtatactctctggaaaaatcagaaattgtttctttaactccccttcatttatttgggaagttcataatgataaaatggtcacattgatcgtatataatcgttttctatataatactatatagttattttcttatttatttgattacgtcgttataagattattacatgagtagccactaaataattacaggtattttcaagtactagctagctaaatcttaatttgctccttttccaaaaaaaaataatgataatttgttctttttgatattattaatttccaccggaaaatcatatggatataatgtttgaaacattaattggctataataaatatatgagagtgaaaatatatctctctatatataaaataacgaatctcaaaaattagtactaatagttatattactgcaattaattgttttattaccttcgggagtagtattgtttttggttatatttcttttttctaatcgaagttcttgttttcattgtatattatatatatttatgacatttctaggtggtccagaagtattatatccatgcaaaatgaatcaatgaggacatggtcccaaaatgttaatatataaacaactttttagagttcctcaaatgccggtccggccttggctcctcgaatctagatatgaaggagatgaaaaatccatgcacgtgaacctatattcaatatattatcatgatgattttgtttgttggttattgagaaaattaattgtacatagttatatacatggagcattgttataaggcaccagtggtgctcagcacattctcaacatgtcgtgttgcgattggctaacgataaaaattattatattaaattatatgggacccgatacttagttagaccaatagcgatattggcacataggaggatgttaggcactattggtgtcctttagcatttctcttatacatgatatataatttaacattgtgttttaatattaaatatatatacctagtagtagctcgtgtaaaatagttatttaaggttattttagtcgtttatgttagttgcttatataagatttttttattagttgtattcttttagttttgattttgtaattgaattaaattctaatttctctatatttttttttattctttattgtttattattctcttcacaaatagttatcatggtatcagagcaaaatttatgaggtggatttcttaagtgtaatcatagctttcacggttctagttttcggggtaagccccaaaagtttttgtagacgttcgtacaatcagtgttcgtacaacattcatacagtttgatattattattcctgacactccttataatttgacaaaatcagatcttattcatattgatccattctctgagtcagactctgaatcatccactacttctgcagttccttttcctcttcattactcttgcatgcatcgtgttgataggtctcaagaattagatactagtactttgtaacctgaaactcgttcctccattag

SEQ ID NO: 186231 - DNA, 5365 bp, Cannabis indica
ttatgaaggtcagttggaatttgggcaggtttatttacatgttgttcttgtaattttaagttcataccttgttgaattgtgcacaagctgtataggctgttaactttgacatagtattatgaaggtcagttggaatttgaacacacttggagattttgtcataatgaggagcaatggacaacccgtgtacaatttttgtgtcacagtagatgatgctaccatggccatatcacacgttatcaggtactttaatatatttaggaatattctatgttattgtggccacctctggtttcttcactcacttgttactattgtatatatttccctccagttcataatgtttcctctgttgtatgccctcttatttttgacatactatttcagagcagaagagcacttaccaaatactttaaggcaggccttgatatataaggtaattttcaaacaaagtaattttaattttcttcccttttgaagtctttgagtgattctgacttcagtttataatcattattacagtctctaggatttccaatgccaaacttcgctcatgtttcccttatccttgcccctgatcggagtaaactgtcaaaacgacatggtgcaacttcagttggccaggtatagttcccttgtatgttacttttgtgcttagattaagtatcatttagtctctcttttctggaacttattttttctttattttttcaaatagaaaacttctttatattgagtttttggtaatgattatgaatagctgattccgtctaacagttcagggagatggggtatcttccccaaggaatggttaactaccttgcactattaggttggggtgatggaactaaatataaaaggtaatttttcacccttgagcaacttggttagtgatctcttggaacatatcttttctgtttttggttgtctgtttttgtctcacattctcagaaactgtggtatgaatctgcggagataaatgctttaatatattatttatcatctctgaatttttaattgatatttgcagttgaaagtttctcaattgatcgagttaacaagagtggtgcaatttttgattccaccaaattaaggtgagtaactgttattattttatttgtttgtttattttcagagaaacaatggtctctattttatggtttatttgcttgtgcattaacatattttggacaaacaaagtgcttatctttacaatttttaatgtcaaatcggtgactgatgtggtgcagtttttaatccatgaagcattgttttattaaataattttcttataatttcttcttctgcaactaaggtggatgaatggtcaacatttaagagctcttccctctgatgagttgacaaagcttgttggtggccggtggaaaagcaccggtatgctgacagaatcagaaggggcatttatagaagtaagaattctgccctcctgtttttttttttttatgcgactaccctcctattttttcccccttggattgtgtctctagaatcattatactgcgggagtagtttaactgttcttactttaaatcgcaatccagtggactatttttgtggactgaattttatatggaatgctctgaagtggatcattttatgtagatagtcctcttatacataactattgtgctagacaggttgttcactatgccatgagttgagaggctttaaaaattggataactttcttcttcaaactaattaatggcttcatattgcatttaacggcttcatatttcatttaaatcataagattttttgtcctgtgaagcgaagtgtgtgagtttttacagtgtggtttgtacaataggaagcagttgaattgctaaaggacgggattgacgtgataccagattcagacaaacaactgtcaaacttgctatcttatcctttacatgacactttaaccaggtgaattcaatttctcatccttgaatttctgttttttctacaatttgagtttgcactgcaaatcaaatactgggaaactcttcaataaatctgcttatgtacaatatgagatactttccttgactctaaggttaacagttattttcacacattaagaaaaaaaacattttagttggggatttttgctgcaatgaagcaacagtaatgctgtaagtgctgtaaatttggtgggttttgtctgcagtgctgaagccaaacctgtcttggacgacaatctgtctgatttttcagccagccttattgccgcttatgacagtggtgaactccttactgctcttgaaggtggtcatgctggctggaaaaattgggtaaagagcttcggcaaaacactgaagcgcaaggtcaattttctctttctcactctttcagacacatgtttacatccctttccatattttcattctttagtttaatgcttcttaaaaatgtgattaaactttcatgacaaactaacaaatataacgatgctcgtgcaggggaagtctctgttcatgccacttcgagttttgctgacaggaaaactccacggcccagatatgggtgcaagcgtagttttacttcatcaagcgggaatctgtggagttgttgctcctcaagccgagtttgtacctttgaatgaaaggttcaatatgctgaggaaacttgactgggaagcattaaccaaaaatctgccactcgtggaggctaccgccacaacatccaactgagaatttacagttttgatcggctctgcagctaggaattttttctccctctcagcttaatagtctttctttgtgctataataatttggtgttgggtttggtagtttccttctaagctcacttattattacaatgctaaggtacacttaaggttcaagggtcattgtccaccattctatacttatctattattgacatttgaactaatgtatgcattttttttggattgtatttgtaccccttccctaacttgtgatgcacccatgatgtgtaaatgaaaagtcgtttgttttaataatgtctcttgtaagttgaattgagcccatgtatgtgggattcgacaccaaaatgaactaatgttttatttagttaacgattctttataatttttattaaagtaaaatatatgacacctgatattaaattgtatcaataataatattacatattataagagtactagacatcatagtgtcttttagtgtatttctttcttaatatacactattctattttgaatagtattcttaattttaaatcataacattcattttctttgaatctgtattcaccatttaaatatgagcaaattgacaagcatggaatcaatcaaaggaaaagaaaataaagaaaagagaaaaattctagagttctttcttaaaagcttggcataaagtcaaatggaaaattggcaaaaaaataaaataaaataaaaagatggcactagtgggattatttgtagaaaaaaatttgtaattaatttataaattttgcaaattaggtatttatttatttttttcacttggtgataaatttttatgtattttacaaattagggacaaattgtgttaaaatattttttttggagctagtgttatagagtttaagattagataatgtttctttctcctcataaaaatgaaaaattgataactaaatttgtaagttgtagctaaatttgtaacaactaacaatcacattatcttcttatatttttgaatggagatcacattacttctatgattaaaaattaattacccgttatgcaacaaatatgtgtaatttgagtgtgtcaattatttatcatcacatttttttttataaaattaaacatactatatataagtaagaggattgctaccgtcaaccttttattacaatttcttaatcaattttagtgcctaaaaacacatgtcaaaatattttttcatagcagtgttcattatagttacaaaatcatttctgtaaatttttaaaattttttaaataatttaccgtgttaatgatattataagtataacaaattaaaaaaaaaaaagactttgcatgtatttttggacacagagtatgacagtgagaatcacgtgataaaaagattggatgctatgcaatcttatattatataagaaggttaagtgtaataattgtaagactttacaagtataataatacattaaaaatattaattaatattacctatattaacaagatacctgtttttcttttgtcgatagtctattatgaatgaaccctaaaattaaacatatttgaggtgatattacaaaatgaaagttacacgaatattgactaacatatttaattaagaaagttttataaatatagttagtaaggagatatcacgtgagtgacacgcacgaagaaagagacaatgttagttttgaaattgtagttgagaaaaagtaataaggttgggtaatgcacgcgcgcgctagactatgttggttccttcctcccgctaagctaagctcctttgagtcattccgattacgcaattgtcggcgcacacacacacactcgtctcaggcgaccacagagaccccatttcttattcatataccaattcaaccattcataaaacgatgccgttttaatcagatcagatcagatcagatccacctggaaatggaaataatgcaccaccaccaccaccagaattcgctctgatccaaaatccaagaaaacgacaatgtcagcttcgcaaaccctaggcggttcatcccggtgcggtcgagtaattggtccttctctcgacaagatcatcaagaacgctgcgtggcgtaagcattctcaccttgtctccacttgtaaatcggtcttagacaagcttgactcgcttaccgataattccgatcttggtaacgtttcgcctctttttggtttatctctttccgatgctgaatttgttctccaacctctttttcttgcccttgatgctgcctatgctaaggttgctgagccagctcttgaatgtgcttttaagttattctctcttggtcttattcgtggggagattgatagtggtaatcctaatgatgtcatttttaagatggttgaggctgtttgcaagtctggtggtcttggggaagaggcgatcgagcttgctgtgcttagggttctgctttctgcggttcgatctccttgcgttttgattcgtggtgactgtttggttaatatggttaggacttgttataatgtgtatcttggaggacttaatggtactaatcagatctgtgctaagtcggttctggctcagattatggtaattgtctttgccagagttgaggaggactcaatggacgttgcggttaagaggatttctgtgaacgaattgcttgaatttactgataagaatttgaatgaaggaagttc

SEQ ID NO: 186232 - DNA, 8322 bp, Cannabis indica
aagaatttgaatgaaggaagttcaattcagtactgccagaactttattaatgaggttatggatgcagcaagtgaaggggttccttctgttagccattcggtggagaattcctcgcacaaattgcaaaatggcaatggttctgtgtctgaagcagatggaaaagagggcgaatctggagagatcgaatcaaatgaaggaactgaatcatgtggcagtaagattagggatgatggttttctcctattcaagaatttgtgcaagttgtcaatgaaattctcatcgcctgaacacccagatgatcaaattctcttgagggggaagatattgtctttggagctgctaaaggtagtcatggacaatgggggaccgatttggcgcaccaacgagaggcaagtgattattgcttatgctttctttcaaatttgacaagtgtgtgagaacaatagtgaatagagtatataacatttggttttcatgttgaactattctgtatattaacctttcacacacaattgaagccttaaactagttgtgatgttaacattagttttacgaagttctgggaattgactttaggatggggaagatatgaattttatagaaaccatgttattttgcagctttataaccaatttattttttgttttatggaaagatttatacccaattaccgtacttaaataatgtcaggatattatagatttgtaagcatgctttctctttctccttgttctaacaaactattttggaattctaatagtttttttattggtgttacaggtttcttaatgccatcaagcagttactttgcttatcattgctgaaaaacagtgcattatccgttatggctattttccaacttcagtgctctattttcatcaacttcttgtcaaaattcagatcgggattgaaagcagagattggtattttctttcccatgcttgtcctccgggtgcttgagaacgttcttcagcctagtttcctgcagaaaatgactgtcttaaacctactggagaaaatatctcaggattcacagattatgatagatatctttgtcaactatgactgtgatatggattctccgaacatctttgaaaggtattacactttgctatatatttttacttttatcccgctatctgatgtcacaataactgctcccttaaaactgaaaaatattaggttggttaccttgtagaggactggtttgtggtgtctctgcaagtgaagttagtaggttagattttaagtgtgttcttagctaagctcataggaattagaaacaatattagtggcagaaagctttcactctataacttatgttggaaaaaaggttagattagactttattggtggactatatacatctgaagccgctattgatttcatttcaggctcgtgttttcttttccaggtacaaattttgacactactattgattttgatacgctttagtatccaaagattggtaggatagaatctttataccaacactgagttacaaagcttctaaactcacacaattcacaaataccagatgccacttgcaaaataaggtggctgagtatttataggcttagccatccaactagatattaaggcagataacttagttagtcacaattaatacaacttgggcaattagaataacatttgtgacagctaggcttagtatgtctaatctagaatagctaaatctaactggtggcccaacagatatttatatttgctatgaaggttggatgtcgcagaaatggttcctcacacatctgatattatgtcgaagctagaacccacccatcacatgcatccaatctctgttctctatatcacaggcacatgtatcattgtaaatgcatacaaaagcactattaacccaaatgctggaatttgaatgaactttaagcctcctacattgtcattcttgttcagcattgtgctttagtaaaatgtattaaaacccttataattccatcagatacttgcaggattgtcaatggccttctgaaaactgctttaggaccaccttctggatcaactacaacattgtcacctgcacaggatatcaccttccgacatgaatccgttaagtgcttggtaggtatagttaaatcaatgggagcttggatggaccaacaactgagactgggagactcatatctccccaaaagccatgagagtgatgcttcagtcgagaatcatttgactcaaaatggagaagaaggatctgtttctgattttgaattacatgcagaagtaaattctgaacattcagatgctaccaccctcgaacagcgtcgtgcttataaaattgaaatgcaggttagagtgaacttttttttttcttgtcaaaggcattcagttataaattttataaccaccaagttgttataaatggctgttgctaagctttcatgacaatttttctgtgctctggttggttatatttgagcacatttttggtgttactttggtttgttatgtacttaaatctgcttgttctgtgtagtgacaactttactgggttcaatgcagaaaggtatctcattattcaataggaagccttcaaaggggattgagttcttgataaatgtaaaaaaaattggtagttcagcagaggatgtggctttgttcctgaagaacactaatggcttgaatgaaacaatgatcggcgactatttgggtgagagagaggaatttcctctgaaagttatgcatgcctacgtggattcttttaattttaaagggatagatttcggtgaagcaataaggtttttcctgcgagggttcagattgcctggagaggcacaaaagattgatcgcatcatggagaagtttgctgaacggtattgtaaatgcaatccaaattcattcaccagtgcagatacagcttatgttcttgcttactctgtgattttgctcaatacagatgcccataatatcatggtgaaaaataaggtttgttcacctgttcattatatttatataattgaaatttccatcttaaattggttgagtactcttgttctcttggggaaaaaattatctatcttaatttgtatgaacatttgcagtttcaaccttctttgaaaagttttattgtaatatattaagtcaaaaaattaatatcctgtatcagtcttatatattgagtcaaaattggattttaaatgtctccttacttaaactatgcactggagggtttttcagatgacaaaggctgactttctccgaaacaaccgagggattgatgatggaaaggatttacctgaagagtatctcggctccatttatgatcacattgttaaaaatgaaattaggatgaatgccaattcttctgaaccaccaagcaagcaggcaaacagttttaataaattgttaggctttgatggtatccttaatttagtaacttggaagcagactgaagaaaaggctttgggtgcaaatgggcttcttataaaacatattcaggagcaattcaaagcaaagtcaggaaaatcagagtaagctaaactccaaagcaccacaaaatttcaaattaatttctctacttgtgaaagcaccactgtcaagtagtgactgggtgttgttctgcataacttattctgagcattgtgcaagaaaattgatattgtatcttttgtatgggcactagacttggtcacatcatatgagcactcaaataaatgatagaaagattttacccacttggccctaggattaatgctacagaattgatttttatttttcattgttgcagctctgtatatcatgctgttacggatgtcactatattaaggtttatggtggaggtttgctggggtcctatgctggctgcgtttagtgtgactctcgaccaaagtgatgatagagttgctacttctcaatgcttgctgggatttcgacatgctattcatgttactgcagttatgtgcatgcagacacagcgtgatgcttttgttacatcgatggccaagtttacaaatctccattgtgcggcagatatgaagcaaaaaaatgttgatgctgtcaaggttagtgcatgtttaagtatcaaaataaagtagaatattgctacccgcagaaagtcatggaaaatgccaaatgccaatgctcttcaagaagagcagataaagtattaaattgttacaggggcaatttacaacaaatactcccattctctccaacagatcagaaaaagaaaaagttttaaattcttctgcaattttgaggcaaactacaatttagaatttgatccattcctataaagagtcaaaagaagttgtctgtctgacataaatcctgtcatttctttctgaaaaaaactgcccacattatatctactctactacacttcattattccaaaatagtttactctttattatcgtgtgttttcaatcaattccatgtaaaatgccctacatcactttgacatttttttatctacaggcaataatcttaattgccattgaagatggtaattatctgcaggaagcatgggatcacattttaacatgcctctctagaattgaacatctgcaactgttgggagagggtgcaccaactgatgcatcctttttgactggatctaatatggaaacggaagataaattatcaaagtcattgggatttccttctctaaagaaaaaaggaaccattcaaaatccagctgtggtggctgttgttcgtggtggatcatacgatagcaccagtgttggaggcagcactcctggattagtaacaccggttcagataaataattttattgctaacttgaatttgttggatcaaattggcaacttcgagttgaatcacgtatttgctaatagtcagaggttgaatagtgaagcaatagtggcttttgtgaaggctctgtgtaaagtagccatttcagaattgcagtctcccacagaccctcgtgtatttagcctcacaaaactagttgaaatagcgtaagattttgtacctctatttgtctctattgcataatttctttcggaggatctttttgtatgggtgtattgattaaatcaaaatgtatgtgagatgtctataaccattcaattgtttctttcgcaggcattacaatatgaaccgcatcagattagtatggactcgcatatggaacgttctctctgacttttttgtttccgttggcttatcagaaaatctctcagttgcaatatttgtaatggattcgttgcgtcagcttgctatgaaattcttggagcgtgaggagctggcaaattacaatttccaaaatgaatttctgagaccatttgtgatagttatgccaaaaaagtagctctggggagattagggagttaataattcgctgcatatcacaaatgatccttagtcgtgtcagtaatgtgaagtctggctggaaaagtgttttcatggtatgcatgtctttcacttgtgaatttttgtttatatgaggaatatctttgaacaaactaaaattcattttcatgaagtgacttgccacatcaaagggtaaaatttcagatgcttgcatattctgttcttaccatcttgcaatgtaattcacttattattgtggcttgtatttattgtggtatggtcaaatttcaaatttatgctattttttcactcattattgctttggaaagtacgttacttttctctcctttttgcatattatgagatctgttggattttgttctagttcttagcaatttctgtaccaaaaatgctggggtgctgttgatttgcaaaatataagctacaaataggaaatttttatgattaaaatggtgagtgcctcatttcctgctgctgctctttcaacagatattcacagctgctgctgctgatgagcggaagaatattgtcttattggcctttgagacaatggaaaagatagtgcgagaatacttcccatatataactgagacagaaatattgaccttcactgactgtgtcaaatgtctcataaccttcacaactagtagattcaccagtgatgttagcctcaacgctattgcatttctccggtattgtgcagtcaagcttgcagaaggagcgcttgtttccaatgacaagaatgtggttgatggtacgacaccagagctgagcaagaatgtttcagatgcagacactttcagtgacaaagatgataacatgtcctttggttcctttgctgacaggtaatatattttttcttacttcttccttttatttatagcaaatgcctctactagagtatgctacaacgggataagcacaacatgcacatcgttttgctgtttcagggttgtcaaaacttacatctgatcctaggtcagccatcaggaagagttctttggaagttctttttaacatcctaaaggatcatggtcatcttttctcgcctcaattttggactggtattttcaattccgttgttttccccatatttgatgctgtatctgacaagaaagatatagtgaaagaagatgaccaatcagcttcgagatcgtcccacttggaaggaagtatgtgggattctgaaacatcttccattgcagcagaatgtctaattgacctatttgtcagtttctttgatatagtgaggtctcaacttcctggtgtggtgtcaatattcactggtttcttaagaagtcctgttcagggtccagctagcaccgggtatgcagcattggtacgtctgtcagacgatttaggcagtaggctttcagaaaatgaatggagggaaattttcctagctctgaaggaggttaccacatcaacagtgcctggacttacgaaggtcttaagaagcatggatcgcatcgatgtgcctggcatttctcaatccaataacaatgacatggaaatgtctgatcaggacttaacgaatgatgatcttgaggaagataatctccaaacggcatcatatgtagtttcgagaataaaaagtcatatttcaatgcagcttctcattgtacaggttggcttcctccccaacatactatatttttcttaagtatttgcacaattgtatattgtgttttcctcaggtctctgttttttttttttgctaagtcctaattttggattcagtcacagaaatatcaaattatcaaaatcataagccttgtcttgtttttcaggtcgttactgatctgcaaaggacgcacctgaaatcctcatcagtggctaacacatcaattgttctcgaaattctttccactaccaccacacatgcccaccaattgaatttggagataatgctacaaaagaagctgcaaagagtttgctccatcctggagctcacccctccaccaatagttcatttcgagaatgagtcgtatcaaaactacctcaacttcctccaaaacttactgaacaattcatctctgtgcgaagagattgacattgaagccgaacttgtttcagtatgcgaacaaatattacacatctacgtcagttgtaccggctctctttcttctcctcaacagcagcaaccacagaaaccagctaatcagcgggttcttcactggattctcccattgggttcggcgaaaaagaagaactggctgccaggagttcgttagttgtgttagccttacgggcattgagtgggttggaaagagaatcgtttaagagacacgtatcgcaattctttccattgttggtagatctggtaaggagtgaacacagttctggagaagttcaacgtgtactaggacacatgttccattcatgtataggcccaattatagttgaatgattcatttttcatattttgtgaagatatatattactcactcaagtgcccatcatcatcatcatcatcaaatctccattttcaggttttgttcaccattggatttggttggtccatgaaagccttgaaggtagagccatattatatttttgttgatttagagtatcaatttctttgatttctcttctcattttgagaaaatgtatgagctaatatttaataatagaagatcagagaagagaagtgttccacatacatgagggtacctcgattgctgaggcttctcttctcctaaagttttcacacaatttgtagttttgactttttttgaacataaattatatgattaattgaatgtattttgaatttagtgcatgttaacaactcttgcatatgcacaaaaggatctgcacttatcattttgtctttctaaattatatatttttaaaagattaatttttaattatgaataaaaagtgtttttttttttatttttataatttgtaaataatgtaagacttctaccacatacaatagatatatatacaataacgaaaaaaactaaataaacttcaactactaaac

SEQ ID NO: 186233 - DNA, 4693 bp, Cannabis indica
atattgagaatcatatatttttaataataaaacaaaaataatgaataataatatacaaagaaaaataataaaaaaaaaaaaaaatataacaaaatacaaaaagaaaacacttagtaaaaaatgtatgaaatagataatagtcaataatagtatgaaattatgtatttatattaagtacatttgtatttaaatttagcaagaattataggaatttaaaaaaaatatataatagtcaataattattaccatatatatatcaataaaaaaaattaaaaaaaaattgtaattgtatttaaaaatgtgggagaaaataatagtaaattttttgaaatatagttaattaaaataatgtatagagtgattcaaaaaaaataatgtatagagaagattgtaaaatgtccattatttaatgattattaaaaatgatggtgaagagagagaagaatagtagaatagaagtagtagaagagggagaggagagggggtgagagaatatatatggaataagacgaaaatagaggattttttttattttattttttggtaaaataaataaaggaagttgaatgtatagatgggtgtttatgggttcgaaataagcaaaatgatagtatgtttattatttactactattgcatgagagaatctcaaaatagaaaaacccgtgatcagctatggcccgcgtggctttcttttcttttctcattcgtcaatatgatcaatggtctcttctctctgcatgcagaaaattaaacagacaactgtaataagcaaaatcaaattcaaaagaaagcaaccaactactgttactaaacagaatatatttatgtgtattatatcattagcttcatgtgctctcttcagttccctcaagtaataaggttcaaaattaaattttattcccatggggcacctgtacttttccatttttttttctttttctgaaataatgtaaaattacgattgagtattgacatgtaaatgagtattgctaatattaatattttatttgacatatctaatcacatctacgtgttaatttataattaatagtgttttttatattatttattaattagtgtgagatttatattgaaataagtctcttatttttactacttggcgtacttaattaaggtgtatttaacattttttatatatagggtcataaacttagtttaatggttccacatctcctcttataatcttataaagaggaggtcctaaattaaaatttctctccataatgtaaaaaaaaatattttctcatattatttataaaatcaaattgtgaaatttataataattagtttttttttttttttttttttcactacttgacaaggtgttccttaacattttctagcttgtaaaatggatcgaactccctaaaaaaatgatattgtattacgtaccgaatcctatatcttatcaataatatataagcttcaaattaatgaccaataagttgtataattatacgcagagaacaattaatggagacaattatctgtaaaatttaagttattgtataaaaaattgaacgatacttacaattaatgatccataatccattccatatcatcctatatatatacgagtgaaagtacatatatacattttagttttatacccagttcgatcgagaaaatttaaactcagcgatgcaatattttgcggtgcgatactatgtttaatattatacactatagttggaaaaatttgtatcatttagtcctttcgacctataaaataaatattttttcccaaaataattttcacttagtaaaatgtacgtgtcttctttttttgtttttaaatagtatatattgattttgggggtaatatatatgcactccgaatctctttgccataatgtaaaggtggtagttgagaaaaaaattaaaatgaagaatatatataaatcttcatcatcttatccaaaaagcaaggaatagagataacaaatgaatcttactcaaaaagctctcctgcgcgcagtatgtatattcaaaagattactaaattatagctagctatattagctagagatgaaaaaagagagagaaccccacacattggattcccaaaaggatttcataattaaatatatatatacatataaataaagaggcattcattattagaatttagaggatatatcatcatgtggcatcacattcatatgtatagcccaccaaagtacttatttatatatgtgaaggcatatggggcctatgcccttccttacacgcttatggtcttatagattggttttttgcatggttgcttgctttgctgcccattttgtttagctcacgcgtaaagagaatatataaatatgtataatatatataaatctcaattgttttccaactcagagacaatactaatataaccgtaaaatttgaagatgttttgattcaatttactagtttttttagtgttaggaggacaaagaggacaatttgtctccctccatggctttcgttttgggtttggaataaataaagttgagagaaaaagggaaaatagaaataaaaataaaaagaagaggccttcacaagttcccccttgagtggggtttgcttgagaacttttgtacactagggtgtagtagaatatatataacacaactcaaattaaaagagagacaaaaaggtaggggaaagccacaactgtagaataattaataattaacaaagataatgtcaacttagtttaaaaaataaagcattaatgttattggatatcagcggtaggtccaacatcttttataagtggcattttagcgatattttttaaaatttatcgtatccgatatttaattaattacaccaataacagtataacactgaaaaaagtgttagtcaacaataatactttttaccaattctcttaaaagaaaaccttttgatgggtaatttatattacctatgacatatatacatattattaaaacaatttaaactaacaaaaggtagtttaattaaaatatattaaagaaatgacaatttttgtaggagatatagaaacatgtacataaaaagatatattttatgaaaataaaacatgtaactagccccagctttgctaataattattaactctattattattaatatacattttctgcatgcaattggatatatatggagggtcctgagaaagcaaaactaataacaatgaagaaaggtaatttagaagtaaagtacaaaagtaaatcctattcacataattgtttttggttattattctaatgtttaaagtagtaatgtgaggtttatgacaatcaatagatcaatcatgtacatatttgtatagttagtggggtttttttttatagaaaaaggttgatcatgagaattattataaggttggtccatgtaataataattatctctctctgccttttttaccagccccaacaacaagctttttaagcttatcaaggtaattatattactaataagtcatatattaatatatgcataatattgtatatttgtttttagcaaaaaaaaaaaaaacaaaaactatatatatatttgtaaataaatcaatattcttttaattatatcattccattcaaatcaacggccttttagagtttgggtattttattacaggagcaaaggaaaagacagaaagtgacaacgtcagaattgaaaagaaaaaaataattataagtaaatatttaaatcaataaattaactataatataacaaaaaacataattaacaaatttgttgaaataaaaaaatcaagaagtagggtttgggattcttcctcatcttttcttcctcatcatcgacccacctctctgcccttcacaaaaaattcttagaaatttttttccttcatacactttctaaaatctatcttccttggtctgccactgtaatcatagcactctcagtactgtatcattatttttccctctctttctctctctctatatatatatgtactacataaatagataaaaggatagggttatatatataaatattgatcagttgtgtgaagaggtaataacccagctgagcactcagagaaaattaaacacttctaaaaaaacaagagagcaataaccatatatctgattttctgttctatccatgtttggattatatattactttgtttttgtattattgagttttaaaggaaagagaagagagagatatttaatatatatatataaaaacgatgatcgatctagctgtagataattgtgctgcagagctgttcagagaagcaatattatccatggcctagatagcgactttggagtataacccgtcatcatcatctcttcacgagtattttttttattatttatttttaaattttatatatatatattacttttttaccacccagtagactgtggctctatatatctatatttatgtgtgccttatgctctgccacctgatcatgatcatgatgatctttcatgtataaataatccttgttttggtccgctgagtagtccaaaattgagctccgattattttgtgtcttcctttggtgttattttctgagaggtgtaaaaaagtggggcaatactacacacttgaagaaaaaaggtcttatttataaagctgagagaaaacgatctgtatacatagctagtttgcaagctatatagctttacttctcaggttcctagtttttttttttttttt

SEQ ID NO: 186234 - DNA, 3176 bp, Cannabis indica
atataaatatatatatgatggatggaatttaatgctgaagtgctctgtcctattctccaatgtagtagtcatacgttgtttgatgatgtgttctgaagatactctcttatctgagaatttctgtttggcagggaagtcggtcttcagtgaacaatgagaaacctgtatcatctggtaaaactctaatgttctaagacaagaaatccagtgtcactagctagagttttaaaaatttgatatgttgcaatataggggggaacacatcgacgaggacttggggtatctcttctatatttgggactagaggatcgtctggagggaatccatctagcagtggaaccttaggtgagcttgatggttctgatcagatgcctgctacaatccaattaatagaggtaattatataggcctttcagcagttagtttttaatatgtaatttgttacttgtcttatatctgtgtaatcttatatcagcccccatctgtattaaggccacttgaagctacagaggacgaaacagtcaaaatttttgcaaccaaatcactcatccaatcttactatgacattgtcagaaagaatattcaagatctagtcccaaaagctataatgcattttctggtaagccaatttctctcctttgtcttctttcatatctgaccttttttcttaacactctttggtttgtgcttaatgtgcttcaggtgaaccacacgaaacggaaagtacagagtacctttatacagaaactttacaggttctttagttcaaatttggatttttggatccttctttccttttgatattctgttataatactgtcctatattaaaattggtatctagactcagaaggaattatgttaaacaactgtgaattcaattgaaatgattcagattccattagtatgtgattttttttagggaaaaaaagcttgtttattatttatggcataaagcgaaagctttgaacgtctttttttttatgcagagaggacctgtttgaagagttattgcttgaagaggatgaggttgttttgaaaaggaagcgcaatgaagaattgtttaaggtcttacaagaggctattgaggtaatttcattcaaacatgtatagttacttgttcctatttttttcaaaaaagtgttgcatatcaatttgtttcattatgaatttgtgttgagcaaagctgcaatacaagcttgtgtctattatttcagatgcttgaggaagttgaatccgatatctcaactggaaagaggtctcccaccgatacaagtgcaactatagctccgtcaagcgttatagggatcggatatcagcttcgttcaactaccaaaaggtgataactgtaaatattactcatcatatgcttcactaactgagagcttgaggattatttcataataatatatagcagttattacttcggcagccatttaatttaattgagtgtacagtcatgttcttgttattaaaattaagggtgaattttttattgcttatttagtattggaagtttaaaacagctttatcattacactaaataaaacatctccacagtttaagaatacacttacactgatatccatgccaaacatctacaatgtatttgatcagcaaacacttgtgtaacaacagctagccaatattataattcactaatgttgacacaagcgttttcacaatgttaagtttcaacatcacttttcacgttctgtatccatatatcatcacttaaaaattttcatttcaatggtaataatttcatttgaaagttcacaatctcctgtgtgttctaatgaagttggtagtattcatagcaatagctgttgaacaggcataagccccaccagagcacaaggccgccgataccaaaagaatggtcttccactgtctccccgacaccaaaatcgccaaagcagtcaacaccacagcaactgccgagagaccctttttccatgcctcaaaagctttgaccacagtcctacaccctttacaatgtatcacatgccgaaaataccggttggaaaagttgggcgcgtgcattgttcctatccctcctttggctggtgaagaagctgatattccagcaacaagtcctgcaggagcatgctctacaaccgccggctcttgaggtaaccatatcgtgccatgtccaaaatggtatggcattccatgtccaactttgtccatccatttcctgtactcaaccacccaagtatctgatgatttcaaattgaggtaaagctctttggtgggcactttttctttcatgaggatttcgttttgagacgaaagaaatcccatatcttgctcgaaaactttacaagcattctgatgaaagtaccatttaggaaagagttttataagaggcgatcctctagtattcccaaatctcactataagcatcgacttaccctgtccactcggtctacataggaataaacctgtgaagtaattagtcactccagtcttctcatcaacaatttccctattgttttggagaacacaaggtgcttcaaacctcaagaagttaggcgacgaattatccctcgcccttccccaccaccccgcgaaacctcggtcagtgcgttcggtgacctcaaacgatagtggctgagcatcttctcttttggcagtccagtcagtacggtcatgggagatgggaacatgagcagggtccatcagattctcaagaagtatggagtggtcatatgggagctcatgaatggtagatatgtcagtgaatcccggcctggcgaaattctcaaaccaagggattttgttgaggtttggtggtgtcttttgggacatccacacccaaatgaccccttgggagtctcttatttcatatggctttaggcaagctgctttaggaatcttggcattagctggaagctatagtaatatcccatttgggaaatcattattagtttggtataatctaaaggtgaaaagaaagctcaataaaatatgacagtatacccaattatactaatttaatgtttctttcaaaactatcactcgtaaccaattaaatgaaagaaagagagtgagaaagagaaaagagtaactaagctacaaataaaagggtgtataacacctctaaaaaaaaatgtactgatacattctttactgttttggtttataatcgagtacgttatagttatttaagac

SEQ ID NO: 186235 - DNA, 4101 bp, Cannabis indica
aaaaaaaaaaaaaaaactagttgatgtaagagaaagaaagcagatttagtgagaaaggtacaaaacatagaaccagaaaataaggtgagaaaaactttaaaatattaaaacatgagatccacaagatcaagataaccaggtcaaaaacatcaacatctgagtggtgccccccatacaagaacaagaatccaatgctatatctttaagctagaaaaatagatgaaaagaaggaagaagaagcatattcttctatttccttaaacaaaaatatctctaaaatattcttcttggaaagaaaaactagtgtatttttgtggcatcgcctaagcttgaattaacattaaaaaagaaaaaagaaaaaaaaaagaggacaacgaaaattagccatacagattttctgctttacaacaaggaattatatcacaatgcttacatagttccaaaagcctaaaaaagcaaagttcaatccttagatgattctgtatagcttccaaaatttcactctctctggatcaagtcatagtttctagattaaagaataatccaatagtcaatctaacacgttccaagaatgaattttcagattctgggtagtcttttatactacatttttctaaaagaacaaatcaaagattcatggaactaccatagatcgatacttttcatcaatctaatacaaacccagatgaaattaaatgacaacaataaaagatacccaatacccatatgaaaaatcaacagaaccaataataaaaaagcagtaagacggttaagaaaaaacataagagtaagtgagtaaccgccatagatcaagagaatgaagaacctaccaagtttagtgggtggattccgaaattaggttgtggagatttaggtcgaaatatttataacaagaaagaaaagagtgaattagaaatggattatggtttgaaatcagaacaaaaataaaatgttggggttgaatgatggagtagagtgaattattattaattgaagcagtggaaaaagagtgagttggaagaagagtgaagagagagagagcagtggtgattggtgaagggtttaagttgaagtggtttgaaatggatagttagaaattgaaagctttagagagagaaagctaccagagttggtgatacaatacaacttctctctgggttttgcttcgacaaatacgaagtgtgagagaaagagagagagagagactgagagagttatttcatcacgaagtggatagagattgactacaatggcagtccgaatttactaaaatacccctctaactgtagaccttgttttttaaattctcaattttaagggggagcggccgggcaaggacaggattagttttttgaaatgtactttgtcttttcttagcaaaaattctgagaaacaaaggtaagttggtttttttttattatgtatataaaaaaaacagtaaaaatatttcttttttctcatttttttaaggatgcatcaaacttttaaactatgtgagaaagaaaaatatagaaaaaaaaatcaatttttctatgatatgaaaaattttggtgaattaactttactttcatactaaaacatgaaaaattgatgttagtaacatggggtgctaactcccttgggaaaggataactagaaaaagcaaacaatctagctcacacggctagatcattggcaaccacattaagaaattttgcgatagcagtataaaagacttggtagtccgataaaaacactggatacatgtagttactctccataacaaactgcactgtaagaatcccaacctgaatcttagctttaaaagctgaagaagcattgaaaacatcagttttaaactccaagaccttaccatttgcactgtaaatgattacaccagcaatccctttgacacctacaaaagaaccatcaaagttaaccaagacttggtgcctctcaatcaaagggagaaccctagggtaagataagggttgagaggggaaatttgtaaccttagatttatgcatccacaatctcatcaacacgataatttataaccagcaataaatcactaggagccaataatcgatcctcatgaatttttttatttcttaccgccagagggattcacaaaccgtaattccaaaaagagatgaactccctctttagattgtactcctctaaaggaataaagctagcatccagaaatcattgaacaatatttcatcctgagctgaaactcaagctatccatatggataccccacctattaccaaaccatatagctttcatagagattgatataattatattgtctgctaaggtttctcttcctaaatctttagccacgtgaggttatttttttctccagtctttcctgagcttagacgtggcttgttcagagtttataattttgctactgcgattaatgttgtctctgtgatatagttttgagtatcttttgtttaaggtactgccattagtcttatctctgtgacatggttttattttattttattccgttgttagttcatctttttatttttcaatgtctcaccatcaaattattgttagtggttggaaataataagttctctgcggctgaagggtttgttagttgtacagttacgtatcttgcacaatagttgaatactcaagttaaatgcttgaatgaacctgctgcaatagatctactattgtggtttttgaacagcggagtaaactgattataggtgtccttaaggtgaactatgatactgcttttcagtttcttttgttaaacaatccgataattaggtagtccattagttggcttatttttctgattctaatcttggttgtgtttccgacagggagatgtgtcgattggtttgcagattactattaataaattgcatgatttcttcaaaaaactttaacaattacttttttaaaatattttccacgctttttttttcttatatttttcttacttctctcattttctattaaaatccaactttcaaacataattttattgaaataaaaatttaatatttggttgtattgtgttaagaatttatgatgtattaattgttttaaaaggggtcctatagatagttattttcatggccggattagaaagaaaaaaaaatgtagtttggtgctccaacatgaagcatcaagatttaaatcaaattttgaatctttcatctatacaacaaaaggagaaaaaaatatgttttgtaaggaaaaactaccatatgcttttcctttcttttattttttgtaatggaatgtttctcttttttgaactataaaccaaatcaactctttctttttttcttctgcatacccaaaaaaaaaattatttacctaaaaataaaatactactagaacatccgagcattgcacaattatgctcatttctcacttttcattagtagttagaaaaatgagtctttttcaaatagttggtgatttaactctttaagatcacactatgaatccataaatcttatcaataccaaacaatgaagctaaaaagaaaagaaacccaaaatttgggagcacttattctaattaattttataatgatgattaggtagaaggaaaggaaagataagtatgaaattaatttattttgtttttttaaattaaactcaaagtaagggcattatggtaaagacaaacacgggtaacaaacaataactgttgagtgggggtaaaatggtcaaatagtgagagaaaccaatgattgaaaacaacggaaggccactgtggaagaacgtgggaatggttcatgtgtgttggagccgcaggtggtggtgttgtccttcttgctgacgtggcgagaccaacgaacatgattggtctcacgtttggccaacctggacacgtaccccaccacgcccaacaaccgcgcgtgagctgtaaaaacgtgcggaggaggaatgtaatcaacaccaacggctggccttatcgaccctttccaatctcagccgttgattttgtggggactcatcgtttgccacgtgtcagtttctagagaccccacctttgaaattttgttttggccttgggattttctgggtggtacgttgtattcataaggctaggctggcctcctctctctctctctct

SEQ ID NO: 186236 - DNA, 1379 bp, Cannabis indica
ctgttttctgttttttttttaataacagtcagtacctctgtatctatccgaaatggcaccaccaaaattcagaggagcaatcaataatggcttccaattcagtatcggaattggcggtttatcggcaagtctaatcaattttgggacggaaaagatcaaaggcggttggggatggcggatctccctagccatggcggcgtttccagccacaatccttaccctcggcgccattttcctccctgaaacacccaacagtctaatccagcgaaacaacgatccacacaaagcagagctcatgctgcggcgcgtgagaggcacggacgacgtggaagccgaaatgaacgatctcgtaaaagccagcaacgtcgctagaaacaccaaacacccatttcgaaaaatcgtcgagagaaagtacagaccacaactggtgatggcgatagccttaccttttttccaacaggtgaccggaatcaacgtcattgctttctacgccccacttcttttccgtacaatcggatttggggaaagcggttcgctgttgtctgctgttatgaccggtgcggtgggtgccttctcgacttttatatcgatgcttatagtggacaagtttgggcgtagagctctgttcatggcgggaggaattcaaatgtttgtttctcagatcatgatcggaggtgttatggcggcgaagctcggtgaccacggaggagtggagggggaagggtttgcgtatatggtgattgtgttgataggagtgtacgtggctggatttggttggtcgtgggggcctttgggttggttggttccgagtgagatatttccattggagataagatcagctgggcagagtattacggtagtggtgaactttctgttcactttcattcgtggctcagacatttctggccatgctttgccattttagagctggaatcttcttcttctttgggggttgggtggtggtgatgactgcttttgtttacttgtttttgcctgagacaaagaatgtaccaattgagaagatggatgaggtttggaagagccactggttttggaagggttttgttggccctgctgaagatcgtaagatatgaaacaatattacttttgtttaaaaaatcatccagtgctaattgatttgaacaatggaaaacgcaggcataaattatacacaaattttataatgtatatgtgtgctaaaatttgtaattatatatttacatatcaatattatcattactcatttcatatagcaatgtgcaacaaaatcaaacataaaataaagatttcaacaccaatttgcttatctcggacagtgtcctattttattaaattagtgtagaattttcgcatcattctactttaatgatacaagaatt

SEQ ID NO: 186237 - DNA, 3024 bp, Cannabis indica
ctctctctctctctctttgcttccactcttcccaccttccacccaacccaactctttcattaattttctaaatatatgccataatactctttgcccaacaatatatacatatattcatgctttatgcttcaaatttatacccaatattctctcaaactttattttctttttctctttctatttcccaactttctctcttcttctctgatcctttttagggttctcttggttggttgaagaacactcagaattttaagtcagaaatcgacttaaaggtactatatttatatatgttcgacctaaatttccttgctgtgttgaaagatcatttttttatttttattattatgttattttaaattattggaattttaaactctcaggaggggagatcgcctttttgtttttaaaaagttttctttttcttggatttattttcttattctgttcttttcaggggaagtttggtagtgtgatgataaattggttgtattttactatgtgtttgctaaaaagtaggtatatgaatatgtgtttacgggaaagaggtcaaaacccagattatggttatggggttggtggtgttgtttatctaagatgactcactgagttggtgagcatagagttatgagttgacccggttagcttatagagcctaagaaagttgtgcgaatacaagttaaagttattgaataatttgcaagtctcttctattcttgttagtttctagctgctgatttattaaaggctgtgtttggtttagactatcatggctatatagcttgctagctgtgtttgaaagcctccttagttttcttttttcttctctagacttttaccataagttggtttttcattagcactgtattttagagctcatgatctataaacttatttcttatactgctggagaagatgagaggaatatacagttacgatttacttgagttgtttaagaattgggtatattatgtttccctttactaatccttctgatttttgatcttgcctaacatatcgtggattaaaaagtagaactacttattgaaattgattacaacttactccagggtttagttttctatctttttgaagtactttatggtttagatttgaaggtgttcttttttttctctctttaatttcagtaaaagaagggtgacataagggaacttttaaactagctttatagttatggatcaacaagggcatggacatgggcagcgcacagcgatgactggtaatcaagcgtatggcgtaaacccttatcaatctaacaaaatgatggggccatcttcgggtggatcagttgggttattgcagagtcctactcaatcagcaggcccgtctgcttcacctcagctcgcccaacaccaacttgcttatcagcatatccatcagcagcaacaggagcagctgcagcaacaactcaggactttctgggcaaatcaatatcaagagattgagcagtctagtgatttcaagaaccatagtttgcctttggctcggatcaagaaaatcatgaaggctgatgaagatgtgaggatgatatcagctgaagctccagtcatattcgccagggcgtgcgagatgttcattctagagttaacacttcgttcttggaatcacacagaggagaacaaaaggcgaacgcttcaaaagaatgacattgcagctgcaatcacaaggactgatatattcgattttctggttgatattgtcccgagggaggatctgaaagacgaagtgcttgcttcagttcctagagggagcctccctgttgctggtccagctgatggtgtcccttactactatgctgctccccaggttgctcccccaggtatgatggttggaaagcctgtgatggatcaagctgtgtacgggcaacaacaggctcgtccttacatgaatcagccaacatggccacatcaacaacaaccccccaatgattcttgagtggaacagggtttgtttggcttggagtatacagctgaaagagttgtgaattttcactatatatcatagttgcagggtgggtcaacagtcaatagttatttgtcttgaatacaatatcaattaaacactttaattctcagcgggagagatacacagtgcttgttcttattggtggtaatacatgataaaaaaatccttcaaaggtgcttggtactgtagatagttatgtctatcttcacattagatgtaagattatagctttctctatttatgtcaatttctttttttttctttttcaacatcaaatcgtcttttgtttaagctgtcttttcttgtgttatgattgatttgcttttgctaatgttatttcagccaaacaccttctcacatgtttttttttttctttttcaaataaaatcttagatgtagttctagaggaaagggtttaacactaaataattgctcttgaagaataatttgttctccaaaatggccacgtcactttctttaaaatcctggtagtaatagtagtggtggtggtgaaagagatggctttctactttctactttctagtgtcggcagaagatgccttcatgtggcctaaaaagaaagattgtgtgtataagccataaggagaagaaactaacaataatattaaaaatataaggtctttttttgacatcatattttgtttttagaggtacaataatacgaggtctcaactctctactgtctatataatgtcggcctgaagcttaatatgtgtatatataaatatggtgctacatatgtccactcaattttatccaaactctatcaatatgaacatgtttttaactgtaaagaaacgtgcagtagccaatggcaataaatcaaaccatcattggcccttagcaaccaaacatttatgtggcatttatgagtgagcttcttttctttttacaacataaaactcagcactggaagaggagaacaagcaaaactagcatttcagcactcaacacatcaactaactggactgatatcgtccaaactgccaaaaagaaaagaaaaaggcattagggtgt

SEQ ID NO: 186238 - DNA, 1788 bp, Cannabis indica
aaaatgaaaaaagaaaatctaaaaatatccaaatgaccaagaattacaaaatatattctcattcacaagtcatattcaagctcaaaacttgaaataaccaaggtggttggtgttttagtctctcccgtcgcaattcccctccgacgacgccatggtatccagacggcgtcgcatcagggacctgtcccctaccaccaccgctgtcgtttaactctactcttgtcgtttctctcgatctgttgttgtaatgatttcgagagttcatctggctggatccagttgaagaggaagagaaacttgggccggaatctgatgttttccggcttcgacttcgactataactggtgggcccaaggcccaagcccaaagtgagctcaatctcactctcgtctataatctccagattaacaacattattattgttgttattattattattgttgttactgtcagtattgttattattaatatcaccgtcgtctgagtcttctgcgatgttaattttattgaactggtcttcagttactgaaggctgctccaaatccagtatcataaattgtcgtctgttttgagattcaagctgattattgaaatgggtttctttcattctgctccgtccgatgtttttcatcaaaatcttctggatttggtataaacgatgaagttcatacacctaacaataattttgaataaaaaatactatataagttaatttcgaccccattaattagtatataatgtactgtatatatatatatataaatacctgttctttaaaagtttcttcatgctttatcatagccatcttcatgaattccttgtcgtatggtttaaagaggggtttctccattgttgtgctttagatttcgaatctttatatatgtatatatggaggttgacctgtatatatatatataattatcttcttgaagaaaagctagtatgtgctcagaaatgcatatatatccggatctagctagtattaatgcccttttcacctctcacgcttctatacctgtcaaacgaggaaaagtagtaaacatttaaagcagactgaataataatatatatttataataatatcaatatcagcaccatcctcctcattcatggtatataataggtttatgagaatatttctttttaagaaaagaaagaagagtagtgaggttttcaaatacctaaatcaatatagagataacgaaaacagtactgggtactactttagcacaatttgtcggtttgttttgattgtcctccttcatgttaaagccattttgggccacaatataatagtttgatacaaaaaatatctctctggccccctatatacagttacaaaaaagtgggacaccatctccatcatcatagtagtataaatacctagctaactaaatatcatgtgcagcttcttaatttgttatatttatatatatatatatatattattattattatatgtacacatgttctccaatcttgatttctgtaatccgcattcttagccgattatataccctactggcctgaattttgaattttcttcttaaaatcaaaattttcaatttttttatgacgtagattatactcttgcctagatagctatgtagcaaactatatatgacaaaagctatggtgtgtttgctaatattaagggttggaataccaattatttttggttggttgtacatacatatcaaaaaacagctacattctgtcttatataggaaaacttgtgaataatatcgatcataataataaggttcttataatttggctatagcctat

SEQ ID NO: 186239 - DNA, 2455 bp, Cannabis indica
aactaacctcagagaaagtattagtggtgtaagaaataagaagagaagtctttcccacaagctccatcaccaacactcacacattttatgaacctcaaagatgaagaagatgaagaagaagaagccctcattttcatattttcagaatcttctctcctcctctaaaatctaaatacccataatcccatggaaccctaattaacaaatgggtaatgaaaacaaaaaaaggaaacaacttaatttttgaatgggaaagaaattattgaagctacccggtttttgatttcaattgggataatctatatatacttttggaaagtttagattcctttgacactatagataccttctttttatatttcattggtacattaatgatgattaggtataaatatttcattgatattttttgataccaagtgcttgttgcattggtacaagaatgttgatgatgatgttttgttatggtttggttgatttttatttataatttgatgaaaggattaggattatgaaataggaagtggagagagcattgtacaagaatgtagtgggcacccaagaaaagatcaaagcaatcaaggaagaaatagacaactaataatcatgctttgtgttaacttgaagagattatgtttagtgttactagataaccctttattggaatattacactgaaataagaatttacacatgaatatgagcaatgttggagatctatcaatttgtcaaagtcaccacaactaatcctacttggcaagtaataaagtagttaagttggttataaggcttcaaatctacttaattaggctactcaatgcaagcaatgatttggtgtacacataatttacaccaaaacattataaatacagattcgtttagtgggatccatcttaaataaattttgatgcatttatatggtttattctcaattttctcactacacttgatgtagtacttactcaaatgaaaaatgtgtatatatatatgaccaagaattccttttatataccaagttgaaaattcattgaaacaagatagatagagttgttagtgtgcttccatgattcataatggaatttgagattgagtatgtgactcatcttataccacttcttattcttagtaatattattgtgtctctccttggggccatatattttcatcaatattgaaaattgtaagatgtaaggcaatgtttgtgaattctatttcatcctcaaaagttgatcatatgacattctaatagaattatcgttagttagttgttagttacagtcggttctttagcttagttaaggttcatttagctagttctcttttattgattctagtttattagtttttatggtcgggttacgttaattaactatgctagctttgtatatatattagtcctcacttcatttttgtaattaactcaatttagactgataagacaatacaattcatttaattttatttgtagtttattatttccacattacggtatcagagcaaggaaggtgaagtttttccttgatcctagttctataggtttttgcagaccgtgttctttttctctagtcaaattctagaagatctttcttcttgacgaattcgtgttcaattcgaatctttctctttgtctctcagacgctttatttttaccttatttctgtgaatttttctatgttatagtaattaaatgttttaaacaatttttttacgattttgactctaatgttttaaatataattaatttttcctgttatggtattaaatgttttaattagttttttcgtatattttaaatgaagattataataaatgctaagaagatatacgacctttaattttttttattatttttatttttgatatcttatttatgattatgttttgacaaataagtaataagaataaggactaatgattttttggtaatatagaaatggaatttgatcattataggattttttttttctagttataggctaaaaatattatatatatttaaaggaattttaatatccaaatagaattcaatttttaacgcctaatctaatctaattataattagatattcaattttttttttgattaaattaaattagttcaattcaattagatttgattggatcccgtccactccaacttaaaacaatcaagtactttctaaaaattaatatttgctaaaatcagcaagcaaagaattaacttcagcaaaatatttaaatctcttgacaaagactaccaaaaaaataagacattttagtcggtccaaatcaattttttcatgtattcacgataataataaatttaagtaaccatttatatcaacaacaaaatcaatgattaaacgttgatttaattataaataacgctaaccaaacacatttgagcgatataaattatttttttctaatcatgattatatctttaatcattttttggtgtagtcttatattttatac

SEQ ID NO: 186240 - DNA, 3381 bp, Cannabis indica
atgattatgtacctctatctcaaatagcttagaatctggagaggagtgagagggccctccaccagtgcttggcttgtaagggctcaattggtgatgcttctcttaggataaggcgtgaaggccagagctctatgggacccactcgccccttatccacatctagaggcaagggcaaaacagttgctaaggattgaggtgattcctcttctgaggatgatggtatttaatagttaattgcaccatcttttatattcttgtcttgcattgaatatttgtgacttacattctgactttgcttttttctttttcagatatgtcttccaagtagagaggtcatgttagtggaccttttgatgagcctttaggtcatccgagggccaagttggctcagaccacccatggtagagatgctactagatcatctcttcctcttcctcctccaagggctgcaccagctaggcatcccacgattgatgatccttcagctaggagggaactgccttcgggcaggggtgccccaaagcccggttagggagtaggcttagccgcagggtagagagccatggaagcagctcataggcacttagagagagcctttccttcaatgtatgatgagcttcaggagcttagtgatagtgagccaaacaagctctgatctactggcattcgagatttatctgtggtgagttgtacacttaactttgctcatttttttccatttttgtgggttgactgaccatactaatgttgcatggggttggccggccagtgatgtgtctttgagcagctagccagccatagcagcttcggggaagggttagctggcccgtgtagtgctttgatactaaatttgaccttgtattgctttcaggtcttgatgaagctgagcgtttctcgtgataactcccagggatcctcaagtgctctttaagagcaggtgaagaccttggaggttgccctcctagcgagagactagactatatctgagatagaggctcttagcctatagaatcagagcatgatatctagtttggagagacttgtccatgacgtgtgtcctggtttgtacgaaaaccctcactacagctgtacgccacatgataaagaaggttctcaccagccaatagtcagatcgtccttgagcagtatgggccttagcagcgtgtggggtacgaaaccctagataggtaaagggtaggccctttaccctatgtgtacttataaatactcttattttctgagcaaagggtgaacagttttcacttacaaacactctgctaaattcctagagagcttttgcccgagagaaacaagaggaatagagaaactcttattgtaaacacttgtaatacctaaacacttgcccaaataggctaatagtattgactcatggactaaggatcattaatgcctaaaccacgtaaaaaacttgtttgtttattgtttattatctcttattttcttactctaaatataattggttttcaaaaatctcgataaatattttggtgttttcattgagaactaaggaaattctcgtaatcttcatcgcgtttcaaccatggtgtataatcgaaaaggctctagcaagaaagtcctcttggatatggttattgaggaagtcgactatcatggagccgacactgaggtggaaaatgatagagaaggtgcaactcctactaagaaccaaggagggaataccgagaatgttgcaaaagacctcggtgatagccaaaatccagaagatgaagaagaagagaagacgatgatgattactactacaaggatgggtattacaaagatggttgctaatatgaacatgaacctagtctggtacgggtaactaaagaattggaagctagataggtagcgttagtagagcaacaagagcttaccgctcagatgaaaggaatgatggagcaacttcaaagaaagttcaatgacttagctaggacggatggggaaccatcggtggaagccatgagtgatgggaaaacccgtaagcaaactgaagctgaaacctcaaaccctcacaaagacaagggtaaaggcaaggttgatgaacccccacgaaaacctactcctaagcctccacataaaggtgcatccctaggttgacaaccctcgatgacgcagaaggccatcagtgcttttgagcatcgacacccttctgaccctcgaggaaaaaccgtgtcgaagggaccaaatacaaaggcccctaggcttaggagacgggtaaatcctcctagtgattccattaaccaggacgggaggactcctaacagtcactttggagacagttggcacactacagatttgcggcaacaattggacgctaagtacagaggtacaaacgtgagaaggcaaggccatgcgggggtgacctcaggaatcatttgagcgacaagatgagtggacgtgatatcccagaaagtgatacaaaaagattggaagaaaaaattgctacattgaccaagttggtcaagaaataaagtggaccactatcacactaagaagatgaggaatcagaactctgcattcgaaggatcacggaaactccgctcctagaaaattttaagataccccacatcaaattatatgaagggagatctgatccatgaacacacttgtccaaatacaacaagatgatacaagtttcccgcgtcatcgatgatgccaagtgtttgtgcttttctctgatcctaactaagtccgtcgaggattgctggaagcggttggcttcaagattaattgatagttggaaggatctacaataggctttgtgtaagcaattcatcaacgctcgagaaaaagacatggaagttggttcacttaccaatgtcaagaaacaacctaacaaaagtctgaggccttttcatttagagaatggtggaggcagctactaaaactaaatttagtgacgacttgaaattgatggccctccaattcggacttgttgtaggctccctactctaaggagaaatgcaaaggaaaagggccaaaatgttaagtgagtttatggctaagcacaaggtataattaaccttgaggatgcttatattcaggccttcggagtccctcttgcaccaactcaaaccacagtcgctcctagttttgcatcccagactcctgcttcatctatgtccctttcaagaccatagtatacccaaactgtctatgggcctactgcatccagtctcatccctatgtagacccatttcttcgagtacgtggcggtacagacgaagtgtagtgtggctctcgaacaatctaaagccgaggtccccaattctagtgtggggcattcacggggcaagatatgggtaagaatcacagccgtaacaatttagtaacgtaggcgagaaagaagtacgattcgaa

SEQ ID NO: 186241 - DNA, 5342 bp, Cannabis indica
atccatgattttgatcatgtttcaatccaccccaaaaaccaacctgattcctactgcctagtggttaagattttgacccccaaaaccccaaaaccggattggattggcaatgctatgaaagatgcttggattgcccgctttcctcttaccttcaccgattatcactctggtctgtttttggttcgttttggctgtgaaggggatgaaagacgtgtcatggaaggccaaccttggcacttcgaccgttccctcatgctttttgccattcttgatggttttgacacctttctcccaaaccaactctgatacatccctctctggctacaagttcatttcatcccttttggcaatagtctcatggcctggctcatttcattgctgataccatcggggatctcattgaagtacaccttgcttctctatatgattccatcacactgttcatgagaattcgtgttcttcttgataccactaaacctttgtttcgtggtatgaacatcaatttcaggaaactttccctcactaaatgggtgaaattccaatgtgaaggtctacaaaactactgctatcactgtggaaagctcgaccataccttcaattggtgtgaaaatttccttcactactgtgatacccatgcccatcccccatcctttagttataaggatgtccttagagcccctgccaaatctttctacaagaaaagtatttttgaactttccaactcaaccccattcgaagaaatctaatcactcaacaatgtcactagccaaagtcttcaagatgccgtggatcaatctttggtccttagtattgctaacactggttaataccacgaccaccatgaacccatcctctccacttccctttaatccctctgaccagctcccctaaacctctccctctcttctagcctcagttttcaactccatcacctgcccaatcaactccagccctataataacttccactgtcctcatctctacctctaaaggtaaagcacccatgtaccctgaatctaccagggtaaactctaaaactcccccagaaccaatccatctcagagcccgtgttgctcatctcaacatttctggttctaaaaggacctacactcgacaaagctctcaagttggtacttcagtgaggaataccctgaagagagcccgatcctcaaactcagacttttttgttgttcaatctgtttttgatactgatgaacagggaaaaatgagtctcttaagttggaatgctcatggattggggattctcgagcattccaaaacctctcccttctggtgcaacaacattgacctcagattctctttgtgatggagactaaactggctgttaatagtagtatcttgtttaaggctaaattgtcttttgataatgtctttgaggtgcctagacaaggcttaggagggggtctgtttcttttttggaatgatgtagtcaatgttcatgttttatctcactctctgtaccacattgactgtaatgttactaatgataataataaaatgtatcatttatcttgctactatggctctccttatgttcacaatcaagaggattcttggatccttttgcatcgtctttttgatgctgccccctcttccccttggattataattggtgattttaatgattaattagctttcaatgataaaagtagccccaatccccctccttcccatgctatgatcaacttacaaaattttatcactaaatttgatttacaccctttccctttgtgggaaatcgtttcacctggaagcatggccaaattcgtaaaagacttgaaggtatagttagtaaagactgggataacctcttcccgatggctaacattgttcaccttcccttctacggctctgatcacagagccatcaaagtggagtgtgatcctaccccttatctatgtcaacatgccaatcgtttttttttaaatcattggcttattgaccctgatttctctcatcttatgacaaagagttggcctaacaatccaaataatagtagccctgagatctccttgcattcttttcttagtctgcataatacttgtcttaacaatcttaaaagttggaaccaatccaaaaataatatccgccaaagaattaagagtatccaaaaccaaatcgaggctattcacagcaactataatttgtcctctgatgacattgccactgccaatcgtctccaatccaccatggatactcttcttttaaaagaggaggttttttggaaacaaaggtccaaggtcaactggctcaattctggggataagaacactaaatactttcataaccccgcttattccagtagaataaacaacaccataaagtctcttaccctggatgatagttcgactattactaccttccctgctatttgtgccacttttgttgacttttacactagtctctttacctctactggggttgacatggcctctatcaacactgtcctgtagggaattactcgatgtattacccctgatcaattttattttcttagcaaggactttgacttctctgaagtcaagtcatctcttttccaactctcgggggataaggcttctggtctcgatggactcaatccccttttttaccaaaagaactggcacattctgggtcactcttttggccatgctgttcttgatgtcctaaacaagggtactagcatttcttccatcaatgagacttaccttgttcttatccctaagaaaagtaatgctaccaaagtccgtgatttcaggcccattagcctttgctcgaccatttacaaggttgtggccaaatcaattgctaataggcttaaaactgtccttacttctctcatttcgcacaacgaaggtgctttccttagcaatcacatcatcgtcgacaatattcttattgctaatgaggttatcaattcaatcaatggtcataagaatggcaaagtgggttgggctgctcttaagctcgatatggagaaagcattcgacaaagttgaatggggtattatcgaacatatccttctccattttggcttcccaagttgttttgtgtctctcattcttaggtgtgttccaccatttcctttaagatctgtatcaactagggtatttcttgccccatcactttttcaaggggaattagacagggggatcccctgtccccttatctttttctcctggttgctgaaggcctatctgctatcattcgctcaaaggagcaggccagtctatttaaagttgtctctatttgtcgttcgaatccttctatctctcacctcctcttcgcggatgatagtctcttatttacccatgttagtcatcgcagtagtcattctatccatgacgttcttaccacctacaataaagccaccggtcaatctatcaattttgctaaatcctctattcttttctcacccaatacctcaccccaggataaaagttcctttctctcctcccttggaatggttgacaaaccttttattgacacctatttaggtgttccacaatatttttctagatccaagaaatcctcttttcattttattctccaaagagccagcagtaaacttagcatctggaattccaagctcttttctaaagcgggcaaagagattctgttaaaagtggtaatccaagcaattccttcatatgtaatgtattattataaaatccttcagtcgatttggaagcagttggaaaagcttatggctaatctctggtgggggtgctaaaaggtcaaaataagtctaaaattcactggaagtcctagcacaatctctggaaatccaaagttctttgggggtcttggtctcaggtctataattcatcataatcagactatgcttgccaagcaagcttggagggtctttcagcatccttcttcccttcttgctactctcttaaaggctaaatactttaaacacaatgacttcctccaagcctccttaggtcactctccttccttttcttggagaagtcttatttggggtagaaatcttcttttaaagggccttgtctaaaagattggggatggtaaatccatttctacgcttagcccaaatttgttgccaggttacactaacccctgctataaagatgattcccagcctcctgagaacaatgtctcttattttatcaatgataatggttcttgggatctccacaaactcaactcttattttgataaggatatgattcagtccatcctagccatacctactaatccctcttctaagggctatctcatttggggacatgactcctcgggtattcttacggttaattttgcttaccacctagccaattctcatcattcctccccttcttcctccaaccccaacactctcaaatgctggtggaaatctaactggtcctccaacaccccccctaaaattaaacacttcatttggaaagtattctatcatcttctaccttccaatcttaaccttttctctagaagagcccttgataatccttactgtactctctgtttgaacaaagtggagtccaattctcattctctcctagagtgttccagagcaggtaagttttggaagaacacaagtttttttaacctttacaagaataacaaacactgtgacataaaagaataacttttgagagattttcaaaattttttcaaacatgaactttggactttctatggtattttatgggctatatggaataaccgtaactagacaattttttacagataagaagcctcactatcaagaaatagaaccttttattcattcttatttgcaggaatataatgaagctcaaactaaagttcttccggtcctaaagttttcccaaggcagctcttcaacaaacatcaccattgaatctttccaaccccctctggcttttacaagctcagtgtcgatgcaaccactcaaagcaagaccaacaagcagggttttggagctgtagtgcaagaccataacgggcaaatcatagcaggtttctactcatccaccgtctcttgtacacaacctatttttgctgaagctgaagctctctcaaaagccttgacctggtgtttagtggtcaagtttccaattgagcttattgttttggattgtcaagtgctcattaacaaaataatccaaaggcagcataacttctctgctcttttcgatagagtttgtcctctttgtctctctttcctaatgcattcatctgtttcattcctgggagcctcaacatcttggcgcataacctcgcacaacaggcattaggaactgatgaagaggtcatctggaacaactgtgtttccttttcttagctcctgctccctctctttgcaacaactttgtattttacaaaaaaaaaaaaa

SEQ ID NO: 186242 - DNA, 4642 bp, Cannabis indica
tctattaaataataggatattatattaaagttaacttagaaacccaaaaaatattattaaactaagaattccgttatatagctacattttatataaaatagatgtatggtaacatttaagtattgaaatactagcctagaatatatggttattaggagagaccaatcaaattggttgaatttgctccgcttttattttattttatttttatctttttattttaatttattttattttattgaaataaaaatgttttttttattaaaaggtaaaaatgttaatatttgtagttcatgccaatgccaaaagacaattagtttcagtgaattattgggttgtgcttttgtagtctagagatagtcatagagtagcagtagtagtaaagtcaataaacaaaagaaagagagtaaagaagaagaaaccatgcaaataatttttgctactttgttgtgcaaaagttcaattcactgcatgatcatgttttgaacaaaaaattgtttcattaaaattagcaagcaatgattgtgacatttttcagtgacatgtggagctggtcaaggattgtaataataataaataacttcattggaaatgagattttgttatattattaacatctataaggataatggaatatgctttccagtcttcaactggggaaaaatagtttattagtacccactttttatctcacattggataataggaatatttttaattatttatttgtttcagggtggaacctttaggtctaagatatacatatttatttatgtataatattagtccccataaccacacctaacaaggtttaattaaactacaatttaaagcataattggatcagctctatggtaactactgactggtttgtaattgtagcctcagtgaagtagttggtcttgaatgcaaaacagacaatgtattgcagcaaccactttttaactactgatcagtatcttaaaagggtatcagaaaacaatactttataatgattctttcctcctgattacgaactagttaatccattcttcaatatagcttgaatacaaggatgaatgtggcatgaattgtcagtcctactatgcctcttttcagatggttcagcaaattatcaaagtacaaacaaattaagagcagaaaaatttcccatttaataataactaaaagatccaattcttaatacagtataatatatatataactgtacactaaaatatatggccgagctcttctatttctccagtgacaaaattgtgtttccacaataattgactacaacaaatgcatcctttccacataagaatggagcagccacttgttaagagactcaccacacccaacaaagcaacccgtgttcccattttcggtgaaaaatggaaaactaaacattctcaatagctcctgcactgactgcctcactagagaagttcctgtaaccttgctcctacggccccatcccgtcacaatttcaattcggtttgggcaagctcctgacattagcatctctcggcgaaaccaggcaagtgttctagaaagcgcagtaacagcagtaccatccgacataacatgaagattgataagccaatgactactgcttttcttcttgactgcgtctgggtaaacattcttttgtgcagccacctcccaaacagagccagcctcctctttgagccctgacttgtgaagaaaatctaccactgcatcaactagtcccctcttgccttctctatcctcactatgcatcagatccaagaatttattcacatgttctcgcacattttgaccatctgggcctgctgatggcatcgacagtataaatgtatgcgcaggatggcctgtaatttccatgagcttgctacaaaatcccatgtcatgaggagaccgcgcttctgtacagcaactgaggagtaaagtaaaagtttgtaaagaagggttgagacccaaatccaccatgccctgcagcaggttataagcatctgatagtcgatgcaccctgagcaaagcactgagcattgaattacaagtaggtacatttggctgcaaccctgcctcaagcattgctccataccaagcccaagccttctcaatattaccagccttaccccacagatctactaaaagaccataaactggttcatcaggaacccagtttctctgtctcatctcattaaacatgtcttcagcttcctcaagaaacccacaatgaccaagcacctccattactatactgtaagtcaccttatctggttcaaaacctgcattctgcatcccacggtaaagctccaatgcagcctcatagttccttgatttagcttgcaaagctagcatgatattgtaggtgactaagttgggagtgcaaccatcactaaccatcttagaaaaaagattgtgggctgcagttaagtgacccgccttcccgagacagttaattatgacactgtaagtgaatgtatcgggagaaagacctgccccttgcatcctatcatatagatgtagagcaatgtcaagaaaaccagccttggcatgaatgtcaatcagcgtgcaatatgtcacccggtcaggctcacaccctgttttctgcatttgattgaacacattaactgcatcttgtaagtagtttgctcggccatagctgtgaatcaatcgattatatgttacaacatttggttggcatccttccctcaccatctcattaagcaatttgtttatggtaccaaattgcctagcacgaccaaggttgccaaccattgtggtataagtgtgtccatcatgcttgaatcccgctttccgttttaaccaatagaaaaaaccaagagcaacagtatggtcttgaagttgctttagaatttggtttgcctgatatgcatccaacacaaaattgagattttcaagcttctcttcagcagcccgcccccacttaattccttgcagtatctgggaaacactttcaacaggattaaaagtatatgcagatggcctcctgcttgaagcataagcgtttgggtatttcacatctcttgggggcctgttaaagcctttattaacatacccctcagaccctgcatcagaagcctgatgatagttagaactgaaatcggctttgaagctgtttataaaagacctagttctatttggcatagcttttttatcacgagcatcagtaggtacactttgactgccccatgagtttccagtctttgtatgaggaacattatttacacccttacttacattagatttaccacctttactctttgccccatgagaattactcgtagaattcaatggaactgctgcctcagcagatgatctaggatggacactagaaaagttctctcttttgatgtgtttcacatgtgatggtttgatactagaaatcctggtggggtcaaccatacagtttttgggcaagctaagcactccaattccatcagataaaggaaacttagaattcacaatatcagaaagaaaagttacagctgcaacaccagccttaacaaactggtctgaaataggaggcaaagaattttcaacatccttctcaacattttcaacaacattggcataacttacacaatctgatatcaccaatttttggggggcaatcttagcttgcttcaaagaagctgagtgaacgatattagcttttggaggagcgaccactttcactgcatctcctgcaataaaatttcctactcttgctgtcgttctagatgccaaggtgggttgattttgagcaagtgcacctccatgccggtgatgctgccttcgtgaaacacaagcttcatcctcagagcaagtgcaagaactaccatccgctgcattacatcgtgacccacttaagaagaaagaccttgcactgttagaaagatttccaatatgcttcgctcgcaacatcatttgctattgctgatacagtatcgcctttacaagaagaagcaaaaattaatcaattagttttgaaattaatgataccaaatcaaggtaaaacattaacacaatcaagcaattatttgctcgcatattactataatgattcaaccaaactaccactataacaagtgatttaacaaagctaagagaatgaatagatcgtggttattatccttatcaaaaaagttagtaaagatgcagtcctatataattgtaattaaatattaaaaagggacagaatatgcggataaaagctacaatctagatgtgaagctgattttcaagttgtctttcactaactgaaaacacaaaacaaacaacatgtgaagctcaaatcaattacctaaggagcaacttggaagctccagctagcaaacaaatcactctctaaaatgctacatggctaattccaaatgcccacaaaataaaattctctctttttacattacaataataaagtctttcttttcagatttcacaaataacactcacaaaattaaatcccgtttctttcatattgctacaacaccagacataacgctaatatttttctacgaactccatccttttccagcaaaacccatcttctcaatcacaacttatacatggagaaaacattaaatcagaaaccagttattagaggaaccaatgatgctcataaacccaaaaaaaagaaactcgtgcctaccaaacaaagataacgaaa

SEQ ID NO: 186243 - DNA, 7808 bp, Cannabis indica
aagtgtttgtagctaaactgtgaggtgatgacttagaactggaactagctggaggagaatttgatactgtgggagcataatgtggagatggaggagggctaggggtggatctgcatccctaagaagaggtggaacatgtctatgagagggaccaagaaaggaatttggatcaagaacaagaggagcatgggtgacattgaattattcagagccaaatagagaattatatgaaaattcttgttcattaaaagttacactgtttggcacataaatttgacatgttggatgcagacacctatagcccttagaagatatgttctatcctatgaaaagacattttgaggacctgaaggaaaccttttggtgttcacatggtatgactaaaaaaaataagagcatccaaatgctatcatcatgttataatatgaacttcgataaataagtttttcatatggtgaaacagagttaagagtaggaatgagaagcctatttatgatatatgaggcagattcaaaggcttcccataagtatcaacaacatgtctatgtttcctctaaattctatgttagtctatttttagcctattgttcaagtcatttttagagttaattgactttttcattgtcactttttggaatataattatgcttgttttctttaattttaggttttgacacttaaactgtataaattggtcatatataaaaaatacagtgatctataaaatagagaaaattttacaagaaaataaagctaaacttcattcctgaattcgactatgttctaattatattttggaaaaagtcaagacataaaaattttagatctctttttcagctttccagcacatctaaaatcagttcatttagagtttgtttatgaaagttatgtacattttattgagagaggtcaaagtacacaaatgaattgtcgtcgctgcgaggcactacaaaaacctagtattttcgtctttctacaatcatcgcggtgaggcacttttccgttgtggctccacctccatacgagacatgggcaactttgttttttaaagtttgagctgaaaactttattttaatgaaagggggtcgcaaattttagagaagtatacacaatggaacactagaaacacaagaaaagctttgagcgagtgtggacgatccgtgataatctcctatctagttttcttttctttttctttaattttttatgttcttgtctgtgtctagattaattttagatttgattatgaactaaacttccaatttaagaattcgatagatattatctaagattatttcatgagttaatattaattaattgttcttccttcttttattgtgtgatttattcatcgttgtgtttgttacatgtttaagaggttcagtttttgatgtgaggttgacaatcacaacctcatactgtgatcctaatccaccaagaatgtagagcactagatcatcattgttgattggttggccgacaactgcaagatgatcaatcaatatattgcttcattttgagcatatattcctcgtttgagaaagaacttttcttagtggtttgaagaagattttgaagttgcagaagccttgcctaagatctggtagcaaacaactgagcaaaggtggtctagatcttagaggaggttcgacaatgaatgacatgtcccaacatatgtttaacaacagaattcattagccaatgcatcaagaattggtcaaaccattgttagaaagcaaggtttggaacattacctacaagagatgctagaggctgaggaagggttccaaggatatagtcaacaagatcataagcacacactgcaacaagaacaagtgatcaccaaatagtgtagcttgtgcaatcctatctaagattcagggggaggagatgattgttggggaggggaatttaagcttcaggagcgggaattggatttgtagctcgagcttgcggttgttcgactctttctctaacaggtggatcaatttaaaatctaggaccacaaccattttcgctatgattcgacatggctctaataccatgtaagaactctgaattttatagttagactttgagcagaatagaaagaaagaaggagaatgagaggacgagagtgaaagagtggaatgaatgctcaaccttcaatagttagcttgcactatatttaaatgtagttacaaattacagctgaataagtttgagaaaatatttctaactaattccaacaatttataacaactctaactaacttgcctcttagcataattaactcttagttactctaaaagaatccatgttaaattaatgaatcaagacctggattcatggtttgactcattcgtgttaaaagaaaagacctaagatattgatagcaattgagaatatttgcgacaaaacagtatttaagatcaacctcttagttgtactatgaatagctgttgttactcgtgatgttagacactaatgtggtagattagtttaaagcgacatttgcaataaaaaaatattaaagttgtgttataacttacacataacttgaagtacctaaatagaatttgatgctgaaaaaatttgagtacttcaatacaatttttaatctgatttgccaaatcaaacatctagcagcaaagttatctcagttcttaagttgtaactaaaaattgatttttgtttgagtcctaagtgaaaacatattaccatatatgagatatcaaagttaactcatgtctgaattttgtgtgcttttaagcctccggtttctcacatcattgtataagagtatagctggctaaaatcgccagttaaggcacgtgtgtctaatataacgaacccagtaaggatattcattattacggtgggaatccaagtccaacaagtaaagtggaatagctttagcttttgtgtctgtcagcttttcagaacccatttagtaacctcttcatatgagcttaatgatcgatattcactcttaccatcacagggaaggtaagatggaagactagttggcttgaaaggccatccactaatgccatattattgggatttttttcaacacttgttttgagcgtaggaagcttcttacccaattgaaccaccaccctagtggactttaattttaccttaacaatcaatgaaaggcatcttctatatatacacaaaacaatacaagtacatgggttaacttagcaagtgtccaataacttctttcgaaacataatgggatgctacaaatgcacaaagaaaggaaaaacaaatagtgttaggagcctaggtaaacaaatagtatagggatttggggtcaagggcagtggttagatctcaatagactttctaacagacaatattaacaaccaataacaaaacgatgtaatctacactctaccttataataaacatatgtttaagtttaaccacctgacctcatacaccatctcataaatgtcaaaatctaagtcacaaaaaccaatgaaaacaaacataaatgttatcaggatctgatcatgcaattcaatcataattttgatacagtgaatgaaaatatcagtaaccataaattaatatatgacagatcacagagaaagatgcaaatacgcaaacagccataataaatcccttttctttatatatgaatttctccccaaatggaagactagtagatggagtgttcctactaaatatttggaaaatgtggctaaaaaaatagagaatatgttctatatttcaccaaaatttcaatttagacctaaaaatgctacaaaattatattctgtcattaaagagatgccataacctatggaataattttaagcttaatagtgacaattatatatgtgtataaaaaatagatttttcagtggagaactatagcagagtagcgtgtttatatagattacacgcgttagtaaacattaaaaaaaaatactcttaaattacagtgtaataagatgaattggcatctgtcctcattcaaacactcaatttcttttcaagaaaagttagaacagcactaaagaatttaatttgatgtaattaagaaactattattttcacaccaaaaaaaaaatgctaactttcctctaaactatcatccgtttcaatcctaccaaattacaacaatgtttaagcctttcccattggcctaatgtgctccattaccattacacctactttactaataagtcactttattttgctttcttttaacaaagtactagctaatcactttgtaaaagagaggaatgggtagtgggaccaaagaaccaacatttgcttccttttttcactgaatttgatgctactttggcaccaaaaatccccttactttgaaaagggtagcagataacagaaaagtaaactcatcttcctctggccctatcagtcctaaagtcatcaaaagaaagtttgttcatttgagtacaccatagagagagagaaggagagagagagagagttcatcaaagggaggttttgttgattaataatgaccctcctcaccatatgtaaagcaaaagagaaaaggctcatcagttttcacatctcacttttgacatttatcctcggattcttcaattttacaactgagcaaagggactacaatattgtattgtgtgcctaaaatgattctcaaaacaaatatggaaactgaaatagatttttgcaggtcatacaacaattctctgaacaaagaaacaaagtatagtgctttgtacatgaaaaaactatgcaacactcttgaccttaaaaatcatcattttttttttcttttttcttttctacataagcatgataattagataatcacctactaaaagtacattctctacagttaatcaaagtggtaaaacccaaaaacaaagagaaataaaaaacatcagatttataaactcaccgtgccttcttccgggacttaaacggaaaactggaaggcggcgaaggcgaaaactcgaagggcaaatgaggtggctccgcctcaccggaaagcatcccaacaatctctttcatggagggtcttttgcttggcgttctttggaggcaaagcagggcaattgtaaggcagagcaatgcctctaccttatccaatgaatgcaatgaaggatcaacaagatccaaaagcctgtcattccgagcaagctgccttgcccatgaggtcaaattagccctttcgaattccgacattggcgacgccgtcacttgtagcggtctccgccccgaaaccaatactaaaatcaaaaccccataactatagacatcacacctttctgatagctgccctcctccgccgtactccggagcaacataacaaacggttcctctcatggaaggagtactactaataccaccactcttggggatatcggagctagcccaatcttggctatttctccggccacttctcaagtcgccgcttataccatctaaccaccaatcgatactccctctgctactcttgctttttctcttctttctctcttgaagttcatcatcgtctttttgccaccatgattctccacctcccatactattcttcttcttctttttctttttcttagtgagctcttcgcaaaattcctccttccaccattcccgtggttttcgattcttctctttcttctgggctattctctcttcgtccagagatgaccaccattccaatcttttcttccgtttcttcttcttctttagttcggagtctgttgttgacgaccccagaatatccgccgagctcggagacgcgacggcccattccgctttgggtttctcttttttgatctcattcccaatccattccataacgtaatcctttactctccctgactctgaccctccgccattgttgtcttgtttccaccaccaatccctccctgaacccccttttctcctcccgttcccaaccaaatctctcccactccccatgctcgccctatcgaaaccaccctccgatgcagccccaatcctatcgaccgtcgctggcgactctgccaccgtcgtctccggcgaagcctcaggtcccgagatcctgacgatgcaactctccggcgaacgttcaattacacttaaaccctcttgatcaaacccactagttagcacactcacggtgacactctctgtctcttctaagatcgacccattatcatccccaatttccataactactcctccatttctgctcttctccttcttctcaatgacattttcttccccctcatcttcctcttccacgacaagattaccctgatcctgatcctccgtcttcaaccttgctagaccgaaatcaccgatcttagcattgaactcagaatcaagcaatacgttactgggtttaatatccccatgaatcacaggcggattacaggaatggtggaggtactcaaggcctcgagcaatgtcaaggataatgctgaaccttttcttccactccattaattccgcacatttccgatcaaacaaagcctcctggaggcttctattgggcatgagctcgtaaaccaataaaagctttcttcttcggctgtccatggagtaacccagaagagaaatcacattaggagagcagaggttcaacgacaacgacagttcgttgtggaactctctctctccttgaattgacccatgagagtccatgagcttaactgccaaggactgacctgacggaagcgtagccttgtaaaccatcccgaacccaccgtgacccaaaagattcgaagcagagaacgacccagttgctcgccggagaagggaataagaaaacctctggtgctggttagaaacgccactggtttggttgctctggtcaaagggagtagtccggttgtacgagagcttccggtaaataaacacaacgaggaaaaaaatcccgataacggtcacagttagtgtcccggcaagaacaggcaagaggactctgtggtggttgtggtggtggatggtggaaacaaccggcggcgtcatcaccgccggcaaaagaggcggatcgggacgcgatggcattttacgtaaattaaatggaaagtaaagggtaattagggaatcataactgaggagctgagcgaatatagataactgaaagagtctctctattcattcaaagcttatattattacaattagagagaagcatgagcaaactgaatttcgggtgagaaaaaaaaatcatattaattttgaaataactgcttttttttagttagggaaagggtagggtgacagtgactgtcaaattaggtagatgctaaagaaccaatgatattttgtgagggacacgtgttcatcatttgctcgatgggttatttttggaatttaacggtacggtgagttaattaattagtgaaatgtgagagtgagtgttgtccacggtgttttctgtgcgcgtgggatatacagtgaaagaagcacgttattaagccaagaaagattgctggtccactctacactggtaagataaggagatgatgacttatctaactctattcaaaacattaccaataatttaatggtagatgtatcttaattttataaattaaataagcattccttacatctattaatgccaaatatattccttcaatttaaatccaaataaaatatttaaaaccattaataattgctcacttaagaacctccctctctagcccattcatctttaattaaatacactgttttggaaacttaaaaaggaaataatgcatcttttttaagtagtgtattagtgtttcataattacagagtagcaatcgaattataggctttttttttagtatagaaataatgcgttatatgcgctatatagcttgggattcttttaataag

SEQ ID NO: 186244 - DNA, 2947 bp, Cannabis indica
ttacaatacttgcatttcgccaaaaaaaagaagggcctttaaaccagccagccacagagaaattattccttcccccctttgaattttaaaattgggtaattgtggtcatagcaatttgattctcaatcaagaaaataagcagaagcagaagcacaattgggatataaagccatggcttcagcaattctcctcgccattgttgccttgtatgtagcaagatctgcattgttcataagcatctgagccctacgacgtttgcaaactgctgattccatacacctttttgctgagatttgagctttagtaagtgaggcattctgttcatcaacactgcctatttcagacaccatggctgtacatcgttacagaaaaacaaatataattcagcaaaagctattattaaatatctaaaggaaaaaacagactaagaccatcaacttcatgccttaaaatttaaaattaccgtgaaacaaaaaactggattgtttgcctcttcctagttggcttggttgtcgtttaaaggatctcttcctgcgatatgaagtctttatggttgtcgaggctcttttcatttcattaccctgttaaaacaactatcattatagtacattcacagaaataaaattaaactagtcaaataagatgatgaacaaccgaaggataagggcgttcaaattgacacatgaatttctcaaagaaattttttgtatccatgacagaaaaattaactgtcatcagattcgaacacatggaattagtagcggtacaaaaattcaacagacactgtcagtcgaacaggaagtcactaaatataacataatccaaatcagaaatagaattttttaaaagtagatatgtaaacttgaggtaaacaattacaactagaataaaccacaactaattacactatttaacacttcagataaccacacaataattcaatgagtaaaccagccaaaataaacatgcccaaaaatcaaaaaagagagtatcagtaattgaacttgtacctgaaaaacccgaagcagtgatgatgccttattctgcttccgcttttccaaccaatattcataaacggctacaactacttctctcccacccaaattttgacataaacgaattgctaaattaatgtccgtagtgatatcaacttcgttataaaagtaggctatctctaaggtatcaaacaatgattcaaaaatatcctctgaaacaagctcaggtattccattatcactgttcaatttctttagccatgcctcatcctctaaatccatgtcataatttgcgttcttatttgccaaggctctcttgacttcattgtctctcacggagatgtatgaatttggcctgcaaaatggagcactacgtccatcccaatcaagtgagacatcttttaccccaggtataggtatattcttaaccccagtagatgacacatttctatcagaacattgcttgtaaagatccttgtagacaagccagtccattttatcaggaaactcaagcttccaagcattatccacagtccatgttatagcatgtgtgaagcggttaaaagaatttggcctcataatcttgtctgccttgagggtgaattttgttgttccatttttcttaacagcaataagccactctcctaaagacgacatttctaaactaatgtatactccttcttccctgtagcacttgtccgattcaataaccagaagatttgcagagcaggagactgcgtccgtactctttgttaatactgcttttgtagaattcaattctttcaagcttccaccagatctattatttcgaagtgaccttcgaatcttgttattggatcccacagaaggaacttgatttttcctaaagatacctaaatcagaaactaaaactccattaaaattctgtacactatttaatgaaggatttctagctcttgccctcctcagcgaactccgcctttttcgtgaaattaatccacccctgtactgagtgcttcgactagccaacttggaagctttaacagatggatgtgacaaccacctgttatcagtatgacttaattcaggtcggaaaattgcagcagattccaaaatatttgtattttcatcgtcatcagacatgctgtcatcaccatcgagaattgcatcattacgcacaaatgatggctgattgtgtctaaaaaacatgcatgaatgcatgaaaataaaacaatgcggaattgcagaaaagtccacacaaaataaaggctgaaattggatggatccaaaaatcttgcaactcgcaaaatgctcagtcgaaggatgctcctgaaagatgattacaaataaaaaaaagaaataaaattatcaccaaaaaacttattagagtaaatccagaaactaaaaaaaatatgttacaatccaactatattcccattatatattctaagaacatagatgggtgcaccaactacaaaaatatagtttaaaaaattgcaaagacatagaaaaccgtaccaaggaagtggtcatgccagatgaagtgtgaacacttcgtaaaggttcggagatgagaaactcaaaaagatcggttaatctcagtctggccctcgtcatgtaaaccaaaacagaatacaaaaaacgaacagcacaaagattcctatcaagggatgaagcaacagcaacgttaatcacctctcgtccatcagaatgaccagctaccacatctgagctcacaccacaatttagcttccttctctgtcgacgtttgaaaagacgcccaaacctgccatcacacgaaacctccgatattgctcgactctcgcaacttttcttcctctttcgggtgtacacaattccatacattttatctgtgtcgtgcactttagccaaagcagccacagaactttccttggggggcttttaggcgctcaaattcagccgctgtggggcttctcatgggcttatcattg

SEQ ID NO: 186245 - DNA, 3706 bp, Cannabis indica
gttgtgttgaaactaagccgtcggatttgcttacttttttgactggatgatgatgagcagtcctgaagcagtgtttagggatccattccggggaggaaagaacatactggtgagtggtgagagaaatgaatgaatgaatgaatgaatgaatgagaattgttgattgatttggtgaaggggtaatttggtgattttgataatgttgtgtttgatggaaaagaataggttatttgcgatgcatacacgccaggtggcgacccaattcctaccaacaaaagacacagtgctgccgagattttcagtcaccctgatgttgctgctgaggagccttggtattaataataacactttatttattgagattgctatttgttgaaatggaaatagaaatagacaagaatgaattttcatgtatgtcattcattgtttagttacattttgatagaatggttattttactattttaatagtaaggaaactattccagtattttcattctaccaactaaatgtacatattgccaaagcattcttcacaagatcaacaagtgtgtgcacctggacgactcgtcttttgtgtcttatttttcattgttataatagtttctagccaaatatatcgtaacaactacttaccgccagccttgttttggtggctgactatctaaattgtatcaaaaaccttattttggatgatgccatgattcagtaatactcctagccctcgatccttttagaccgttttgctctttaggtgttctcttacttaccccatttttgtcgtaaaaaaaaagtgacactctaaaagaaagaatttctttggcaaataactttttgtatttaggatcaagctaaaagcacaaaatatcaaacaacatttcaagggtttttttgtacagataataattattatgttttatgatgatttttagtaaatgtatttgtcagtattagtgaattatcattcttgttttgtttttacgaagaggtgaatgttaacagtcgagagaactcgttaactatataaaatgaaaagttattataacttttttcggctagaaaagtatttataactaatgtgaaggacaaaattattgtggctttatttttaataaataaatatgtatagttttgttttacagttttaacatatgcatatgcattgatatatatgttcaggtatggcattgaacaagaatacacacttcttcaaaaggacactaaatggccaattggatggccagttggtggttaccctgctcctcaggttaacttatgccattttagttttaaacatcataacataccattcttaaaatggctacaaaaactcatcatcattgtcagcataggaactaaattggtgtgttatgttttgtgtttgtgtagggaccttactactgtggtgtaggagcagacaaggcctatggccgagacatcgtcgatgcccattacaaagcttgcctctatgctggaatcgacatcagtggaatcaatgcagaagttatgcctggacaggtaaaatttgagtttagtagagcataaaagtaaccaaaatggcttttactcatttcaattttgctttacaaatggatcagtgggagtttcaagttggacctgttcttggtattgctgctggagatcaattatgggctgcgcgatacattctcgaggtatctttagcatagcatgatatgagaatgttacaaatttggactcatttttgagccaatcttatgagtatgatcacctaatattgttcatttttttataatgtggtagaggattgcagaaattgctggagttactgtctcatttgatccaaaaccaatcccggttagcttaaatctttacttgagttatgttcttataacattttctcttttcatgtcatattattacctcattggtagggtgattggaatggtgctggtgctcatactaactacaggtacttttagtttactttggtcaaacttatcatgttctttttagattctaacaaattttcttggtatgatgtatgactattttcttgatcttgttttttttttctaaataaagtaccaaatcaatgagacatgatggtgggatcgatgtgatcaagaaggctattgagaaattaggcaagcgccacaaggagcacattgcagcatatggtgaaggaaatgagaggagattgaccggtcgccacgagacggctgacatcagctcgttttcgtgggtatgtattctatagttctttgcagaaatggccttaagacaccctttacatcctgttggaaattcttgacattctagttttgacaagcttaccttaataggatccaacaaatttgtgttattttacaagtctgtcaaaagaaaaaacagaaaagttactcttttttcttcattttctttaacaaaacttgttaaaattatcagggtgtggcgaatcgtggagcatctgttcgtatcggtcgggatactgagaaagcaggaaaaggttagtttaaatgtcatcttggcctagaacttcacatgataagaaaaaagtactataaaaacaggtcaatttcaactaagtcaaaatccatcattttgatgattatgccacacaatatgggaaccataaatttgcttgttcaagattaaaaacacaatgctgctccattgaattgtaatctcttgaagttgagtcttactactctcttgattagggagcacaagtcttaaatctagttaatttgttttgtggccaatttctctttgcatattatgacaacaaacttcatcacttttttcttttgtgctcttgatttgtaacaggctacttcgaagacagaaggccatcatcgaacatggatccatacattgtcacgtccatgatcgctgagaccaccattctctggaagccatagaagtgaagctaagttttgaaggtgactcaaagtgagtaggaaatgacatatattcaaataagcctatcttttgtgggttactgttttaatgtactctttctgatttttgttatgtgtttaaacttttgatcatctcacccttgtgtttaagtactttgcttttatttggttatgattttgctattgaattctcattatgtattttgttaaaccacaagaaaaacatcaacaaaaaagggtgatattgaaataagttagtaaattacaatgcataaaattaataaataaataatgcattaagattgtcaatcacatttggccaagagtgacattatacatgcccctaagaggagtgagaaacttgcccctatttggatcttcaaattgcataccattttagagttcataaaatcagaggcaagaagatcaacaagagccatgtatattagtattccagctgatgctgctaagagaagaccttcaataattagtgatgaagagcttttctcattgtaactcttggatattccaatcccaactactatcccaattggtgtggtcagtgaaaaaaaataccaccattattgctactgttttgcacttgaaatttgcctgttcaataatataagtgaaaattatacatattatgagtttttttatatattttgtgcaaaaaaaaatgtttttttttaaaaaaaaaagtaatttaatattttgtataggaaaactattttttccatattttttaactttttttttaatttttcctactataataattttttttttaaaaaactttaaatt

SEQ ID NO: 186246 - DNA, 3274 bp, Cannabis indica
ttcttgtattgacatttgacatctaatataattcttgataaatgttttatgatattcacgatcggatgactatcggtcatttattgtttctagtgttcttcactttttatattttttattattaggattatcttgttgttatcttacaaccagatgacttagtccgtcatttggtttgctatttccactaatccagttttaaatttgtattatcaatggcaacaatctgattacaccatttgtttccttaaacagattgtggatttctgctgtggtgctaatgatttcagtgtcttgatgaagaaaaagcttgacgagacaggaaaaaagtgctcgtacaaaaactatgatttcatagaaccaaaggtaatagtttccagatcgaacattctttcattgcctttttttctggaagcagtgtacacattaaaatacccaacatgtatagttggcttcattttaggcacgaaaaggaatcgagtgcaaactaaggttattggagcttatgtttgtttgagaattttaatattatgggtgggtgccatttaaaatctaaaccaaactttggtatttcattttgacaatctctatgttggcttgtaatgatagttgccaatatatacctgacaaaattgtgaaataattgtattacctcgagaaactcaatctgcatgtttgctgaattagtcgtgtttaggtctagtaatttaactgtttggttaagaacaccgcttgaaggtgtttgatgtttttagtggtctgttaaagggatagacatgttttttttaatggttttgttttgccagaatgatttttgttttgagaagagggactggatgtctgtcaagccaaaggaattgccaactggatcaaaattggtaagagtgagattttagtttcatcagatcaaagatatttgattcctgaggtcttcaggtagaattttcactttgctttctgtgcagatcatgggattaaatcctccctttggagttagagcatgcctggcaaacaaatttattgataaggctcttgagtttaacccaaaacttcttatacttattgttccacaagaaactgaaaggtatttcttcttgttgctaatcaatccattttctgacttaaagcataattacatcaaccagagagaagggtattagttctgctttgtcacatttgtatcaggttggatgaaaaggctcaaccttatgatttggtttgggaggatgatcatctgctatcaggaaaggtggataatttcttccatttattattattgttcttttttccccaatcagctgtattgtaacctattttaatgtagaatttgagatacaataattaactatggtggctgttcattttccctttcagtcattttatctgcctggatcagctgacgttaaggacaaacaaatggaacaatggaatgtgaagcctcctctactttatctatggagccatcctgattggtccaacagacataggaaaataactgaaagtcatgttaatctttttaaacaagaagaggctgtggtagatgttcattcattgggtaaccatgatgattcaggtgaattccatgagcatgccatggctgactctggtgattatggtaatattcctaggcatgcactgggtgaccctggtgattttagagatatacttgaccatgaaatggatgaccatcagaatttcatgccaactgatgatcctgtggaaactgagaatctgaaagatgatgtaactggggtggttggaacaggaggacagaaggattactccccttcaatcagcagcgatagagaggatcgtgagaatcctgctgggaagaaagcacccaatgagaacacaaagaggcggttacagaccagaaaaaataagagaaaaagagcaagggcccaggctgatactaagagcagacatggtacagagatgcccagtagagtatctccatatacagccattaatcaacgttttgactccagcgttcctggcatgcactcccagtttggaatagcgcatgttgatcagttagatagacggtacggtaatgttagtgatgagcattctaattttcccacgagatcagctactgattatggggctaactctatcagtagaccattagatatggacactatgtacaggagggaacatactgttcgatcacagcttcagcattacggccagcaagatccggaggtccaaggaggttattatcctggaggtcaggattccagatatggtcagattggactgcacacaccatacccacctacttatggaaatcctggtccaatatctgatcctctttacagatcaaactcatcaggagcgcagtggtacgtaccacaatcagacccattgcttcactcaagaatgcacataatggggtctgagccaccactgaccatttttgatcctagagcagctcactcttatggactcccggatttccatttgggttctcacctaccctattcacaccgtcccccaggttggcccaatgattaactctccttgtttcaagtagattttcgttctgttgggtatttaacattggggtatgggtaatttggggatcaatctctatttcttgattcctgttctttaatttctcccctaaggtgagattatgatcgatcaactgcttttctgtttaatatgggataagtttcttgcttaatgaatatgactgcatgaaattgagtacatttgccactgatccattatttttcaattctgatactaaatgctacacgagtaaaaatcaccgggagtgatgtgtatatattgtactatgaggaaaattaccaagtattgtgaaaatttcaagttttgaaaatttaaaccactgttctatgaaaatcagtataagcagcctactatttctgagaagttattttatttgtctttttttatttttttttccttgtattaaaattgtttccttgtattgctttgaagtttaaattacctcttggttattgcatttctttttctttttcaggtagatgaagagtcgaccttatgatttggttttttgtttttgggggtgatgtgtctaaaagcttaattgtaattatatggatttagtgtttagtattttttttttttttggtataacacctgttaaacttatgtgttcatcaatgtaatcattctctttattttgtcccataagtaaatcgggttaactcgataattgtttagaaacatttgttaatgttttacttttagaaaatactttttgagcttaaggtagtcttta

SEQ ID NO: 186247 - DNA, 685 bp, Cannabis indica
aaggtagcaattttttgtagtgaagattgaaggaacatgaaacaacttggggagccttctcctctagaggatgccagcaaccccagggttatcatggtctttactgatgcggttgttcgtggctcgttggcttatgaagtggctttggttcttaattctgaaggagtgttcgtggatgcaatgtcgacaaaagtctcagtctcttcttccctagaagcaaaactccacggcatgttgctagccttggaaatgtgcatctctgctggttggcctgaggtttgcaccttctcgaaatgctaatttttgcttaaaacaatcgtagctggaaagggccctgtttcgcagatcaaccctgtatttgatcatctcttccaattgatttttaatcttaattatgttaagtttatttggatttcttgtattttaaaccatgtttctcattggtatggcagattgggttgcgtcccataacttttgttgttccatttctgttgagaggctgccccttttcttgggagcctagacgttcttgtttagtgttttgtttctattgaataaagcatggttttaataaaaaaaatagggtttttttttcatttttaataatttgaattgttgtgtgggttacgatctgggttgcattgataattgtgatttaaattgagttacgatttaggttgctccg

SEQ ID NO: 186248 - DNA, 7161 bp, Cannabis indica
atctaaaagtgactatgactaaaactgtttactattttttttgtatctgttacgtattaagcattgtcttcaagttggttgtattaaaaaaaagttgtacaaattaacttaaggtcctatttttactattttagagaatacatggtccattttgtcatttaacaaaacacagggtccaatctataacttttacaaaacacagggtccaaaatagtatttaccctttttaaaataactaatttaagataatttttaatatgaataaatacagaaaatataaccagttttaacatagagttatgacttttacaaaatacgaaaataatatttaccataaaattttcatacattttataacttttttttttttgatgtggaaacattttctttttatatatttggattttgtttagcctccaaccaaaatctcccgttacagacatcagagagagagtctcagccgctcaaaccctccctctatcgtactctcacccgattccaacccttcccaccttaattcttcgctcaagtacctccacggcggcgctcggccaccgtttctctcacactcaaactcaattagggcatctggaaagctatgtacaacggaataggtttacaaaccccaaggggatctggaaccaatggctacatccagagcaacaagttcttcgtcaggcctaagaccggcaaggttgccgaaaacaccagaggtttcgagggggatcagggaatggctggtgtctcaaggaaagccaacaaggatattctcgagcatgatcggaagcgtcagattgagctcaaactcgtagtgctcgaggacaaactgactgatcagggttacaccgatgctgagatcgccgagaaactcgccgaggcgaggacgactctggaggcggctgcctcttcggaagacaccggtgtattttctcttgataagaagtgagtacttttttattcaagattttctttttcatatatagttggtacttgaaacttattgattgatttttggtcaagttatcttataattatttcgcgatttgtgtacttttccatataaaaaaaaacaagatttgtatacttgtaagcatgtatttataggcggtgaaagaccaaactctgttctgttctaatgtgcagtttctagtgcaacttgaatggggttagagatgttggatttcataagtagtgatttgatttgtaaagaaagaaactataactgaagtttacccttttttttaagtgactattactgtttttgcatggtatctggtatgtgattacaagaaagatatatacagtcagttgattcctataatatttgtaatttgtgcttaatttaacacttatggctctgcaatattaattggttacttattttcttttggcttgagcagagttgcagatacccagagccatcagattgctgctagaaaggagaagcagatggaaactttaagagcggcttttggcatacgtgatgctgaacctgatgaagaagaagaaggtgagattgatgatggacttggaagtagtcagaaaaatggtatggatgatgatggtaagcaccagaaacgtgagcattctttcttggacagagattctgggtggaagaaacgcacagaagagaaaaataaatctgagaaagatgttttgaaaaagagtactaaagaatctacaagaaagaaggaagaatatagaaagaggaggcatggggatgaatcttctgatacagatgatagtgccaggaattcaagagcagttagaaagaagcatcggaaacatagcaatggtagtgatgatgaggattttgataagaagcgtttggttgcaaaaaagctcaagaaaaacagaagacatgatagtgatgattctgattctgctactagtgatgattctggttctagtagcactgatgattcagattctgctactagttatgattcctttgatactgatggcagtgcaaggaacttgaaagcagtaagaaagaagcatcgaagatctggcagaggaagtgataaagaagacaagaagtataaggttgcacagaagcacaagaaaagcagaaggaatgacagcgatgatactgattctgctactagtgatgatgatgtaagcaagaagaattctagaaagcaagctaagaaatctgaaaagtcacacaagaggcatgactcagatgatgattctagtactgatgaagatttgtcgaaagctagaagcataaagggaaaagttcatacaagaagaacagaaagacgacatgattctgaggatgagtccgaccctgctagtgggaagaaagcgatgaatgatcgagtgaaagaagagatgaatcaacatactagccacaggagacatgaagacagttttgatgttaaggatcgcaataggagggctgatggaaatggaaaaggcaatagaaggcatgatgtagatagtgaatctgacagtgaaatgaaaatgaagaatgacagaattaaagaagagacgaatcaacatggtagccgcagggggcatgaagacacttttggtggcgaggatcggaataaaaggaagaatgatcgaattgaagagcagaggagtcattatgataagtacaaaagacacaatggcgattctgatggtgaggatcgcaatagatggatggctgatggaaacaaaaatgactacagaaggcatgatgtggactctgaatctgattatgagaagtcaacaaaacctccccatggagcaactgagagaagtcagagaagtggcaagagtgatcacaagtttgataattctgatgcaagtagtgatgagaaaatacaaaaacacagaagtaggaggcatgatagtgatgatgtggaacttgattcaagatcaagatatggtaggaaaggtagtaagattgtaaggcagacaacagttgagaagaggttagtttccagtgacagtgataccagtgatgattctcttgcaaaagataatgaaagtgattttggtactggtgctcgggactatgctgataataagatccaacgaagaaaatctgttattgagagtaaggttgagtaccgtgatgatgtgagtagaagagtacaacgaacaagtccagaacatgactttagatctggtggagggctaggtgatgaaaagaggagggaaataagtggttcaagtgatgatgagtccccgaacaaaaatgttaagaaatcctcagaactggttggatccaaacgttttaatgatgaggtggctgatgagcctaggagtagaatttacaagaaggatgatgaacaacatgttggtaggacagatcaagagtttgaacaacgtggaggccagaggcatgtgaggagtgatgaggagcaaagagtgagaaagcatggaagagatgaagatgattataaatatagaaggtatgaacgagggaatgacgatgaataccatggaaatcgaagctacagaagggatgaagaacagaaacataaagacattgaccgggataggcagagcgactattccaaaagaccaagatatgatgattccaggtcaagtgaaagaagaaggcatgattatgaaagacgcaaagatgacatggcaaggcgctgagattgattctattttcttacaactgcacagtatgggtacgtgacttttgtgttaataattgctagatttttattatttgttgcatatatctggtggtagtgtactaactagtattctggcttcacttttctctaggcttccaagattaaaatgattaattgctgattgactaattcgtaagcatgaaagtattggttgaggtctgaaattgtagcctctgactttatttatataatatatataaaaagaaaagtgtattgtttgaggttctttggtctaaaaggtaatattttgtttcagtctttgtcatcccaaagctgttgagagttctcgtgaagattgaaagagaagatcatctgctgaactgatgttttttcgtatttggggcatatggacgtttttctgttgtgggatcatgtaactctattgtatttacacagtcgcaatttgtgatgtgtgttttttttctcttttataaatgttgtcacctcaagattgagctttctaagtattttagtattttcgagaaagtaaacttttgaattttgattagtttaaaaagtgtctattggcactttttttcctttctctcttcaatctttttataattaaatccaacatgaaagaaatttaaagttaaaactgaaaaacacacccttcttaaatttgtatactttttttttaattatttatttattaatcaaaatattttatattttattaaaatgtaaatgtaaccacttttataagtgaattgcccaatatatattcactttccaaagtaaaaataaaaaattgtaaaataaattgggtatacaataagataaaaactgtaaagaccacagaggcatgttcttgtttccatttttccttttagaaagcttgtatgagcgcctgaatatgccatatattcagctgaattgagtagtaactagcaagtccccaaatacccggaaaaaaaatctaaaaaaaagaaaggacccaactgcaattatatctagaagatcattgttgagaggctgaaccatctatgatcaatgtttttgaataactctaagcttcgcactcctactccggcgatttagtttttcctcctcttcagaaggtgttattggtctctttgttagaattgttcctttagacccgtgtatcatttgtttgatccatgcttctttctcatcaatctcaattctggtgtttccaccatccttttccatctctccatatacgttatcaatgccaatgatgtcaagaaatgtctgtttcactattctgtcctccaaactgtggaaagatattacagctattctccccccgggcgcaaggcaatcaaaacaagcatagagtgaatcttctagtgttttcagttcgtcgtttacagctatccttaaagcttggaacaccctcgttgctgtcttaatccaaccttgcctgcctcctgaaaaaaagttcaaagtgtgtttttttaactatcttatttagtaaatcatcattaatatgcatagtaattgtgaaaaaaaaaagagaggattgcaggagaaattcgagtaaacatacctctactcccagaagttgaatttcgaataagacctacgagttcactagtagaatgcaatccaccacgtgatcgagctttcacaattttattctgaagagagtaccaattactttcttccccataatcccgcaagattctccccacttcagcatctggccaggaatttaaaatatcttctgctttcagacttgcctgtcataggcctgctccaatcagtaaaaatgaaacaaaaacttaaaatgattctacagagggttgagaaaggctacaggaatcatggtttgtccaaaaacttccattcgccacgcgaatatagataggattacacaaaaatgagggaacaagaatactagtgtgctaagaaagtggtcttgggtagtcttggttgctcctacatgaactagtgaaacaaatatgtctcttaatccacacccggtgggagaaaatgaaggcgaactataatagcattcatcacggtgtcatgtcttcatcccacttttttaaaaacaacatatttgtttgattactcatctccaatccatctcaattttctttttcaaactacaagaacttgggtttaatatttaccaaatcaacatcaccgtcgaaaaaaaagcaatcaaatttaggcccttaataagaaaaaagtgttatattaactgaaacattaaaatccaaaagatggatagcaacatacctgaggatccatccgcatgtcaagaggtccatcaccaagaacgctgaaccctctttcaggattgttaacctgaagaacacaacgatacaacatcaccataaaataatatcaggaaaatcatgtttcacatactaaggaagttttatcacaagcaaacctgcatagatgacattcccaaatccattaatatgccatcaacaccagagtccaagagattctcatcatcaacctcactaagcacggatttgatgtatctaaaattcttcaaaaatgtatatgttttcagctcagctgggatgctagaatcactttgcaagagggcattgattcgagctacagccttctcgcgtgccaggggatcaatatccattccaacataatatctcatttcaggatgggcttgaattatctaataataatacacagaaaagaaaaaaaccaatctttagacatgaaattcaggaaccatgcacaatcaaattacacaaaccatgaaacccataacaaaaatagttaatctaaactaagctaaagcttcatacaattattcttaagaattatacacaaaaaaaaaaccaatctttagacacgaattcaggaaccatgcacaatcaaatacacaaaccatgaaacccataacaaaaatagagaatttaaactaagctaaaacttcatacaattattcttaagaattatacacaaaagctgagctagttaaaaataaaaaaaaaaccaaatctttagacatgaaatacatgaaccgtgaacaatcaaattacacaaaccatgaaacccataacaaaaatagtgaatttaaactaagctaaagcttcatacaattattcttaagaatatacacaaaagctgagctagttaagaaaaagaagggaaagaaaaggtagtaaggaaatgaattacagacagcagaggagtgaccagcagctccaacagtgcaatccacaaaggagcgaagcgacatcgttttggaagcagagaaaacgtcaaccacttctccgagcataactgggatatggttggctgtgtctccaaagcgctgaaccgcatccaattcaaactctcggtcggaacgcgtcctcctcttctccttgacaagtgcttctttagacttggccatagctttcaaatcttcgagttttttcttcttactcttgacggaggtactaatgcccgaaaaggggattttttgtggggtgatcgccccaagacgagaggttgcggcaaaggtagcaacggagaagagcttggccgccgacattgacgccaccactctcatttttacttt

SEQ ID NO: 186249 - DNA, 5182 bp, Cannabis indica
tgatagtgattgttctttttgtatttgtgtaaatgtgagttggttgaacagtgcgtcggagattaataaaggagatgagattgcgttggtatgcagagtgggagtaatacagtgaggaatgagtataatccttctattgcttatggatttggttagttcttttcttatgctagaatatattaatttattgggttttgattagacagtcagataagtcgtttactttttttgtttttttttttttcttcaattactgagaattgggagtggtgcagataaggtgtttggtccagctacaacaactcgccatgtttatgatgttgctgctcagcaagttgtttgtggtgccatggaaggggttaatggtaacttttatttaattttactaatgtgaatccggttttcgtgtgggctataatgtttcctttcccacataaaatctggttatgttatgctacttaagttcatacataacatacaaacatatgaaaatgatttcaacttggtgatttgctatttatgcaggtactgtatttgcatatggtgttaccagtagtgggaagactcacactatgcatgtaagtgactgagatcatcttatttgtggtttttttttcctttctgtgtgcatcgatgttggttcttcttttttcttgccctgtttttattgaacaaggaatgattaggactatgataacaaagattaaatatcttgtcttgttattcagggagaacaaaagtcacctggtgtcattccattagcagtgaaggatgtttttggaatcatacaagaggtaggggattaatttatcggttacttctcgttttatgtttcattgattgaataacatttttcttattttcagactcctgggcgagagtttcttcttcgtgtttcatatttggaaatttacaatgaggtcagtctttcctaactttgttatgatcatcattgtgatgacttggggctttatgtttgttacaagaatttggtttggttttggattaaaatgcttgagtttatacagaagctatagtgaaagaatgtgaagctggttttaatcaatgtttacttgtttcaaattcgtgtatcattccacttttttgttgacatttttttccagtacttaagttgcgttgaatctatagttatactaaactgatatgttttccttccttggttcacttgttatgttcaggtcattaacgatttgcttgatcctactggacaaaatctccgaattcgagaagatgctcaggtgcttattattattattttctttaacaggacatagtgcaaaaatattttatgtatgtctataagtattgtgacattaattttttgatgtagttttccattatttgctcagactgttatataagttctaccatgttcatggattgttgatttgctgtcatttactttggttacaaactttattttcattttatgacctgcatcatcttaatgtctaatttcaagttcggtatttccaatttctaattcatatactgttaatctttcggtagggtacttatgttgaaggaataaaagaagaggttgttctttcaccagctcatgccctatcacttatagcaactggagaaggtatgccaccttttagtttttattttattttattgttgttatctttataaaacagaatattctttatttttaaagtttggcaacatattatgcattgaaatttgtctgaaacacatttataatgtgttcgaatacgaacttgatttttattttcctttctttctcgactgttgtcacatttctcaacatccctttgtttgtaatattagttcttttagattttgttttggtgtgtctgtcactatctgtatgcaaccttttttaacattttttatcactcccatttatgtgcagagcacaggcatgtgggttctaataacttcaatctgctaagtagtcggagccacactatattcaccttggtaatcatgtttaaattataatgaaaaacctgggcttcgtggataagaatttctttaatagcttcttgttgttatatgctttatttatgtattctttattaagaaaatggtttagtttttagttttttcttttagttcctttagaatgtgccatatttaattgtttttattaattagaacatcgtggtagctattattttagtacattgtgcaacagctatggttgaacaatagaatttgttctgaaccaaaaagataactgaagacacatagatgaagcagttagagcattttgacactttgggaatttggagagatgaatattcttctaaatacccaaccacctagtaaaataactttttaaagtaatcatcatatttatatgtaccaaaatctacccttagaagccatgtgaactttcttggtctgaagaacttactgtaaatacttggccactaacttagtaaaatagccatttattttatcctcactttcacatacatgaatctaccttcagaagcccatgtgagactcgagctcttggtctgaacagcttgttttggcctcaaagatttaatatgaatatgccctttgcaactagattttctccagtatgtattttgctttatgttgcctgctgctttttgtgcaaacctcttgggttgatgattgtcatgatatgcacctttttttttcctttaagctggtgatgtcttttgtacattatttttaaatttaactattttcattccaaagccttgatttagtgtggtttttggcttgattatattttgttgtatcaaggcactagatcttgtatgctaaattcatattttatcttgcagactgttgaaagcagtccacgtggggaaaatcacaatgaagaagatgtgacgttgtcccaattggtaaatttcatttgcctttctacttgaaagcataatatactaatagcagcagcagcaataacaatataattgttgttgtattgctgttatattgttatcatatatgatattactttagttctgaaattttcattgggttacccaagttctattctaatttggattgtcgttgcagcacttaattgatcttgcaggttctgaaagttctaaaactgaaacaactggattgcgtagaaaggaaggttcatacatcaacaaaagtttactgacacttggaactgtaagatcaatatctctctgtagattggtagcctaactacatctttcttcataattagccttcatgttcatccttaaaatatgctggattgtttgcttgattctgatgttaatcctctctgggtaggcttaggtagtagtaattgcaatatgttgggccatatggctggaaaggaatagaaggatttagaagaaattgaggttaattgggggaggggagtttatgaaattttagctgttcttctttgggtcattgtcattgattcacttgtttacaggtgatctccaaactaactgatggtaaagcaacccatattccatatcgagattcaaagctcacccgtctactgcagtcttcccttagtggtcatggacggatttctgtaagttcattgccatatttcatattgtcttgtcttcttattcatcactgtaggggctttcttcaactgtcttaggtttctggctagataattgtattgcttatttgggagaatgtattgttgtcattgtagcttatttgcactgtgactcccgcctctagcaatactgaggagacacacaacacattgaagtttgcacatcgtagcaaacatgtagaaataaaggcttctcaaaataaggtgaatgtcaggttttttatgttcttggtaacttgttttggcaatttgctctgagactgttaactcattttctcattcttttatgttccccctacagattattgatgagaagtctctcattaaaaagtatcaaagagaaatttccagcttaaaggaggagcttcagcaattaagacgtggcatgatggaaaatccaaataatgcgggatctactcaagaagatctggttactttgaagcttcaggtttgtgggatctactatgataactcctttagaattattagccgatatatctaaagatagtacaagttccaaggtgtcttaatattagtagaaatattcagtcctacaattttattttgctacccccttgaagaagtatttggtatgctttgtggacttttccccccgctaattgttctcttttatgttggcgaagctggaagctggtcagtctaaactaaagtcaagactggaagaagaggaagaagccaaggcagctctaatgggaagaattcagcgactgactaaactgatattagtttcaacaaagaatgtaatcccagcaagtatatctgagcggcctggccatagacggagacattcatttggggaagatgaggtatgtgatagtttatccagcagttaagaactttgcttatgagtttgcaacacattcagagtcctaaattagtagcttcatcttgagacatacagctgatcctttcacaatgcagctggcatatttaccagataaaaagcgagactacgcagtagatgatgatgctggaagctatgggtctgagattcctttggaagtgagagatgaagtgactagtttagatgagttggtcaaagattacagaaggaacaaaaagcgtgggatgcttagctggtttaaacttaaagtacctacttttactctaatatatttgtttagggctgattatacttaatgtgcttattgttaatggtttgaacttgctacttaccggtatcatatcatgcattggcaattagattaattttttggcaagtaatatatataccctgattaatctcaaatattatgtatagaaacccgaaaatacgattggattatcatcaacagctgatagtgagagctcagctagtgggtcacctgcatcttgctctaaatcttcccagagagtaatgtttagtgatatgaaagatggaaaaagaaaatcagtcagtaacaagggagatgatcctaccgttgttgactcgttgccaggaaagacacaggcaggtgacttgtttagtgcagcaagcggtggtcgttgtcttcctccggtaagttaaattctgtatgctattttcggtgctatggatattctctagaaggaatacaagcaagaacttaaatccattggttaata

SEQ ID NO: 186250 - DNA, 3952 bp, Cannabis indica
ttttttttctgttacattggaatggtcattcctttctttttaaaatgaaatagtcattccaccaaaatagtgaaaagagcattccattggaatgccattccaatactttaaaatgcaaccaaacaaggaatggaataaaaattgtttcctttccattccatttcattacctccaaccaatcgccacctataatacatcaaaacctccaagcctcctaacccttaattttattgaatcaatcacaacattacgagcaaaaaaatgtcacaaaactaaactcatgaatccttcatactaactaatgtctacacactacactaattattcttcgctttttagcgggtagaacttaccccctattcctctctctctggtataaaagactagaaatgactctctagctggcacactatcttcaaaaggaaacgtgaatatttaagcttaatacatacatgtgaaggttcttacagattggttttattagagaatgcacttgtgcacttattcattatgtgcacattaacttatataacaatgggttagaagttttggctagttagcaaggaccaacaatatagtagccaatgaaatgggtaagagcgaatccgtgtagtttttgtacagaatgctactatctgagaacaacaaccgtgattagtccagtctgcataaatctataatctgtctctcaatgttttcatcaattaaaattttatctaaatgtctaatggaaaagtttccataaattctattttttttttcactctacaacagagacagaacctcagccagtaagaatggtgaatgaatctcttatttctgattcacaactcgcaagtgtcaagcaagcctccaaaagctgggttattagagtcttccaccatattaaaaatggaagaaacttaaggaagtctagtgaaaccagtattattgagaaaaccgacgacctatcgacgtccatgtccccaatgtcgattatggttaccaggtttaaagagtggatttctgtgcacaattccctgcttagggagatcatgcaattccataacctgtatcgtccgttgcctcttggctgtcaaacagggagaattatgatccatgagatgaattcatttgtactggaagaagtttctattcaaaacatatgttacttattttgagaattagtacataaaagagacgtaccattctcagcttgttgataccgctcctggagtttccttttagtggcttcaagtttcacatcttcatcagaagacttgaatttctagtagataaagaaaaaaaatcaaaagaaagttgaaatgtatactttaatgcatattcctcttaattgaacttacatcttgtgaagcaataaccggtggcctcttctgaagagtaggcttatcagttcttttctggaacttcaagtcgttgctgtccttgtgctcattacaaatgtttggaggtctcccaggtccagattcagtgtttaaaggtctagttggtttggtgaccatttcttgtttcttcatttgttggtttttattttccacacgaagcacatttagctctgaaggaaatttctgctttcgctttggaacatttttattctccatggatgactttcttccgttctcacggtccttgttgaattccccactggtcctaggatctgaaacaacattccccaaatttagttataaatctaggtagtggggaattcaaataccgaacaacaaaatctatcaaatacaggcagaaaattgcaacgttaactcacttccatcatcatccatgccgtcgaagaacttcatttgttgcaataagtagacccaagaattaaagttagtttacaatataaacagaaagaaaacatgttgtcaattgaaaaggcaaattaaagagcaccattacccctgatagttccattgcagatggttgagcagcaaagaaaaatcctacatccaaaggaggagatgggagcccttcttcttcttcatcatcaacaacggatggatttacagaatctggggtaccttctgtgcctgaaaacgcattaataaaatcatgatgattaactagactcaattgagattaaatcagaattggatgcattgttgatagacaaaaagaatacatacagttctggtttgtaatagctgcagcagcactaacccattcatcaaccatgcctttccatacactgcaatcattaaagttgggctaagctaatcttcattgcaatcttacaagcatgttaacatagtagaagcaagcaaaaacgtagacaatgaaaattaaaacttaatctccagctgtagacaatgaaaataacactgaaagcagttcaggaagccaaaggttattgatgcatactcaataagagttcgtgcaagaaggcaaatatcctttgatgtgtgctttcgaagaccattaaccgcctttccaatctcagttgcctggcaaacaagaactctatcaagccaaaaaaactttagagagcaaaccaactaaaaagccactcagtgaccatcccagatttagatattaagtatctaagacaaactgtaagaagattgagtcagaccttcaaagtatccacagttagacacattaattgaagcttcctcaaagaatcgtacagcactgattcagactgcacaacaagaatcagatcatcaaaagtgacgaatcagattacaaataatcagcaacattctcataggacctaattaaaccaatataatctcccaacacagcagaagaatccttaaaattagactaaacaaatgaagccccattttaggaacactacaaaattcagtaatggaaagatcaatggacaaaacccttttaagatatcacatcacacaaacaacaggacaagaatagatagatgtgaaactttgataaacataaaacttgggcaatttatagaggatgtgtaagcaaatatatacctcttctttacaattctgaagaatctctttgatcctaaatacttcctcaacaatttgggactcttcttcaatctcatcagtcaatgcctcagcatctccatagctgaaattgctaacttggttcctattcatctcagcttgatcatctctagtgctattcaccttgctctctttactagctccagcctcaaattcacctccatttctatcaaaatcactcttaaaacctccatcatcggagtcatcaccttcatcaccaccaggcacagctaactctacgtggtcacagccagaacaccttgttaatctacaactgaacaacctctcagcaattcgatctctcctcaatctaaactctttcgggcaatccgaagcggccaccatgatcgcatggtcaattatatcaaaaatatcagaattcgcagtcctgaagtaattcctccaatattctagagaccctgactttctggccatggttggccgctccacaaatgaaatccgggaaccagaatcgacaaaatctgcttctaatcaacacccagacatcaaaaattggtttccatcggattttaatgaaacacagatgagaaagagatttctcatataattttgatcaatacccagaattcaaagaccggactttgtaagttttgaagccaaaaatataggaccaagaatcgattcccacgtaactttgataaagacacagaataggaaaaaaaaaaaaatagattttggtacaaacttgaaattcggcacagaatatcaataatcaaaacctgatatggttgatttctttttctttactttttttttaaaaaaaattatattggaagaagaacacgcctgtgatggtaacgaaatggaatacacgtaacaggatttaggataagtagaaaagcacaaaaacgttgaaaccaataatggattttgaagaagatgatcggttcagcccaaaatttcctgagaaaggaaaagaaaaaactggaaaaccaaaaccaaaaaaa

SEQ ID NO: 186251 - DNA, 878 bp, Cannabis indica
caaatacgattaatgtagaagaccaatacagctttaagagtcatccagaaaaccaacaatactatgataaggaacttttttgttaaaagctttctagaaaaatcttcttgttgacaatgtacaaaaaattagtgttcaatttcagattaaacatgcttagagcactcaaaataacttctctaacatgaagaaactttaaaaaatttaaagaaagcatactaaaaatatgttacagcagatgctccaaaatctttctttattttaaagtttctttaaaatttattatacacgctttacatttatagaatactattgattgctctaaacatattttattaattgttttaactattaataattatttttgtattgggatatatgtatatattaatattatatatttgaaatgaataaaacataataaaattttaaaaaagtagggttttggtggtttaattaaagaagatgatgtatggtgcaatgtaaaagtgctcgtagagttttagtgatgtattttaaaggataaagtagaaaaactgttgggagtgttcttaccaagcacaaaaagttgtggaaactctccaggagttagatgcgccaatgcaaaaacagctgcactaataagaacagcaactggtgtaggtaccctgtgtggggaaaattaaaggatattacttaatgcgtcgcaaatattaaaaactacaacccaatttaaccaaagtggctcctagcttttctagagcaattacaaagcgactggcacaggtacataatttatgggaatgatgtgttacgaggacttattatacttgttgaatacagtacaaatacaataatggaaaattaactttctgttttcaatctataatagtttgtct

SEQ ID NO: 186252 - DNA, 6475 bp, Cannabis indica
gaaattaaatcattttattaaatttggaaaagacattagtaactaattactatttttttagtcattactcactaggtaactggttacttgttggccaactctattccaatttgaaatcaaataaaatatgagatacatcaacaacattagtagcaaaagatcacccgaaaaaggctaagatcttatttactaacacatattttattaattaacttaaatattgaactacttagaacatactttctaaaagagaattaaacacattaagtataagaatacttacaacagcgacacaacgaaataatgactcttcttgttcaatactctgaccctcaaatcttctctatagcagaatattaccaaataccaaatactgaatctaaatcttcaaatctctgaatctttacagtttccatcagtgctatgggtatcacacataacaagtgagtaatttctcattaataagaacaataaaagccaaaatatcctagagagaaaattttcaaaatttcctatataagaaagcttaataggttaaatgttataataataataataattaatatatgattatctatattcatatggatattgggtaggaatcataggattaactcatattcataggagttgtttaccaaaacaaaggctctatctctatgttgtcttgccttttgacatgtattttgatattttctctttaaaagtattggttggtttttttgagtttttgtttttctaagggtgtttgtgttggcttcttttcgattatgcctagtagtataatgggagataatttggagactcgatatgcgaatatagaactagaagaggagaaaggtggcatgaagtttgatcacattgaaacaaaggaaacatttattgacgatcgttggtacttggtacgtaggacgatttctgaatgctcactctattgattttaatgttatgagacacaccatggttggtctttagaaacatggcaaaagaattagcattaaagattaaacacaaatgaaaagatcgtgcagcgactttaggattcatctcaaagattatagactctttatttatttcttcaatctatctctataccatatttttagaactctcaatattttagcttataatattacaagagatgccttaagacaagatagaaagttaatttggagagcttaactctctttactctattgtaattgtaaccttgtaactgttatccctgccttctagttacaactacttctaaaaaagccaacattacataaacaaaacataacgtaacaccataaaaaattaaaatatgaaagaaaactattttaaaaagacaccaatggtaaaagagctaatggaaaaacataattaataatttaaagtattaattaaatagggacacgattttgttccgttaatgtattttcatggaatatatttcgtaatgtacggcaaccgttagatgggtagttatttgatctgagggctatgattgatttggagtaattagggttaaaaataataacataccctgggacacattattacgtacctgctgtacaacgcaattcatttcgtatattacaattcttggtacaaaattggctgcctaattaaatactaaaacttattgaaagataattaattagaaaaaagataaactaaatcaaatagtaataaataatcatgaatgatttgaaacatcctaaaaatgaataaaataataaaagaaaaattaaagttgaccaaaataaagtaatagattaaaatttacataaaataataataataattaaaagaatagtttaagtataaaataattatatgataatttatcgaaagtaaagtttcgaacttttacatgtactaaatcatgtcagctgttaaatttttttttaaattattgagattgttcaattcaagaatttttgtttcaatttttagtaacagaagcctaacatagataaaaatttaagggagtaaaaattaacataatttggtaaaaaaatttgaatccaacaatcttaatagtttgagagaatttttaatggtctgaaaagttcatggtccaaaaatcctaaataattaccctatttaaaatgactaatttgaagtagttattagacatgggaggtagaaaagatattttaaaaactggagggtcgaaaagataataagaaaagattcgagggttagaaatgttattttctataaaagaaccgccttggaaaaaaagatattctattaccctatatattcatgtgttacaactttgagaacgcgtaatcgtatcgagaagaagcttcagcaccagaagccgtttcgtctcaaaatctctctcggttctttaattctctttctcgacggtaaggcctttctttacctttgagaatattcaggaagatctgcacaaatcgacgtctagggtttggcttctcgatttgttttttttttgcttgatcttcgatttgtggttggttttaatttttacttgattgatcgatctatattttccataatccaatcttgtgttcggtattacatgttatctgtgtgctgattcaagaaaaaaaaaaagtgttaaattctggataattgatttggggtttagggtttcgaagaaatttggggatttttttttttctttttcaaaattgtgttgagaattttgtggtgttcggtaatatggcgacaggaggagttgatctattgagaagaagggattttcgcagttctgaaaaagagtttaatcatggaaatgatggttcgcttgttgcgagtcgagttcgtggttatcgctgtaggcgtgagaatggttctgtttcgggttctagacgtagtgggttttgtggtagggaggcgtggactaatagtggtgaagcctcaaaggttgaagatgtagatgtagttcaggtccctcctgagaataaaagaaaaatttcccctatcatatgggatagagaggaggataggaaagtttcttttaagaaaagagtcctaccagctactcctggacatgagagtgtggttaaatcagtttgccaagtatccgaagttgtttcaaaatgcgaggcttctgaaatagacaagaaggtggagctctcaacacaggttgaggctgccgcagctgatgatttggtggaaccttttctgcccaagatctcaggtggtttttcttctgaagaattgattcatcagtatggaggtgttcaccagcaagatcaagtgaaggaagatgttaaaattgagactcgaaacattttaacatcgaggtgggcatctgaaggagattctccgcagcatgtttctgatgatgtttggaatgctgataggaggaggagctcaacccctgaaagtggggagtttcaaagagaagactcagcagggtataggtctgcaatttcttgctcagatgatgaagatggtttccatattggatctggaagtggcagtaggtgttctggtagtggaagtagaagcagatcttctaaaagagagccatctttggattttatggatggttatgacagtagggatgccagaacaaaccaggtttattgtggtgaagaggatgatgatgaacttttacatattgaagaacctgcagcatctaccagtcaccgtgttaacatgctccagggttgcagaagtgtgtttgagtatgaaaaacttaacaaaattaatgaaggaacatatggtattgtgtataaagccaaagataagaaaagtggagaaatcgtggctttaaagaaggtgaagatggatgtaaacaaggatgatgggtttcctttgtcatctttgagggaaatcaacattctttcatcgtttagtcatccttcaattgtcaatgtgaaggaagttgtgatggatgatgatgatggagtttatatggctatggagtatatggaatatgacctcaaggggctaatggagactatgaaagagccattcagtgttagcgaagttaaatcgttgatgctccaactgctagagggtgtgaaatatcttcatgacaattgggtgcttcaccgagatcttaaaacatcaaatattcttatcaataaggatggtgagttgaagatatgcgactttgggttatcacggcagtatggtagtccacgaaagccgtatactcctttagtagtgactctgtggtacaggtgagctgcaggctattattgttttgtacagttttaagttcagtttatgagtgcaaagctgactgtgatttttcttttcagggctcctgagcttcttcttggaaccaaagaatactcgacagctattgatatgtggtcagttgggtgtataatggctgagttggtagctaaggaacccctatttagagggaaaactgaggtcgagcagattgataaggtattttggttcagttttacttgctgtttttcaattacttcatttgattttatgttcttagcttcatgttcaataggcacttgctgattttaatagttggaatctttgcagattttcaggactcttggcacaccaaatgagacaatttggcctgggttttccaagttgccgggttccaaagccaaatttgttaaaaatccgtaagtaatttacattaaaaaaaattaattgggttcgtcaatgttataatttttacatataataattgctatcggtaataactttcattgaaaatgtttcaggtacaacctattgcgtaggaaatttcctgccacatctttcataggttctccagttcttactgattctggatttgacttgttgagcaaacttctagcctatgaccccgagaaggtaatgttattttctcaagtgtttttttttatctctgagcagctttttggtcatgaatcttattttagtcattatcctcgtctttgcagcgaataacagcggaggaggcactaaatcacagatggtttgttgaggctcctctccccagatctgatttcaagccttctcttccagtgctacagggtaaaaacaggtacccaggcagcaggctgcgtgaaaaattttcacatctataatcctgacaaaaagggatcttctaatttttattttttatttgaaaaagaccaaatatttgactggtcacttgagaagaactaacaggcatctagatacatagcaacaagcaacaaaaggggtaatggtaatgcaaggattttatatttgttttgattatcttattcagtcgatctgcagtttttttaaactgtgagtgtcagtgccacgaagcagtccacagttgtagcagttgctccatgtgaatgtttggaacaatttactcaggtggaatgatagttattgatattttattttcaaaatgtataatattttctcttgtaaagttcttgactatgaaagtaatgaagattatgaattttactgcatctattcatgcaatttgttctttctgttgcatattcgcactttattcgcaagtgattgcgggcccttaaagcaggggtgcattactgatgatggaaacggttacaccactctactcttctaaggtatttcactatgtagtgtattatatatcatatcatactacttcattagaaaatttatgttaagactgttgattatttttcaggatttgaactctctacataagggtaacattggtaattctgcatatttctctacataaaatagatttgattatacaggaagaatatattaaaacacatttttattttgcatagctagttgaaatgcagtcttgctgttgaattcttcattgctcgcaaggtattgaagttcatgaatattgaagataatgtgttgagtataaaatggggtgaggtatttaatttttttgttttgtctctagatttttgctctttctaatataattttcttcatgttcttcatgatatggtaaacaagggttgcgttttaagaaattgttcatgaggtatatcgtgcgttactctcagtctgtccactttgattttttttttagccatctaatgtaatgtaatgatgtagaagaagattctaatgatacgtctgtttttttttcttcgagggtatatatctattgtatttaattgggatgcaaatggggtagtcagtgttatttttgtatatttttttagtaagaaataaaatcagatctgacttgctttttagctgggtaatttatgtgtactcctaccaacctctctttcctattttttctatttttaaaatatattatcatactttttattcatcagctgagatataaagaaaaataattaaaatgttcagaaatgctgtactatttcgtagtaaagattctgtaatagcatgactttagagcacttgaagggattttaatcctcatattttagccgactatgataaggaaaattgtaagtaaagaaagttaaaaatgaaaataaatatgttctcatatttggttactaaagagaaattgtattgaaaagaatttattcaacatgaaaaattgagtttttttttttta

SEQ ID NO: 186253 - DNA, 6497 bp, Cannabis indica
tttttgcatcaaaccaacttgtgctaagtattaaacccttctcaagcttgttgcaaagtcacttttattgttgttccgtatgagataaactttcatatgaagataaattcataaaaattatgggaattaccatatttttgtgtgtgttttgtgggaaagaataataaataaaaaaaaaaagtaaggcaccaagattttcaaaaataaccttcgttctgtcagaggtcaagtttagtcgagctgaaatcttgtagtaggaaccgtctgaactaaatgcttttacatcaacccgttccttcaagtaaaattcaatttcaatgatcattaacattagaaaaatttaggtaacaattatttccttttctccccttaaagttcaagcagggaaagaaagcggaacaaagaaacgttaataaacagtataaatcttgcacaccttcttttctatctcaagaagagatatcccaggactgaaaaattcggaattacgcatagcaacagcaatgccaacccttgcggacacaagtgaatctttttgtgattgaaaaagcataaccccactgcgtccagcattatcttgtggagaaagcatgcaaggaaaaggactagtttcctcaattacttcaagcacttgaatgtttcttctttgaacagaatgcttcctttccaacgagtttgtaggacttttcaatgccatcttagcagatttgactgctctagaaagtatttgggaatccatttctgcactgtccaatggctctacttccaccactcggtatgccaaagggagagatgaattattaactatccagtatggaacaaaaaaccttattgttttaggtgcagcagtagttcctcccatatcgtgctcaattcttacacgcagtctcctgcaaattgtgatattttcaagatgaagatcaaccaacagaaaataataatgataataaatcttggttcctttttttttttttaaaaaacttgacagaggccattgtcttagactggcccctacccgttatatattgaaagccctcacttgtggcggaaatcttgattaatttttttagacatgttgttaacaaataatcaatgtaagtggctgtgagatctagaaatcacaatagaatgctgaagaccagtggcacaaagctcaaaagccctgtggaaaaataagaattctcatgtttggattgaaacatccaattcagaattctttttcattttcttttttttttttaaatttaaattttgagcaattatatatatgtagatatattttataaatatgtaaatatgtacaataattatgctaaaaaaaagtctcctaccaaatttgtggagaacatgtttccattttttttttgctactatttttcgacataaattttttccatgctaaaatctaagatccaaacaagaccaaaaggaacaaaaaacaaagggcctttgggaatcacaaaccgtttactctgtctctgaaccatccagaacgatgaggcgtgatcattggaagaaatgttcaaaacaagaacagggtcctaaatacacagaaagcattatttacacactggaaattttttcctcgaagagggaatagaattacttgcatgttcttaccttctccatagaccaaccaccctgaatgaataatgttagatagatgggtttctggatgtcagcagaatatacaggtacagttccccgtgaagagataactccacgctgtctctcaatgcaatttccttctttaattttctcccaaattgtgtattcaactggacatggaaatcgattttcaaacttcaaaggagcattgacagaaattcgccaatcataaacaggtgcattcagttcagtacgaagaacagatgcatctgttccaacactcagccaaaaatgttttctctcagcactagaacacaaaagtacatccttcttctcaagtttatttaacgtgaaattaaaattagacatcttattttcttgctttgatgcatattgtctggaaagtgaaacttgctccacaagagcctgatcctttccacatgcataaccagaaccaacagtaactgcatcaccccaagtgtacggagtctgggaattatcaatagaaggacgaatttgtagacattggttggaatcccggaaagtgcttctccaaggtaaaactacagaagctccaggatgtacaataggaaagtcgttaataatttgctgccgtgtgcgaatccaacgccgtcggcgcacaagatcagaagatgatcttgtgcatgacttcgaagaagttggaggccacctcaaagtgtgaaaatctggagcatacgcccaaccatctttgtcaacaaattgagacttctcaatactccatgtcgaactccatcgccatccagggggaagcggaggttcagagaaatcctaacagaaaagtaaagcccaagaaatgtgaaggaagcaacaaaccgaagcaaaagaaaactcaactaagaaataaccactgtatcaataccttcgaggaattcgagaagtctcgactgctccaaggccctggctcaacactgccaaggccagaccagttgttaccccaaccagtacttgattgatagcgttgattttgaaaaatttcttctgccactaaattgttacctgttcctgagttgggagatgaacttattgaaaaatccaatttaacatccgactcattgactaatgttgcaagacttctaaatattgcgtgtttcttgccatttttcatgacgacttccatggcaataaaatccttctgtaatgatttcgggacaacggacaatggaagcaatgagcgaatactctcccagttaccctgaggacccagaccaacccagaaaccaacatctctctccaaaacagtatcagtttccatatctttttgaatttttggagttgttttcctctcaaaacatgtagtagaaaccatcaagcatccacagtcaagaatttcatccaggctgttttgctgaacctgcaaaacacaacattaaattgcgtgagctaaattttattatcagcaaatgcatgccagtcacggacaaaaagaacatttgtaatattgatttacaatgagcaagcagaatttattttatttttcttaaaaaaaaagaaagaaaaatcacctttcttttcagtggatgtgatacgaggttttgagcttcatgagcttgatggaacatccttacagaagctaccttcctcaacatgagtgcaccatgccccacaggaaatgagagtgcaccaacaacttcccctgtatgcgtagaaccaaagaaagagaatgattcaatcaaaagtaaagaaaaggaagggaagtatgctgtgccaagtttacaactagaggaaaacaacttcaaatgaaaaataaattttgtaggtacaacatggcaaatattatagcagatcagagagcatgaagcaaattggagttgtaatctggctccaacagtatgtggatgtacacaaggtagcacatacaagtaatatcaatcatatataaattttctgtataaaacacattatatactcagaagaaaaataaaaaagattaaagaagcaaaagaatgaaattgaatgtgcaagataattaaatcaaaatatttaaatccatatatatatgcagagcttcatgaaaactatctcataaaaagtaaatgcaaacagtaaaaacacataccttttccagctttcgcagccaggtttgtcacctccacttccaatttagctgcagcctgcaacaatcatattcgaaaaatcaataaaataattcatgcatgcaggacaccatcaattaaaatttgagagaaaagaaatatttaggaaaacaaattatgcatgtgataacaatctatgattgtttattggaataaagtgctaaaagaaacttcaacttaaacgagattttgatggcaaatcttagctagaaaagtaacttcgtaagaaagaatattatatgaaagcaaccctacatgatgattccattataagagcagtaggaaaatggtgcatcgaaattacaaagtaaagtttagcattttaccaattgcttcaatatacattccaatcaattggcagttccctaactatttttgtttttacgcaaaaggtcaacttgtattaatattgaagaaaaaaaataaaagtagaataagaaaacagaaaatgaagaataaatttgttccccaactataaatgcctcttctaaggagaatgaacaaaaggaatataaaagcaaacaatgatgagaagatattaaattcgttaggtaccttccgaggaatttcaaaaatgaaaagctcgttccattttgcggtcccctcatccagattgttgtttcgagaaatagaaggtttgacacattttgttcttgcactctgagggaaaagcttttggtgatctgtagcctgattttccacgacaagacgcaaagcacagaagaagttttggccattcccatcatcattcataggtaaaccctgattaaaataataataataataataaagaagggtaagccactgtaggtcaaaaatagcaatagaaaaatgacaataaaaactcagaagtatttgataggcattaaccacttttacaaccttggcttcaaggatctgtatcgcaatgtaatagcgtgcttctctagactcatctgacacgttcaatctgtctgaaaacctaggtggtggaatccacacagaagcacaagccccatgacacaagtggtcaacagtatctgtattctgttcaagtcttttcagataaatatcacacccaagtttattttctattatcacagtctggaagtcatcctcatccagagcagagaaagatggatcttctttgtccctatgtagactcccaatttcctgtcaaggaaagacattgtaaggcatttgaaaggtttactatacagcaacaaatattcaagaaccaacctcatttagcttggctgcttttttttcaagttctaattgccgtctccatgaaagagtgctcgcaacaaaattttccaagcttgcagcactgacatttacatttaaaacagtggtagaagcaatacgcactctcttcccaagttttgatggcgggtctccgttagtatcataagtttcaaacctgaaatcaaagatcagaatgcttcatgaaggatacaacctctactaaattttgttaaataaagacatttaaagaaaaaataaaaatgttagaaacaatagtaggaacgatatgatacttgaaaattccatcaaaaggttccacaaaaggttcccatgcttctaactgagtgttgaaggttgaggcagcaatagaggaaatcaatactgcattcaaagcatctagttgaccatgtgtagcaagcttaatatttgtgattgtcgcatcaaatagtggagtcatctgaaatagttacaaaccataatttaataagtacaaagtggaacaaatccattcacattaaattctagcctaaaagagagttttgccttagagagaacaaaccattccgcataagctgtctagaacagtcagagaaaagcaactcagcttcatctccgcagttatgttctcccgggtcttcggctttacagaatcaccaattgtataagctaaccggcttgatggttttttaagatcgccacgtgcaaggaaagtgcatgcctgcagatccacaaacatgctattgaagttcctttttcaagcaaaagaaagcttatgcattttaaacaaaacaaacaaaaatctaaacaaaaaattatgagatttaagctatacagaaaaatatctgagcaaaaagaagtgatgatatataaactaaacaaacaaaattacaagctaacgacatgtcaaaacacttttaagtacaggaaagatggaagaaagattagagtttcataataataagccattatggtagccacaaacaaaattatacattttaccaacagctagtaaacattcatgaacctgattttcgactttccatatgctccaacactgagaagcctttgaactggaagatcttgaaatgggaccctcaacaatattagattggttaacaagatccatccttgggcaacaaagagcattgatgctaggggcttcatctatcttagtgaccaggcatccaagagaagcataaccaggtggagaaatcggataccagaaaaaagcttcatcaaaacccttcccaacaatatgggcaactttagtaaactgcacaggctttgcagaaatttcaggattatcagacttgaaaagtatgcccaaagctggaggttccaagctgaaaggaataacaacacatgatggtcaataagaaacaaataattcagtttttctattattattgaaattaggatcctcgcctaaccccacaatatttgaagatcaagaaactatagcaattgctatgtaggtacctagtaaggactcaaaccacaaaccaagtgggagcaaactacatgcct

SEQ ID NO: 186254 - DNA, 609 bp, Cannabis indica
aacattagcactatattttcgccactttataagtgttgttagcatttgtttttgatatttgagttagttatatgatgaaatccatttcaactcgtgagaggtgtgctccaatgacatcaaatataatcttttgttcgaatgctttgattatcagcatacataatctaattctccaacactaattcccgaaaattgcaagtaacacaataaattcttaaacgattgactcaatttaagatttttttttaataataaaatatattattgcatcacaaatttagctaattggggatgctagctacacttaaaatctatatgcttaaaacacaagtatgaatttattctttcattttcacttaatcatctaagatgatataaataaccttatcattttctgcaaactattccatttccactccctgaggctccactacaatcaagatactccatctccactgactcctttggctcaaaaacttcgaccggagagaaaatgcaagaattacaatcagcagaaagaagcgatgtcgttttatacttgtcttcaccaccaacaaccggcatagcaactcctggtttagccgggttttcgaaatcaggctggtaagt

SEQ ID NO: 186255 - DNA, 5642 bp, Cannabis indica
attattttttttttctctattttttaacaaaagaaaatctcacctatttcagaatttcataactctaacatgtcccacctatcattacatggcatcttatttgtatcatcatttgtatcatgaataaataattagcaaaacaatgaaggctaaaaatatgacattgcatgatatgtgggaggtgagacatattcgagacataaattttggaccgtagatttcactaaccaactataaggaagtatcatactcgtctaaacggtcataaatcttgttttctctaatgcacaaaacaccaaaagaagcttgattgattgagtagagagattaccttgtatcatctatgacgttctccttgaaaagaagctgggtgtataaaaatgaatcagcggtgaagtcagagcactagtagacaactgccatagtctgttaattagagaacttagcctggcaggtcgtacacataattcccatcgactcatattctgttccagagctaacaccttcataataacactcctccccacaccagacacagatagtaatgttttgatgcctgctagaagtcttcggcaaaaaagttgatgcttcatccgaaagcctcaaagaagaatcaaacccttgattcatctctttatgtgtgaaaccctttgattcattagaactgggggctccttgccgactcaaaaaattgtacagcaactgatccgcattgcctgattctagcccttccagatctatcatctcaaacttttcatcaacactcaaatttccataggcatcctgccccaaaaaaagtttaattcttaattggttctcatgacatattaataggccagaatttaaaaagcttctagttttagtatgaattcaaaattattgcaagggaaaagaagaggaatatcatcaacaacaaaatctctatccaactaaacaatctaaaatttcagaaaacagttgaataacataaatctacagctatatattttcttgcacacaattgttttgcaacaggcagactattcaattccacactataaatctgccactataaaatgaatcaataaacaaacatctgatatgtgaaaacccaatataggaattaatgagacattagcagtaatcaaaacccgcacaccacaaccaaatgtaataaaagcaactgagtccagataattctatagtcctattaaaattcctttccctttcttgcttatagattacttaaaatttactcatttgaccagaatgctaaaaaataatccattttcatacctcgtctgaaattacactggagttcaaataatggccagacatttgcattggaatagacgaagtaacagaccgctgccaatgtgtgccagtagagccactgtccagattatctccaacagcatgtatttggtcactagatggataaattaaaccaatttcagaatttctttctggctcaagctcctttacagttccattgcaaatatcatgcacactatttgggatgggaaatgttcggttacttcctgaagtatcaaaggaatagccttcagaactcattcccttcacagtgcttgtagcagcacttgaacccactcctccataactgctgccaaaatcatgtgaaacctcattatttgataagcacttcacttctttgattttgtagtcatcccttgatcttgaaagcatgtttttcccaatacttcctccatcataggattgttcataattaaatgggttaagcaaaaaatctcttctcaggtcaactttctcaatttttccaatgcaggctgcactatcttctaaagcaaatgtatcttcatatgaagataaaagtagagaatctcttccagagtttctatcttgatccatgcaagagatggtctgtccttgaaatctccggtccttgttatcaaaaacaacattaaattcactactcttacaatttgtcacattgacagcgccaacagaagactcagtagcattattttcagcagaaaatgctgaaaatacatcgccttggaaactcctttgcggccagtgttcctcgattttaaaactagggctttgtgtgttaacaacataaccaaaatcttgctcatgaacattaaaatagctttccgaatttctatcatcaattgttaaagcatctgcgtttaatgcaacacaatcactgcttgagccaatatttctagactcataggaagtgccagacaccaagtgtgttttctcatcaattaatgaatcacaaaaaccaagttcagcatgtttttgatgcacagagtccatcaaattagagcccagaaactcattttcatcctttactgtggcacattcttcctcattcccaatcccacaatgaccagatattgattcgccattcctattttccactccactagtaaattgatgacattcaaaatcatcaataccacaaatagtttcctcactggaaaatataccagcttgagtatccatatctaatttaggctcctccatagacccattagtaatacacttagcaacaagattcattccatcagaatgttcataaatatctttgtcctcattgttataattcacagtgttagcaacttcacctctatcggtagtttgaatgcaagaatcctgacctcttaaagagtgacaaattttagtgacaatttcttctttaagttctccagaacccacctcatctttaacgggcatggtagaaggttgttcttcatcaattccaattggttccttcatatgcaaggatgttggtgaaataccacttactgaaggattagatttcttcagtgtgcttgtcattccttgtgagacttcaatgctctccacatcatccttaacacgggttgcaacattatcattgtgacaaaacttttcatccaatattttgtggcagaactggcattcataattaccattgttaaaaataagaccctcacaaaatacagaattacacccattcgcgtccttatgagatgagaaaaggtgatggattaggtcatttttctcatcaaaagtcattgcatgatgctggcatttaattaagacattatctactggaacatcccccagatttattgtttccaagagcatgccctgcttccaatcatcatttgtagaggtacttggcactcttgagctgattatgagctcatttgcagtcttagcatcatcaaacgaaagatttgcatcctgtagcgtactatgaaataaaaattacgaataaaatggaataaacgtaaaaagatcaggtataatgacttacatctccagaacccacttgacaagcaacctcctgaattttacattcagcaaggctgggatttaaatcgcttgcatcttgaagtccaaacgaggatagcaagtaggaggagacctccttgtacgagacaaactgctgcccattagggctgtataataccaaatgactagcattaggttcaaattacaagaacaaagaacctatcagaacaaaaaaaaaaactattcataactttagatcaaacaatacaaccggtagggcagacagaagacgcagccaggtgccttacaaattaaagcttgaagtgtgcaactagttttgtacattactgatagatctaatctaaaatgtctaacaactcattcgttctgccaaacagtggtactgattagcacagacatacatggataaataagactactgaccatattttcaaacctttatctcacaaacaaactagtttttcccgtccgcaatcatgagctaactaaccagttttaacagtatttcacgtttcttttaaactaaattatccacctgattctttattggagactagtaaattctagcaattgctatgtaattccccagactcaaacctcagactaaaattaagagactagtagtaaaacacagcaattactaagtacgtgcccaaacttaaacctcagactttgcaggagcaaaccacatgcctgaacagtcgagttaaaatcgagcaatatttaactacatcatgttagaatcattctgtaaagtttagcaaacacattataaacaagcaataaaaagttgttagagaaagaagaaacctaacgaatcgcctgcaaaagagtgagaaccggccttctctcctcttaaaagagatcataatcctccaaccattgggcagagcgtttcccaattcactggcattcacagtcttcttcttcctcctccaactattccaatccccttcaaacccctccaaaaaccctaataactccgcctcagtcgtcaaccctcgggtccttttcatcaactcctcttcaaatgggttctcaacattccccaatgcaatgaattccgtaccatttccattccctaatgccttcgcagcacatacgaccaccctatccttacccttggcattctcaacagagcgaatttcgcccttacgaggccgccctcgcttccgcttcacctgaccaccaacaatactcgccgccgaagaatcttccatgaccttatcaaccggtacagaaaaactgccaggcttagcactactcaattctgcattagacagtaccggaacagaaccaatatctccaacggaactgcacaataaagaattgggcgaaccactctcgacattacatgcaaattcctgaaccagatccttacgcggacgccctcgcttccgtttcttaataccagaatcgaccacaacatcaatcggcgtgttcggcatcacctcacacaaaggctcgggaaaagaattattataatcaacaggtgcacaaacaagtccgtctgaagattcatcggtaaacaacttctttaaaagaccgattatctgaaacctctcctgatcaaggggttcggcaggcggtggggcaacaacaacggcagaagaagaagaagaagaagacaatttcgatttacgagaagcgagacggaggcgtgagtatgtctgcttacggcttccggcggactcgtgaagacggagcggtcaatcgttggggatcgaaacgtcgtcgtcgcagcgacggagtgggtgagaagttgaggaagtgaaagataaggaatatagttcggactgagaaagaagatggaggtcgatgagtggtagcgagtctagccggagatggcggttgtcgtcggcggcgacggtgccggaagccatcgcatggggtttagagagagaaagagaaagttattaataactgacttttcgaattaaaggacaaaagaagatttagatgaattaatgggattgtgattagatgaatctaagtctaccggtctatgactgagaccgcccataatatcgtaacacgtgtcgatttttaattggctttttgttacgcgtagatcgtgtttttgaaaaccgagtgtggacttttccctctttacgcaggattctgggctgtttattgctactttgctaaagcccagcccatttacaagaataccaactattatgtataattaaatagggtatttttttaacattattttgggatctttttagttactattttgtttatggagaaaattacaaattttatgggttttttatattttctgtgaaaaaatatagcttttttttgaaaaaaaaaaaatagttattttataagaaaattgaggaaaaagttgaaaaatatgaaaa

SEQ ID NO: 186256 - DNA, 2429 bp, Cannabis indica
aaaagtaaaaataaaaatactaactacttactaaatgttcctaagtaaagatctttgttcccagcaactcttccaatccttgcttgccatcttccatgttgatgatgtctgatgatacaaggaaaaccaatatatatttatttatattgagctatatatatctacgtgtgctacattgtaatcattgctgtaattcattttactgattagtatataccttgtaactccacgatacattgatgcacctcttgaaaaaccactgctctttctgaaaattaaaatttttcaacaaaatcggaaataaaatggtgagaatcaaactattgttacaattaattaatcaattcgcgctaatatacaaatctgtactaccttctaatagaggccacaaattcttgtcttgtcatgttcttcatatcctccaactccttttcgtagttactaatctgcaaaatcatgtttaaaaagaatgaaattaaaatcgatctatgatcaattagataattagtcagtaaaaattactaaatgtatctcattaattacgggaaagtttgtggtagtggatgttccccagtacttgagtgcagccatatcgtaagccctagctgctttctcttctttatcatacccgcctattaatttaattacgaaaagaaagtatcaaaaaatatatatactaagtgaaaaattaaacacagttaatggaaaagatttattgtaatttacatacccagataaacttgaagagacaatgaagacaggccgagagcggaaaaagaatacaatattgacaaaaacaaatagtcagaaatatattcatgatctttcaacaatgaaaaacaaggggtagaagaaaatatgaaaaccctaaaataacaaaattaataaggagcttttacatctattatatcaataatttttatagaattatacatgtatagtttaccttgtcttcctttccttgattgcccttcccttctacaactattatcccaaagatgagcttcataccttccagtccatctatgccttcatttttcacaaaataaattattgagaaaaactatttatgccattatataattgtacaaaacaaacaaaaggtttcattctgcagtaataatttatagtaaagccctaatactcacctagttacaccacgataaattgaagttctttgaccgaaagtatctaaggtccttctaggcgcagcagcagcggctgcagctgcaggttccacagcagtagaggtggtattattagtactgacattatcagtgctactggtttcacaaacacttgaacctttgctgccacttcccatcgacagtgtcagtgactgaaggttgcttggattttcttgaaagtcataggtagagctagacccatgaatattatccaaattaacactttgctgcattaagtctgctgggaccatgctgttacttgcaaaaaggtagtcagaatcactggcctggtgatgaatttcgttgaagggcatgagatgatctgtttggttttcagatttgctaacaccaagaaaatcagccaccttgggcacttgatcattgctactgctactcccgtggctattcatcagattccactctgtacatgtatataaataaattaatacacacacaaatatatgtacgtagttgagaaaagttacattagtacaaaatgtgtacctgaagcttggttttgaaaagggttgtccatgttatcattgactaaccctagagtgaattgatgtgatggtagagaagcatgagtaggagatagaggaaaagaaagccagttgtttgtattcattgaccccatcgatctttttttttctttccttttctttcttgcactgcacaattaataatagtgatcagaaacaaatcttcgataatacacagaacttttcattacattaaaatatctattataccttactcatgaacaaagaaagaatacaatgtaacagttacctctgtattcagttgcaaattataaagcttattatttttgcagaaaggaaagaatgtatttgagagaagtgaaagtagaaagaggagtgtgaaaagagaaaacattgagaaagggacaaaggtatttatatattgtatgtatataataaatatcagagtgtgtgagagaaagagagggatacacatcataagctagctgttgttttgtaacccattttgcagaggtcaatctataggattgtctggctctatccaccgcaataataacaataataatagatattattatctttttctttgtgctaaactaatcaatggacacgagtgccttaataaaataagaatataatatataatacaaactgaagccatagtttctgtcttaatttgtactatgacaaacccacaattccaactaagaaaatccaaacaagacctctctctctctct

SEQ ID NO: 186257 - DNA, 1814 bp, Cannabis indica
acatttcatactagcagtaaattaaactttcatatatggcatcaaaaacttggacattgttctttacttgtcttgcaaaaagttttgtctagcataaaccattcaactacaccaaaccagttacctttttgtaatgcttgtcaacgaggtaggagccataaacaaccatttcccatctctaactctagggcctcacaacctttagaattgatccacactaatctttgggggccatctcatatagaatccaaagatggacataggtattttattcattttttggatgactttaatcgtatacatggatctatccccttgttcaaaagtctcaagcatttgacatgtttataaaattcaaaagcatggtagaaaagtaattcaccttacctataaagcaagttcaagctgatagaggaggggaatatcgaccatttgctaaattcctctcagatcaaggaattatgtttaagcatccttgtcttaaaacaagtgaacaaacgggagagttgaacgaaagcataggcatatcacagaaatgggcctcaccgtgcttgctcaatctggtttaccattcaattactagtggcatgctttccacagtgcagtatttactattaacaaattgcctacaccagttttgcaccagcaatctccatttgaatgctggtttggtaatacaccagattacactatattaaagccctttggatgtgcttgctaccctcatttgaggccttatagtagacacaaaatggagttcaggtcacaaaggtgtctttttctgggttattctacatctcacaaaggctatctttgtgaaaaccaggagggcaaactctatataactcaaaatgttgtctttgatgaagaatcatttccagcaatggcatcaacaactccttgtcatgtacaatctcctcctttaactaatatgcctattattattttttctactctctacaatactgttgtgcctgacactaataatatacattctagtaatggtgtctctgagtattccctaccatctgtcacccctaacatgtctactatagatacactagcttcaccttctccctcaccaaatatgtccccaatttcccaagcacctattcacttaaacacaactccacaaccttcttcagattgaatatcttacctgttccaaccacaaactctccaaatttaacacaagctactcaacctgaatcatcttcctcactaccaccaactatctcagtagcttcccaacctatcacacatattgaccccacacctactcatgagacatcattaccaacaagtaccagatctcacaaaatggtcactaaatcacaaaatggcattcacaaacccaagtcataccttgctactaaacatcctttatatgagaaaacactaccaactgagccaaaatcactaaaagcagccttgaacaatcctcaatggaatgttgttgtgcatcaggaagtaagagctctggtcaagaacaatacttgggtgcttgttccctatgattcatccatgaatgttattgggtgtaagtgggttcatagagttaaacttaactctgatggttctctcaacaaactaaaattaagacttgtggccaaaggttatctttaaacagctggaacagattttgatgaaacgtttagtcctgttgtcaaaccaaccacaattcgacttggtttttccttggctgtttccaacaattggagtgttgttcaactcgatgtcagtaatacttttctgcatggcaccttgtctgaaacagtttttatgtgtcaaccacctagctttgaggatgctac

SEQ ID NO: 186258 - DNA, 3671 bp, Cannabis indica
tcgtacctccttcagccttgatgaatttgtcataggttgaaaatgcatggctctctacgcattcagaaaaatgatctgcaatcatgatgaaacctatacgttagacaaatgatctaaacattcagcccataccccaacaaactacaaaaacgctttcagacattcttaaggagcaatctaaaaggaaagcctgaactcgaatgtttgaaataaattaagcccaaattaatcgataaagatgtgaccagcagatacagctgcacatacttcttaattcataattcataattagtcaggattggaaagataactaagccactgtttttctacaatagcatttacacattcatcatgatgattttattacttaatttggttttaaaataatgggaagttctcacataagataatcaaactaattagttgccaagagacaaaattcataacagaggcggtgactacatatgctcatacttacatgccattcttgggcttactatatacataaagactgtcataaaatagtaaaaaaccgcaatatgttgagcaagaaagcgatcgaaccacagagaacttcccccgagttcctgcaaggtgcacaaggaattgcaatattatgtaaaggccttcatcatgtgttatgtggaaggaatatcaaattttcattaatgcaaacttctacaatgtggtgaaaaatgtatgaaaaagttaacttccttccccaaaaacagaagtagaaaagaaggtgatgctttctgaaggagatacatttattagtatctatgtgtgagagagatcttgcaggagaaattgtctaattgtgtttgaaaacctaaagtggcgtgcaatatcaatattgctagaatctaaggaagatattacctccatgataagcaagtggtgcatctcattccagctctcagcaaaatgtactttcaaataatctgctcttctccaccaaccaaacgtctcgtacaagtgtagaacagacataaaagctgtcacaatttacgagtcagaactaactataacaataatcataatccaaaattcagctacacaatctttctaccattgcaatcaagatcaaacaaggacacagaacaaataaagtaaatgataataaccagtgataaaatgagaaagaacattataattccctattatatttagttctaacgagtaagtttcagacaattaaacgcattatcatgtgcacatttggagtaacactgcatttgtttaacaagctaggatgagcagacatatagacaagtatggacccccactataacttagctttcctagtcgcaagcaaataactatactgtttaatctgaaagtagattcagtgataaataactgaagaaatggatacagagcaaattttacaactcaccaaagtaagggactctggcaatagtttctaaaacgaagaacctggcataatttctgtcatgatacaaggtgtcaagtatctttatcaccgagtcctggaattatcatgaaaagaagaacaaaactacattgtaacatagtaacattacagaggcaagtagctcctttgaacccaaaaaatcataataaacaaactgaaggggacaaaaaagtccaaagggaagaagatttaccgtcagcaatacgttaacggattgctcaaacttgatgacccaactctccaaagtactggaagatgtgctctctggtggttctccactgctttccttcagctcatccttggatgaagttttggtctgaaaggattcttccactaccactttgtcctcattatcttgcaaaagggtagcgtggactctatataatttcctatacaagaaaaaaaatcaagttaaaaaaccacataaagtcccaattaatagacccattcaaaaagataagcttgtatgatcataggctcatagctcaactttacaaagctgaaacaaccacttttctactctatatattagtagatagccgtaacattatcataacagaagaaaaaacatctcaaatcacaaggcataaacttgaaaaaccatcatctcagactgcgtatttgatatttccctaagtggatggaattccaatgaaatatctttccggatgttatataagtgaatttagttttcccaaacgacaatcagaattggagaaacagacaatacttacctagtaagagatggaggagcagaacgagaattgtaaccaatagggcagaaggagaaggaagaagaagcggaattgacagtatatttccttagtttcagagatgaagaagatgagcgagaggccgttataggaaagactggagaagacaaaggggccgccattatcgacagtgaagctgtaaaatacggttcaactagaaatgaaaacaaagataagagaatcaataacaagaacaagcgccatatcaacttcaagcacggcgattacaaagaagtagtgtcaaaattacatttgggtttgacaagaaaattgatctaacttcatattttgtttgcagccaatgtcatcttgtcgttttgttagcctgcttgtattcaacggatattccttttctgtttccgtgtccaagtttctgcccactgatttttactttttggagatgacaagtattattgggccgaagattctaactgggcctagtccaagtactaattgtatggttttgggcttaacacactatgcctctgtcatcggcccaatatcagctgtgaatgctctgtacaaccttttctacaaaaatatgacgattattaaaatagtttttaagattatgaagaaaaaaactgtaactaaaagtaaattttgtgcaaaaatgcaggaaattaaaactcaaaaaagaattttaattaaaaaagtccataacataataatattttttctcatttttggcataataatcaccacaagtaatagcataagtaaacaaagaagaatgaatcaatcaatgttgcttgatcttctttatgagcttgagtactattgtcattaaataccttgaaggtgtgtaacactataaaatggaattttacaagtaaatagtatttttttatattatttattaaattaaaatacaaagttcaatataaaattgtactagcagtaatataatttttttttaatatgatgttgttggacaccaataatacaatttagtacttctgacacaaaaaatagatatattaataaagtgtattttaaaaatggatgtgatgtgtattttaaacatattttaaaaaaaattgtatgatatcattttattttatttttagtataagatatatgattatgatatatcaatttggcaataaaaattatatgttcgtgacaagactaatataataatataatataaactaaaacaccaagtaccaaaaggagtgaccttggtttctcaattgagttcagatattttattttttaaaattaaaattaataagagagacccaacttggagtttgcaatgttcttttggaaaggaagttaatatcattttaattatcattgtttcaggaatgttggatttctatcaacctcatgtactttatacgtgtccataatggtcattaccctttcccctcttgatttcttacacgtaggtttaattgttcatcacacgtagtagctgagctgagggacaccacccctaatcacaaaatatc

SEQ ID NO: 186259 - DNA, 4602 bp, Cannabis indica
gaaagccaatggttatggtcatttcaatgtgttctgttatgttcagtggtttcaaacaaaacacaaaacaatacatgggtaactttcacgagtaaaactactaatgtttcatcccaattaggaaaagactttgggttacccaaaaataacaaccaatggctaacagtaacacaagagaacaaaatatacagctatttagaggacaaaaaagactattttccttttcaatctaaggaaattaaactacgaggaagagataatggatcgagctcccaacatcctgcaaggcggctatctttctctccagtatgttgcaccgcaggaatttgatgcgaaaatttacccattttgtcgcgcggtatgtcaagcaaaccagtttttgatctctggatccttggagccttgaacattgatttaaagccagcgacttgaataagaatagcaacttgaacgctctcgtcatgttcttccatcacttccacaatatcataatcaatatccagcaacagcttagaagtctgctcattgtgctggttcttcaacattgcccaaatttctcccttacgagggtaaaatttcatatttattactactagctttgacattcaaacaatgggagaatgctgaaggaaagggcttattaactccacttttaacttggaaggtcccacaagaaactgactggattgcacctttcagtgtagagcaaagctcaagtaacgccacatggacctggaattcaggagtagtctcgatcctcgtaactttagcataggtcttgggaaacacattctcatcagttcgcacagcccatatctgaccatacttaaagttttcctgggacctttgctgagtaaagtcgcagcattcctggaaagaattatttttcactctgttaccattgttaaactgagcacgggataagctgtcagagttctcaaccttttcagagtttgaatgatggtttgataccgattcacttttcttggttaaatccctcggagaccttctgagtttaaagtcaatgtcatgattgattccctgcttcattggtgtcttaatcttctcatcagcctgaggtaaagtggcacttccattggatgcagtaacattaccttggtttatttcattcttaactgtgtctacgaaagtgctttggctcccacttgctttatcattgccattacacttccctggagactttctagatatcaaagtttcacttttggaattgttttcggacatgccagatacagggagctgatcagcaggagtgacattattatccattttcacatcttcctcgtcacaaaccttgaagaaactggggggtaaagaagctggatcaaattcataagatcctttaggaacatcttctctttcatcacccgtcattctaaaagagggaattcgatgagaaaatctgtatagctcattaggtggaatttgaaatggcgcagtttcattaattagctgaaatagacaggtaaacccttttactctccctaaaaatgctacagaaacaccagcaccttctgtaaaatctgactgtatctctacatattcatattgaaaaggtaattgctttttggggtcagaactccaattaatatcccaattctggaagagagcccaagtttctccctttctaggatatacaaaacgaatcaattgggtaccattcatggagtacatctggtgtgaaaacatagtgagatcaacctcgtcataacccttcagtttgtacctgccacacgcaaccggcaatttacttttaacccatttttttcccattttgtcatctggagcagactccagccagcggatctcaaatttagaggaaagaacattcctaatttgagcatagtatcttggcatggcatctactggatcataacaagcccatatctgattaacagcaaagcaatttttctttttatcttcttcaaaatcactgaattcaggatcaggacatgtaaagtgctctgaatcagatgtttcatttgccgtcaattcagaactatcatcactcttttcgcttggaaacctgtccttgtctgcaaaactatcaaactgcatggactcttccttatgagattcatcaactttatttgttccaccattaacaaaactgttttcattgtcctcttcaccagaactagatgatgtggtcaccttagacctttttgggggacttacaaaatcatcatcatcacttaaattgtctttgtaagaaatattctgcttctgtcttgaagatctcctacgattttggacttcacttaatttagaggaatcaaaaacattgttattataaacatcttcagtttcagcttcagtatcatgactttcacttgattcctcaacaaacctcctccctctctttctatttgtatgttcagaagatcctgatttcttggacttccgttgcttagtcactggtgccttggtatctttctcgtccactttggactgtctgctaggcttagcagcaggtcctgccttcggcatttgtggtggccgaggaaacgagtttggggatctctcgtccgagaagtttccaatatggcattgtgagggcactattggagggccatgatttggaaatggagcccgaacagatcttggcggtgcaccttgaacacccatatcatgggcaacgtagtttttctggcagctttgacagactaacagtttattcacaaaagctttataatactggtacctcacactacagaatgggcagcatgtccaaaaagtcggttgcgcctgctgatatggatattgatgagcatactgtgcgcgaggaaaattctggagattgactgaagcaccatactgttgctgagcatatgtgcccacatttgaatggtggattgatgccgatggcttagttctatttacaactcgatacttcatgtcataaccggaacgtttagcttgatctgagagcaccatattagcctcgccaatcagcttaaaagcagcttcagcaccagcaaacttgttcttgtcaggatgaagcaggagagcaagctttctgtactgtttcttaatagttgccccatcaactgtctgttcaatctagaattttataccagtccttttcggtgcctactttcacctgcgctgagcagtgaacttcacagacagccagcaattgagaaatgttctcaagatcaggaaagagccgctgagccttctgtgcaatcttatgtgctcctggaaaatcattactgtgcatctttttctcagcaagccccattgccctaacagcctcctctttgttgcactccatagctgacatatattcccaaatgcctagcttcaccacactatggtatagaactcaaatacagggtgaatagccttgctccatagtccaccaagtatccacaattatcaacctgcttcaactagaccccaagtaaaaataaattaattccccaccaatacatataaatctaatatccatttatacactttcagcaaaagcaacaaaattagcaatcatttacaaaaccacaaaactgtcaggaatattacaagaaaaagaaaaacgtaaaaaggttatcattacgtcgttactcaccagataattgagttatcagtaggacggaaccgaaaccacaactaccaaaaatcagaaagccaatgccaaagatttcacaaacctgcaattcaaaaaaccagaatttaattgtaaaaatattttagcaacacgcaaataaaattaatcacccaataaaatgtgagtacatgcaaccaaatataaatccgaaaccaatgagaagaagaaaaaatatgaacagaacaacattcaaaagttaaaacctcagaaatattaagcacgccagtcatacacataagcactatcaaaaacaacatccgtcgtcattattcaaatgtatatagatatacgcacatattgaagagagcgccacaaaacgttaaaccaaagatccacggcaaataaaaactacatttagaacaagaaataaacaagacgttcaaatgaagtaccggaaacatgaaagtgttattccgagatttcgcaaaccctagaaatgaaatcaagagaggcgatgaaaatgaaaagaagagagggagttagacttacatgttggagatggggtttgagagtggagaggagagaaagagagggaaaattgaagcgggaagagaaagtgagaaaatgaaaaaaagagaaatggaggggtttagtttagatctgaaactttagccccctcactttctctgaaattgctccttttacaactgtgggggctatttcttttaacaaaatcactccaagggtttattctttaattacattatatataaactagggaggccatgtctcattatttatccaatgtatttttttttctctctttcttccttcttgaaaattgtgatattttatttattgataattaaattataaaattatattaaatattaaattttattatttttttatacaatttttttaataatatatgtaattattctactaaatttttttattttttactattaataggacaaataaaataaattaataggttaaatctaataattttttacttatttttaact

SEQ ID NO: 186260 - DNA, 3460 bp, Cannabis indica
tggttaagctattattatatgtcttcaccattgaagcaatgtttgcttacttagctaaggttccgaaagggtacgaggtttgaaaaacaaaagataatcttgttatggatggcggaaggtcttttaactaagaaggaagatggtggagatgataaagataatgaagatgatggagaccagtactttgaaagtttaaaatcaaggtattttcttcaaccaacaagtgatgatggatcggcttttgtgatgcatgatttgatgcatgaattagctagttttgtaagtggtgggttttgtttaagcatgaatgatttgaacttatctgattaccaaagaaagattcgttatttgacatatattaaaggatgtccatatgacccttctaactttgaggttatatcctcatttaagggtctgcgaactcttttagcattgccattatcatcatcatcatcatcatcatcatcatcgataatttgtaatggagtgatggggtcatcgactaagcagttttttatgtcggtggagtatctgattaaattgctaagtccaagatcgtgcttgagagtgttgtctctttctgaacattgcataaccaagttgcctgattcaattggtgaattgaagtatttgaagtacttggacttgtctttcaccgaaattgaagagctgcctgatacagtttgcaaattgtataatttgcagacacttttgttggaaggttgtgctagacttgctacattgcccaaggagatagggaaattaagcaacttgaggcatctccacactcctccttacttacgagagatgccactccaactcggtaagatcacaactctacagacgttaagcgaattcgttgtgggaaaagacccccaatctggtgttaaacttctacaaaagcttgaacatctgcgtgggactcttgaaatttcgagactcgaaaatgttgatgaggctgatcatgttaaggagggtaagttagaggagaaggaatctcttcgtcagctgatattgaattggggttatagtcatgctgctaatgataaagaaaatcaagtacttgaggccctcaaacctcattcaaagctgaaacaactctcaatatttcattacaaaggtaacagtttccctagctggattgaagataaatcatttgagttagaagatttggacctttatggctttgaaaattgtagctcattgccaccactggggcaactaccctccctccaactcctgacgatttcggatttcccaaaagttgaaaacatagattcagtgaaagggacagagccatcatttggaacgttgaagaggttgcgtcttcaatccatgccgaaactcaatgaatggtctatcaaagagtccaattcttttcattgtctagaggagctggagctagaagattgtccagagctcaaagtttctttatctactaatcttcctgccttgaagaaacttgtgatttgcgaatgtgaccaacttcagcttttaagtaaagaaattcaatctctagagactataaagatagatgaatgtaaaagtcagaagtcatttcttgaaggaggattaccatctagtttaaaggagattgtcatttcaggttgtgaaaaccttaccactttagatgaagaggcttttaaaggactcacctcactcaacaagttgtatatttccttctgcattaacctcgagtgcttgccaacaaaactaccagcttcactgtctattctacgcatcaacaactgtcctaaactcgtaccaagactccaaaaggagagtggtgaggattggcacataattaaggaaattccaactctggatattggtccaagataattgcatatcagtaagtaaatgcttcattctagtaattttgatgtctgtttttggtacatcttttcaagtattcttgtgtttaaaattttattgctgacatggtttttggtgattactcttctcaggtctctctattcaacaagccaagccagtcttgtacatgatgatgatctctgcaagcagaatcccatcacaactttgtatctttctaatgttgtttttgtttttggattatgtaatttcagttgcaaatctccttcaagacctttttaccttaatttgttggtgttgttttggtttgataaagtatgagattgtgttggatgactgtgatcaatataatgtgttaatgaatgtgaaatttctattctatttgaagtctataactatgcctataaataatatatattatagagagagagagagagagagaatttcattcagattgatgatacaaactagttaaggaggttccttcgttcaattctctcaccaaacttttcaagctttctaagttggctgatccatcgtggtatttccggttgaaagatcaacaccttctctacaagtatttagaattttctatcattttagtaaaattatagaatcaattatatagaattaaatttataagaaatttcaagaaagttttagaattgacaatttgctagaacattctagcacattaatccaccactcttgagtagtataaataggagagttggtcctttggtggtatgtggtgagttgagtgataattctagtgcacaagtaattgtaatttaatatacaaaagtgtagaaaaggtgtctagtattaaaataagagcgcaagtgtttagtgtattgtggtctagtaaaaagtgttcaattcttcgtgtaattacttttacaataataaagtaatcacgttttcacgtgttgcgatgtctaacaagttgtattagagccagtatgagttcgttctgaaagagtcctttgctgagtttcttagagtgatcgtgtgtggtttagtactatagagcttgcacgatgggtgaccttcaagtggttagcgaaattaagaaacttaacaactaatattacaacacgtgattgatgcacatggaggcatatctccaaggccaagacttacggaagatcgttggtggcaatgaagtcacacaatcggagaacacaactgctttgaagaaatggaagattaaagcggcaaagtcatgtttgctattcaaaccgtagtcaaagatgagatgttggagcacatcaggttggcgaagacaccgaaggaagcatgggatacttttacatcattgtttaacaagaagaatgatataagattgcaacttttggagaacgagcttctctcaatcaggcaatacttcaccaaggtaaaatccctttgtcgtgaaatttctacattagattcttctcctagtatatttgatgctagaattagaagaataattattcatggattaaactcagaatttaaaacttttattgctgcaatacaaggttggccaagccaaccttctcttgttgataatgttggaattggattgctgaagctgtgttatgacaatctacttttgcctctcaaacattgttttgcttattgt

SEQ ID NO: 186261 - DNA, 5059 bp, Cannabis indica
agactaattttagcctaacattagttaaacccttcacccaagtgagctctttgatagcttcaattgttgccatatattctgcttctttggatgacaaacttactaccttctaaagggttgattaccaattgatatatccacctagagctatgaaaacataacctgtaagggatattctggtgtctatgcacctgacatagtcactatccacatagcctgtaacttcttcctttgatttgttgttagcattgtagactaaaccagtaaagatacctcagtatccactttagatcttcccagtgttgctctctagggtcagaaatgaacctacttatggtgctcatggcatgagcaaggcctaggcctggctttgtgcagaccatgacatacgtcaaattgcctataacacttgcatatggaatatgatccatgatttttctgtcatcttcaatctgaggagactgatcttttgagagtttgaaatgagcaaccaaaggaatactggcaggtttttacattactcatgttaaattagctcaagaccttttcaaaaagtcttctgagataggcaaatctttttaggtctcttccttgtaattttataccaagtatcttcttaacatctcccaagtctttcatctcaaattcattacttaaaagacctcttataacttccatttctgtcatgcttttctcaaccaggagtatgtcatctacatagaatagaagaataaaatttaccatttgagtagtcacatagggtcaaagatgctcttgttgaatctaattcttgccataaaggaatttttgcagcaggcagacctcctatggatctccactttaaaaaccttcaggttgtctcattaggcttttttcttcaattttgccatgcaggaaagctcttcttacatatgtttgatggatttcatattcacaccttcaagctttagccattatatctcttatggaagcttgtttatccattggtgataaaaattcattgtagtctacaccctctctcagagtaaatcctttagcaactaacattgctttgttacttttatcttcaattcctagaatacattcctttaccttcataatccattttagcctacaagtttctatcttggtggcttctttacaatgatctaggtcttgttcttgatcaaggatgtcatttgttcttgaattgcaaagagccactttacaccatctctcctatttatagcttccttgtaggattttggttctgcaatatcaatctcatctgccacagataaggcaaacccagtttagtcagctagtttagcaaagcccaatctatcatgagggtaaatctctcttctttctctatctctggctagttgatatgtctcaagtccaccttgagttgtggaaggtttagtggatgtagattcatctattctcatttcatttttagttgtgccattattaagttgaacctgagcccttctattgctgtcctcacattgagtgtatgttttcttctctaatttcatagacatttcattttcattaaaatggcatctctattaatgatgcatctttgaaagccagtacaatacaccaaagcttatagcctttcactccgtcaaggtagcctagaaataggcattttatggctcttggttgttgcttgtcctaccttatgtgctcataggaagaacattcaaacaccttcaggtgatcacaataggagctcttttagtccacttctgttgaggtttcacaaaatcaattctagtagaatgacacctattcaccaagtagcaagcaattttagctgcctcaccccagaactgtctttccaaactagctccacttagcatgcatctcactctttctattagtgttctattaattctttctgcaaggccattttgttaaggggtctttggagatgtatgatgccttgttatgccttcgttggcacaaaaatccttgaacatgcctaaaaaatacccatgaccattgtttgttctaagtttcttaattttttttccaatctgatttttaatcaacctttcccaatttacaaatatattaaaagattcatccttgcttttaagtaataaaatccatacatttctagagtattcatcaattatactcacaaagtagctagctccaccatgtgttttaaatctggaaggtccccaaaggtttgaatggatataatccaaaggtgtttagatctgtgtaaactaattgagaattttagtttgcgcctttccccaaaagcacactcatcacataagtatagctttcgagacagattacttttcaaaattccttgcttctcaagttcagtgattcccctttcactaaccaaacctttgatgccaaagtttggtttgatcagtaactttttttttaccattggctccattttctggacaagtctgtcaataacagtaatagtttctccaacaagaaaatacaaaccatgtttgcattcaccttttatgacagttagagattcttttaacaacttgagagaattttcatcaattttgacagtacaatccttagcagcaagagaaccaactaataccaacttttttcaggtcctgaaacatacttgacatttgttaatgttgtttgaacattgtcatgcattttgatgatgacagtatcaaaaccttgaaccaagcgtgatttattgtctccaagaagcattgttcccctagtcttttctttaaaagaactgatccaattttatctggataaatgtggaaagtgcatcaagaatccaagatccaatcttttattgattctatgtctacagcaataagtacatctatagattcataaccatctgcagccaaaccaacattggttcaatttcccttttcattcttgtctttgcctttgttcctgttgttatagtttctcaagatataacattcatctttcagatgatcttctttcttataataattgcagaatttaccaaatttgaacttagacttggattgatttgagccattattcttgtttatgtgaatcctctgttcatttccattggagttattgttcttgtggcctttattctatctttttatcaaacttgcctcaagccattaatccttcaccatttgaacgattcttgtcattcgatttcttttgagtctctttggaattcaacgctacttttacctcaggcaatgccaatgtttctttttcatccaatattgtgtcaagaaaatgttcataagaccttggcgatgaaataaatagaacaatcccttgatctgatcttcttctttaaccttgatactaatatcgttgagttcgagaatgattttgttgaactaatctagatactttttgagttcacaaacttcatccatttcgcagagtgtacaaatgattcttcaagtatagattgttttccaaagtcttcttcaagtaaatcaaagactttgctccacaaactaattgtagttccttcatcagagacttgcctgagtacttcatctctaagacttaaaagtatggcactgtgagccttgtttcaagttctttaaccttcttcttatcctctttgatatctttatatccatcaagttcaatggcatctaaaatctgttggtgcaccaacagtgcacgcatcttaattctccaaagactaaaattgttctcccgagtgaacttgtcaatctcaaactttgctgaactcaatttgattgagtcttgatcaacaaaataccatttcttgatgcttgaatcccttgctttgataacacttgtggtggtgtaacacctcataaaatcacaagaacaaagtacaaaatcaatcaagatcaaaactaatcaaagaaactaaaacaaattcaaacaaaggaaataaaatcacaccaagattacgaggtttgctcaattgctagcagtggaaattgtctactctgtggagaacaaccttaggcttgtttctttattgattcagttcttggagctataatggagttgaacaccagaacataaattgaaaaactaggagactcacaaaataaggttgagttctttagtttataggtctatacaatattgagggacggaatttgaattggtgatcaatgaggttaattgatgcactaaatatagaatttttccaagatagtttgaggtggcccaaccgtaactaactttcttttagctacctaagtccaagcagagctagctcactaactgaagagaacaaaaactgattctaactaactttaactaactccacacatgatatattttcgatgtcactcgatgctagttcataaagctttatggtattagaaaagtctaatttgttgaggatcactcgatattgacttgattgaagttagatatggtaccttttcatgttgtctaaagttggcttgatgggggctcgattaaaattcaatgatagttgcagcatattgttcctaacaaacaacaaaaaaaacatttatggcttagttcagttcatcgattaaggtagtggccaggctggttcaattcattaatgaaggtggtggttgggttggtttagtttgctgagggagggagaaacctagggccagtggtggcttttggggttatgatcttttgccctcctattaacgagagaaagagaaagaaaataaggggaataaaaaattataggggtattttaatttttgacggtcttagctcaaaggagctaatcttatcctccacatctggcccctaataaatccatacaacttttaaatttgttatgggtcacaatcttagtccccatatcaacacgatttttctcagtggggattttctcaattttaacaagctcttatgtcactttatctctaattaagtaatgcttgattttaacatatattttttttaaaaaaaaatgccactaacgtaaaatttacttggtgcacaactgatgcaaaattactttaaaaaaaaatttcagaagcttatacgcttcgagctcatttagaaaaccataaatgaaaatctaatgtaaattaactcacacaacacacaactaagattaactctctctctctct

SEQ ID NO: 186262 - DNA, 1491 bp, Cannabis indica
gccgagaaaggtatgatttgtttaaacaatggacttgggttttataagtcattatgagctgataatatagcttgtaatcaatgtgggagaaagcaaggcttcttaatatactgatcatgtcaccccaaattaaaagaggcttagaaagtgattcatttattttatgcaagtcaactaaagaccattacaaacaatccaagctatctgctatgtgttaaatagtgttttatgtatatgagaacatgaatatttttccaaataaatttaatttcattccactaagattcaatcaaacttaacctgaaaagctcatttctccaaatgtgtggttcttttctttcttaccataactgacaaaaacagctaagttctcatgaaatcactatcttaaagcttgaaattacttaaaaatgaataaaaatataattatagcagaaacaagacgaattcaggtgtatgagttttacaaccttagttagaagtatttattctttatgattgccattgccatgatagtactcatttttcactagtatatttatgcttagatttcagtattgcagccaatagtatacatggaaaaacaactctaaactctctctaccatagttgtgaaactcatgagatgcttcaattttggaagcaaaagcaatctattagagactatcatagattctctttatacatatactatttccattaatagatgaaagtaaccaatgagtagtgtgagcccaaagctcaattcaaagctaacaacatcattgtcatctgaaaatttgaagcaaaaatgatatgagtgttccaaattttggaggtggtgtaaagagtgggaattccaagcaatcttgaactaaggttggaggggtgcgccaagcccatgcaatagtgcaaagcacaggcaacactcaagagtcccaatagcaagctattgtggtggactcttccccttaaaaaattaatttaatatcgtgtgagccattggcccacatatcagatattaaactgataagaacagatactacacttgatcttagccaaaaggccgagaaaggtatgaattgcttagtcaaaggactttatgttttgtaagacattaatgagctgctagtgtagtgtgtaatccatgtgggagtattaagaattgattgaattactaacacaaacacaagaatattacatatatcatttttttttttgcaatattatcttgagactatatcatgtatcaacaaataacgttgaccatgtttagtagtacctttcttataaaaaaaaatcatcccatatgttataaaattgagagatgtgttgtattattattggtgcaatttaatattaaatctcacttattgaactttaataacgactataaaaaactattaactattttataaaatgcttatctcataagagtgctaagcactatgatgtcatatagcaatgttctaaaaaatatgggaacactagacatatcctaaactttttttt

SEQ ID NO: 186263 - DNA, 1072 bp, Cannabis indica
caacaacaacaacaatggcgttcttcatagttgtccttagtctgatctttgtgctctgtttttgctctgctttgttaaggtggaatgaagttaggtacaggaagaaaggtcttcctcctggcacaatgggctggcctgtctttggagagaccactgagtttcttaaacaaggtccaaacttcatgaaaaaccaaagagcaaggtgattattttcataattttttatttttcttttatatgactatctggtattgctctgtttttttttctttaaatcattatttctttaaaaaggggttgtaagcttttgctgttttaatggtctctagtctagtttttggtttaaggtctgataactgattatactaatcaactgctgtttatggtttaaactgtttaactaaacctgcaaatctcatttcagtggttagaaagttccttcttaagccaataagagttgtcttcttttttatttatttattttttttttcaattttttattttctgtcattatttctagctttttggtgcgaaaaggaggggagaaaggagtagtcatgattaggggaagggttacccatgataaccccctaaaagagataactatattgcatcaatcaccagcaaagatttctcatctgattcatcactttctttggtttgtaacaggtacggtagtgttttcaaatcccacatacttgggtgtcctaccattgtttccatggatccagagctcaacagatacatcctcatgaatgaagccaaaggcctcgttcctgggtaccctcagtcaatgcttgatatcttgggaaaatgcaacattgcagccgttcatggctccacccacaagtacatgagaggtgccttacttgctctcattagccccaccatgatcaggcaccagcttttgcctaaaatcgaccattttatgagaacccatctcactgattggaatgacaaagtcatcaacattcaagaaaagactaaagaggtttctttttttctttccatctttcccagtaatcaaattctctcaattaaaaatcaaatctttactcactcttctcttatt

SEQ ID NO: 186264 - DNA, 5568 bp, Cannabis indica
gtacctagtgtaaaaatctcaataatttattagttttgtgatgaaatgttgactttaacatactatttttctttttatcacattactatgctatatctatatatttttatttaattattattattattataaaatatcactcatcattcacaattatactatcaggtgacttggttattaataaaatgaaaagaaaataattttttttgtttgattttattttaaaatattagaatgtcattcttattctaattatgtttttatataaataggtgtttgttatgtgagtttgatttagatagagtagagttagaataaatagacttggagggaatttgaaactaagtgttagaagagattaacattaccgccattttaatttaaaaagtacgattcatttggaaatacaaacctttagttattaaaatttaatttaatttgacattctcattcccatcaagtctaaaccttataccaaacgcctccttggtgtctaatagtagatgggaacacgaataggatttaatgggttcacatattacggattaggaataataacacccgaacctgttcaaaactttcacgagtttttataaattcgagtttgggttcatctctgttgatcccattctccatgctgaacacacatctcttccgacaaaaccaagtgtcatagatcccacgatcaacttgctcatgaagacttgtccaatccatattttctgagcacaggagatcatccaggccttgttcttgtatctgctcctctgtcaggactagatttttagtcctggcgtcaagccatatccatggcttttgctgcgaaagacaagactgcgttttttgatggtagtcttcctaaacctctttccaactgatcctcttttttgttcttggaccaggtgcaacaacatggtcatgtcttggttgcttcaatctgttactcttgaaatttctcaaagcatcacaaattatacttgtggtgctcttcaacgattgcaggagttttataacatggatcaagtccttcagttgttaactggacttaatgaatcctacaactatgtaagggctcaaattcttcttatcgaaaatttaccttccattctctaagttttttctatagttgttcaagaaaagagacaaagaactcttggatcttacttgccttctatgtctggtgttgtccataaccaaatcctcctactaggaacaaaaaacctcgaccttcttatttcaattaccataagcatggccatctggtggatatatgtttctccatggatttcctcctagatatggtgacaaaaattgaactaaaaagttcaattttcttctgtcaggctacagcaaagaacgctgaaaatctcatgcagtgcatccaaaaatatgagaactggtccagtcaatgtgtgagcaagcagaaaagtggagtggtgttttccccaaacacaacttctaggatgcgtgaggatattaagagaattattggaaagaatcaaattaaagctacagaaaagtatttgggcaatcctttcttcttcactgcgaaaaaaagagatgactatcttttcttgaaagaaaaaattttgacaaggctagaggggtggaaggctaagcatctttcacaagctgggagaacaacactgatcggttctgtcctccaaagcattccaaactattttatgtctacagtccaagtccctagtaccctatgtgaagaacttgatcgccttctggccagattttggtgggtggaaaatgctaaaaaagaaattattgtgctttgaagtgttgggatgagatatgtcaaccaaagaaatgtggaaggcttggtttccagtggtttaaagatatgaacatggcgctcctctcaaaattattttggatgatcttacagggaaatgacaaggttttgggtgagacttttcttggaaaaatactgtcataaggtcaatgcttggcaagtggaaaagcaaggaacatattccagagtttggttgcaaatggggagtgtgagttgtgggatagaccgtggatcccttggcactgccagacgacattaaggaaaggtttcagttcattcacaatcatgcattatggaaggtaaaggatctgtatctagaaggaactcgaacttggaatgaaattctgattagggattgttttgaagaggatatagctcatgagattttgaagatcaaaccgttacaagaaggacctgatatcctttctggaaagctgctaattcaggtaacttctctgtgaagagtgcctattggaccaatcaaaagcatcggtttaaggatggtatggtaatttgggagaagctatggaaggcaagaattcaccctcgcctacagcttttctgttggagaatgatttttgacatccttccaacaacctgtagaactagttttatacaggtccataaccctttgtgtagtttctgcaacacggaggtgaaatcttctctgcatttgttctgccaatgctcttttactaggtgcctttggtttagaaagggggttcgtctagattcctttcaatggtcgaatatgatggaatttggttcctggtggtgcagtattcaggattttgaatttcagttgttcacggcttgtacctgtgagatgctatggaaatggcgcaacgatatggtgcttaatggcaggcagtgtaatctggatatggtgtacatcgactgcctgcaaagaatgactgaattcctacaaaacaagttatggtttgatcaatctgatcctcctgaagttgcccctttgctgcaacaaactccaattagcaatgatttctggcgcgttcaagtggatgcttctgttgttggcaatgaagcaaggtatgtcgtgatacatctgcaagtgtagactcctgaatcgtgggtatatgttggttttgcccatgttgaaggcattcttgaaggataattgtgggtatctgctgcaatggcctttgagtcaagagaccttccttttggttggagcacttatccactttttaattattgtttatccctttgtaagtccttttacggatgttaaagttgtttttattcctaggaaggagaatgagtgtgttgattccctagctcgttgggctagaatcaccaaagttaagaacactggttggttaagggaagtggcccccttttgtggctactagtttctgtttgccttaaataaaactttacttataaaaaaaaaaacctcatcaagtcgccattactaaaggtctagtccttgcaccaactttctccactaatttaggacaacaattgactaatctttcaccagatcttactgctcattatcagtaactaatctttttattaagctaacaactccaacaatagaatgccaaatctgatctagcacctgatgttgttgcttccaacctcaatggtaacaattttatcccttcatgtttttggattgtgggcagtagtgctactcactatatatgcttttgttctaatcaattttcaagtttcaccaatgttcctcatcccaaacatgttattttaccaaatatttatttgactgccattgctaatattagtacagttcacataaaccaacatattattttaaataatttcctgcatatctcctcttttaagtacaatttttgttccattaattcttacttagaggaccaaaataatatagtgttcttcactaattcttacttagtgacatggtcttcttaattcagccatacattctcgcctgggaactaaaagatttagccttgttaccttctctgtgatacccttattcttccgtagggccctcacttggttagccatattggcatgaaagtctttcattgccttcattgcggctgaatatggaaaaagggaaagtaataaatattagcaagaatcacaagttatcatacgcacaaaagcaaaagaaagagcaaagtcaaaatgcgaatagagatccaagatcgatccctaaaattggattcagagcctttagatttttccaaagaaaaggcaagtatgttgtcccgctctaagaaactttcacactcgaagaaactaggataatgaataaggatgaaggagtctaacctagttttatgagaaggagggatgaagtgtgtgagactctcaacaatctcgtcaatgcaaaggagaaattgtttgacaaggtcctcggtaactgcttggagaggtctccactagaccctatttcccataacatgtagttcacagacaaaagaattaggacaagaaggaaaacaaagaagggtcctaaaattgcatcgtccgacaccaaaaaggtccccaaacatatggaaattagtcacgacaacatcattcaagaccttgccaaatcccgcataaacagcggtgatggagagtggaaaatgcaaaattatcggaattaaatttccttgaagcatcacaaagttttctaggttcgattgtccctactaattcttaaattttagacagcaacttgaaatgtcaccctgcatggtggcgcgcaacagattaccaatggtaaccccataaaaaacccaaagccacctagcattacaattcaaaatatgatacccagaacctatctaccaagaacacaatcacaatatgggagcaatgtggaggcacttagttataagagtaggtactgggggtgttgggctttgaaaggttgaacaaagctttgccttaaacataacattttaatggcattactcatttatgttgatgacattgtcattccagtaacaatggtgttgctactacaactttcaaaaaaaatatggaccaaaaattcaaactcaaagatcttggaccacttaagattttctttgagattgaaatagatcgatcctccaaaggtatatacatttccaaattgcctttaattttataattgctcattaaaactagttatcttagtgttaaaccagtttctactcatggaatacaacttaaagttgagttccaccgaaggatctttgctctccaatcctacttcatacagaagcctcatagtcaaactgttataccttaccatcactccttcagacttctcttttgcagttaatagactaacccagtatttggcttctcctcgagtaccttacctttaggttgcttaaagtatactgcaatacttaaaagccacacctggtcaaggcttattctttcccaatcaaaataattctcatatctcagcatatgctaaaaccagtctcaacatcaaaattttctcaaatgcctattggggaagttgcattgacacaaggcgttcgatcctaagttactgtgtctttattggaaactcccttgtctcttggaaattaaaaaagcaaccctctgtgtcctgcttatcatctgaagctaaatatcgagccacgacacatgatacatatgaaatcacatgattctgccatctaaaagcttagtattaaacacaactcccagctacacattactgtgataatgatgcaaccattcacatctcgtagaacccctgttttttcatgaacgcactaaactgttgcataggctgccatatgttcaacgtaaag

SEQ ID NO: 186265 - DNA, 1399 bp, Cannabis indica
atatacataatataatgaaagatcggtataattctctcttttctcaaaaatgaactttctctgaatctgattatgatgcctcatatatgttcatggtatgtctagttcatatcccaatacaaagtttgacccatttgcactaaaacggtctcaaaaactaaaaccctaattaggaatgtcaacctaggcattgggtgaaaccctaggtgcccaagttgacttttagggtgcaggttcatgtaatttcagctcccgagatctgtatttgattgttccatgtcttcatggtacataatattgaaagatagtgagtttattgaagtccaaacttctttttagagtttccgaagtcaacctcggcgcagggctagggactcctcccaggtcgactactatgactcgggactactcaactctgaaatgtcatctttcttgccacatgtcaccaaattccaagttaacaactacatagtctgacacacactctctccatatatataaataaaccttttgaatacacattatgaatactcttacagtggtatacaatatgataaattaataatatctctcttctttttttttttttctctaaaatgctcattgtagtcatatctacacattttgggtactttataatagcttactcaaaaatcttaagagtgtttactattttatagcaactcttacaactaccgtgtattagcaattcttagagtaaccatctagcaacatttagagcaacttagtctcatacaaccatgttagcaacccttatagcaataatgtcagcaaccaaatttgatataataaactcttagcaacctttacaacaactcatgctagtaatccctacaacaactcatgctagtaatccctacaacaactcaatctcatacaacaacatagtagcaactcttatatcaacctaatctcataaaacaacgattcaggttgctcgtgacttgggttgcgatttagattgcagcttcaattgtaattgcattgcggcttgggttgtgcaacttcaattgcagttgcattgtggcttgagttgtgatttagattgcagattcagttgcagttgcattacgtcttgggttatgacttatttgagttgcgatttctgttgcataatgaattgaattggcatgcgatttggattgtgacttgagttgtgagttatgttgcaattttttgacgggatatctctatgtattttgaattgcgacttgagttgcgattcaagttcctaattaatttacgatttaggttgcaaagaagaagaatggtagaggagttttcaaagtgatcgaggcgattgcatatggttgtctatgaaacaaatctagttttggctaatatggcaaaaaaaaaaaaaaaaaggggtaacggttgt

SEQ ID NO: 186266 - DNA, 4168 bp, Cannabis indica
tctctctctctctatctctttgttttggagatcttttgtaactcttctcatataagaagatgaaatgttattttcttataagtaatactagtgcgttattcctttttttgctgcaagagagtgaagaatatgatatgaattatcattgaacatttggaattgtggctgtctttggttatttatgtatataatattctttccttctgctcaatgctgcttgtgcagtgtctctaccttggtgatttcttacatgaattgttttttatttatttattttctttcggctcaggttttctattatttgggtgaacttaatgactcattgtcatatgcacttggagctggttccttgtttgatgtatcggaggatactgattatgttcatactcttcttggtaagtttttcttgctttgtaattcagttattaaatctgcttgctttgcttttagtggctgaaacatagttgcaattttagtttctaaattggggaaaattaaagaaaggtatagtacttcaattgaaaaataactacttccttgtgtttatttgaagatacttaaattatatttgtttatgtgaaattgggtttctttttcagctaaagctattgatgagtatgccagtctcaagtctaaggcaacagaatcaagtgatgaagcaacaaaggtggatcccaggttggaggccattgtagagagaatgctaaataagtaagtaggttcctgttttggtttcataacattcctcagctattatacttgcttacacaatttaatcaatatagatgcatcttggatggaaaatatcaacaagctatgggaattgcaattgaatgccgaagattggataaactcgaggaagcaatcacaaagagtgataatgttcatggaactctatcatattgtatcaatgtctcccatgcctttgtgaatctccgtgaatatagacaagaggtgactatatgatttttattagattattatttagggcatgtttgatgcgctgcataagaactttatattagttttcacggtccaatcatttatccggataaatgtatcaaccaaattcaataaaatgttggtagaaactttgtagtgtataaaataagacaatgcctaatttcttatacaattttcattatgttgcattgtataattttatttatcacattgtatcatgcaagttcacttttctctcacaatactttttctctccttcacatcatttactctcattcttccgaatttgatatactttgaaattgttaattttattctattttataaaaaaagtcaacattaaatacaaattatacaatataattaaaacgacatcttagtgcagttttaaaccaaacataattttgtgtaagaattatataatgcaatccaatcaaatactatactattgccataaaatataccaaacacgaccttagtgatttattgtatacaactatcatatctcatatatatgttttaaatagcctctttctgctgttggtttattgatgtcattttttttggtattgtaacatttcaacattttgaggggatctattgcacttatgactgagctgctgttatgtgctctgcaattttgtgctaggtacttcgtctgcttgtcaaagtttatcaaaagctgccttctccagactacttgagtatttgtcaatgtctcatgttcttgggtgaacctgagggtgttgctagcatattggaaaagcttcttcgttctgagaacaaggatgatgccctccttgcttttcaaatagcctttgatctggtagagaatgagcatcaggcttttctcttaaatgtaagagaccgccttccagctccaaaagatcaacctacagagtcagcgcagccaaaatctgctgaggcggaatcttctcaaagtgaagctgctgctacagaggatgtacagatgaatgaagtaactgtacgcgaagcagatccaagtgaagtgacatattcagagaggtttacaaaaatcaagggaattttgtcgggagagacatcaattcagttgaccctacaatttttgtacagccacaacaagtgaggcagtcatattctctaaatcatgttcttttataattcattgaagtattttggttcctgatgcttacataattattggctttcgttcgtctacagatccgatcttctaattctgaagacaataaagcagtctgttgaaatgagaaatagcgtctgtcatagtgcaacaatttatgccaatgctattatgcatgctggaactactgtggacacatttctcagggagaacctggtaaataatatgttttaatttatcaactgtatcccttttttatgattagttatttgttatgacttgcttttttgttgaatcgacaggactggttaagcagagccacaaattgggccaaatttagtgctacagcaggattgggtgttattcatagaggccacttgcagcagggaagatccctaatggcaccttacttgcctcagggtggggctggaggtggtggtagtccatactcggaaggtggtgctctgtatgctctcggtctcattcatgccaaccatggtgagggtatcaaacaatttcttcgtgacagcctacgaagtactaatgttgaggtattatttttatgtttctaaatttcatgtctatttttaattgctccgtcgccacagaactctgatgagtctatttaatccacaggttattcaacatggtgcatgcttgggtcttggtttggcagctttaggaactgctgatgaggacatttacgatgatattaaaagtgtcctatatactgacagtgctgttgctggtgaagctgctggtattagtatgggtttactcatggtcggaacagcaagtgagaaagctagtgagatgcttgcttatgctcatgagacacagcatgagaagatcataaggtaaaaatggtttcatgatctggatgctgtgctgatatttttttataaagttgaaatttgtctttaattcttgcttacatggatattgtgttacagaggattagcattaggaatagcccttacagtctatggaagggaagaagaagcggacactttgattgagcagatgactcgtgatcaagatcctatactacgttatggtggtatgtatgcattggcactggcctatagtggtactgcaaacaacaaggccatccgccagcttcttcactttgctgtatcagatgtgagcgatgatgttaggaggactgctgttttggcacttgggtttgtactgtattccgagccagagcaggttggtggccttttcctttgtcactcgtagcggtcctttcatttttttaacgttcattgttaaagtaatttagtcttatctactcatttatatttgagtatctttttttctttttcctgaaaaatgttgtgattttcttttttatgcccctctataaatatatccgtatacatgaaatctctttcagaagtatcggtttgccaatgcatggtacccaatttgcgttgttatcttatttgtctgctttgtgaattgcagacacctcgaattgtttccctgttatctgagtcttacaacccacatgttcgatacggagcggctcttgctgtgggcatctcttgtgctggtactgggctgagtgaagctatttctttgttagagcctttgacgtcagatgttgttgactttgttcgtcaaggtgctctcattgcaatggctatggtaatggtccagattagtgaagccagtgattcttgtgttggaacattcaggtactacattacgttttgcagatctttaaagttatcgatatatcttatttctttgatgatactgctttgtagttatgttctatattttactgtaatataggcggcagttggaaaaaataattctcgataagcatgaagacacgatgagcaagatgggagccattctggcctccggaattcttgatgccggtggaaggaatgtcaccataaggttgctttctaagactaagcatgacaaaattactgcagttgtgggtcttgctgttttcagccagttttggtattggtacccacttatttatttcgtaagcttggcattctcgcctactgcttttattggactgaactatgacttgaaggttccaaagttcgatttcct

SEQ ID NO: 186267 - DNA, 5289 bp, Cannabis indica
catttagtgtagttaaaagtgataatgaatcgggtttcgttgaagaatattaaggcttattggtttttattgcaggaaattcgcgaattgcaagaacttcagcggactttctatacttttcttcatgtgatagccacacacgacctttcttctgttttcttatctcctaaaagcagggagtacttacatcctataatgcagttgctattgtttactgcttgtaagcacaaggatatcactgttagaaaggtttgatacattctttggctctcttgtttgtttacttcaataacaaaagggtgacgaacttattgggcggtcggatctgatttctttcatttatgcatttcctgtgacttaggcatgtgttcagatatttattagattaatcaaagattggtgcggcaggcctcaaacagaagaaatggtaagttcatacttcagatagggttatttctgttgattaaattgacattcctcaatggcactaacatttttctttttccagttacctggtttccaaagcttcataatagaaaactttgcaacgcattgttgtttgtacagcgtgcttgaaaagtcctttgaatttcgtgatgcaaatactgtaagtttaattgaatactgtttttaatttctcattttccatattatcaactcataattctccccacatatcttttattattactattttaaaaacaaaagctgtaggcaaaataattgagaaaataagatctattataatgttacaatatcaaaagagccatttctttattgggactgtccaattgagtattattaataacaatttctgaaaatcaataatttttatttttggatttggcaacaccaccatttgtgcaaaaatttaagcactggtgtcatatattatatttggtgtttgtattagaacctttttcaagcctttggggacttgtcttgttgttttactttgaatactaccgtatgcagattgctttgttcggagaaattgtattagctcagaaggttatgtacgagaagtttggggatgattttctagttcatgttgtttcaaaaggcctcccaccagcacattgcccacaggatatggcagagcagtattgccagaagttgcaggttgtgttttaatctttcgtttgagctaaccatttatattttgatgtctatgaatagttaacattgactcacggtatttacatagttattttgaaatatttaaatcatccttattgatattcatcttccgatttgtgtgtgtattacaaatttccataccagataattaaaataaattcttcggacaaccacaaacattatgttgtagtgactagtgaagtgttccttagggttaaaaagcatttatggtaagtgtgtaggtaggggtggaaaaacgtgtcattgggttgtgtacttcatatcatatattatatgacccgcttctatatttcgtgttaggcatgtcgacttgttttttgattcgtgtctaattttctcaaccctaattcgatccgtaaaaaattacgtcgtgttcgctttgctattattgaaactggagttgtagagaaaaatgatagtttaggttccattaaaaaatttacatttatgtatatattgttttttatatatattttaaaaattaagatttttaaaatattttcaatttcattttaaagaaaattaaacttaatattttttaactttaacattgaatcactaagtatttatttttatataattatattattcattaattattttatattattttttttgaaaaaaccatgtcaaacgtatcaaatttgtgtcaagaggttgtgttgtgtttgattcattttattttgtgtcaagtcgtgtcaatttgcgtctaattttttcgaccctatcctgtaaagttcgtgtttgtgtttacgtgccgtgtcgaaacctattttgccactcctaagtgtagaaattctttccaagtttcaactatgatttagtgaaatgcaaccaaagctttattgggaaatttcaatagcaacttactgataagagtttcttttttaattaattttttcaagtattgagatcacatattcacttaatttcatctctgattctgattctgatactgatctatttattaatttctctcagggttgtgatataaaggcattgaaatcattctatcagtccttcattgaaaacttaagggttcaccagaatggcagccttgttttcagatagcatcgtaaagttgttggtcgaaattgcttgctctccacataacatcattctgtcctgtatcatggcaatgcgtttttgtttgccaaaggtaaccataaaccattatgcaaatgtctctgttaaacttcttactgttcttttataacattttccagtaaaacttgcagggattttgtgtgtacatatttttttctttctttcggctgtcttttgaatgaggtataaaaaacactcctattatatttaaagagatcaattttatttccccttacataaatatttttgcacggttgctcattctctgcctttttgtttgtaacgcacgcagttgtaaatttgaggaggaaattttgcctattaaaattttgcttcaccatcacccccaattggagctgcttggtctgtattcaagcctcatggattttgtcaatattgttcattttcccctctataattttgagtctttaattttaatttattttttaattttcttttttgggatttatagagtgaattgttctaattcagttataaattatgcttcacagtttgaagctcctgtagtctattaatttttattattattgttcccttgtgaaaataaaaatcaggtaacttatacaagttttcctcaattgttatcattgtttttcttcttcttatatgtttattgtctaaactgaaaatagttgagaaaaatttatagtaatggtatgaacagaagtcatccttgctcgaatttttctgcagcttttactcactatttgtttttatttgaagattatgaagtggacacgttaattttgaccgatcagataattatattattagacaggtgaagcatacttttaaactttcaacttagctgtaagccataaacatttctttttggtttttctctttaggaatttaaggaatctaatcgaaattgggttggtgaatttcagcatcacaaagaaatgacccaatatttctctgtccttgttttatgaccattaaaattaatagttagaatgtgttttaaaattaatttctaaaaaaaaaatgtgctttgaaatttctactgtagccaaatatgtttctcattggacccatcactaatggattttttttgtatcgtttggtgcaaattacaaaaatcaatgtatcttggctatctttttttaaaaaaatcaaataagatttcagtcgtttgcaatataaattttgtcaattaacgtgaagaccttaacgacttctaaagcatcgaaatgaacttattataaagctataacagactgcactaatatttcaaaccattcaattcatgatgtcaaatcatttctattcataatttctgcctttttgtgatgttttatatttttcattcaaaaattgtacatttaatataaataaaaaaagggaaattttgttactttctaggattataaattaattagtagtattgtgcaaattgaagctataccacgtgtgaaaatttcgcccattttaggcctaaatcattctaaacaaactggctataatgaaaaatagacaagaaaatttaagcgcactaatctattaattgacatcgtcaagtaaaatcttccaaataaatcttttttaatgatgataatgagtagtctcttatttagccctgaaactgtatttacattttaatttattttcctccgattcccattaaagaggcagctaaaaattgaccacacatcaacttgatctagtctcctcacaaacgttttctactatgacagcaccaccattagttataatcacttgatcgagtttctctattggagtttactaatcgaacctatataattgaaaatgttcacttcaattattatttatactaacattataaaaaaatctcctgactgttccatcaaaaaaagaaaatctctcaactgacttttttgtcatttgaaaggaaataaaaaacaaaaatgggttggtgcaaccctgaaatgattaccttaaatgtgaaggcttttatcggcttgcctccttttactaaatataatgaactaatatatagatttgtttgtagactcatcatttccttggaagaaaaactagtttaaattcgaagctagtggcatagcagactctcatttgtcgcccaaaaacaaatataaaacgtcacaattactaaactttattttcattttctttcctagaaaaataaataatacattggtttagttgcattattacatggaacatttcgtccataaaacaatttccatagaatattgacaaagctaacaaacaaattcataacagacaaagtaacaataattaattccgagaaaaaactttcacaaaataattaataatataaaaaaatgccgagcaaaaacaaaaattggcaaagaaacaatttgaaataataggttaaaattatagacctcattttatgctataagtttcaacagtcgtcagcagaaaagatgtcactcgaaatccatttaacaaagacttctaatatttataatttactttggaaaatttaaggtcacgtacataatttttattttctttggccgtaaataattaataaatattggtcacgtaagaaaggttgattttgtgtttgcaaattgcagctccctgcttgacccgcgatgatcagtcatttcgtataatataaatatatattaaaaaaagttcaattatatactatttgttagctatttattgttgatggatatatgatatagttaagtaagatatttttgtaaattttagaaattttttgaataatttatagtaattttttatttttacacctttaaaatttagtttttttttttttttttaatttttttattatttctcacggtatgcataaaaactcatatagtaactaatggatcgactttaatcgcaatcaaaatctacataacaacccacattaaaattattgtagcaactcaaaccgtaaatttaaacattagaattatgctacttacaaacttaaaataattgggattatgccacgtaaatatattttaaatttttcatatatacgtatatattttaagtatgacatca

SEQ ID NO: 186268 - DNA, 2810 bp, Cannabis indica
tccctttttcttataactattatctatatataatggaacagcattgagaaaagagtttcagctccagcagcacaaacctcacactactctctctccctctctctaaattatagtgagtggtagtagttcttagttataactgatagagagagatggggaggagtccttgttgttctaaagaaggcttaaatagaggagcatggactgctatggaagatagaatactgagtgagtatattaaagttcatggtgaaggaaaatggagaagccttcctaaaagagcaggtatatattatatagttaattagtgtctttaattttttccattttatactagaatatatcattaatggagtagataaaatttgcagggctaaagagatgtgggaagagttgccggctgagatggctcaactatctgagacctgatatcaaaagaggaaacatttctccggacgaagaggagctaattatcaggcttcacaacctcttaggcaacaggtcagtagtcgctaataattatatatatgtcgctttctaagctatttattttttgtaaatttaatttacttctagaaagagtgtcgatcgagtatttaattctgacgcatgtatgcattatatatgtttgaaatattatttaatttttaaaaattatcaaaccaaagaaaaagaacaatacaaaaatcactaaaaacaaactaattggccaaacacgtcattatatgtacattcttcatttcttcatattaatttgagaaaagtaaacgaaaaagagtgacaaaccattaataagagtatagtgtggaaattgtaacaattaatgtatattcaactaactagtacgatcaataattaattattcatgcgcagatggtctttgatagctgggcggcttccaggccgaacagacaatgaaatcaagaactattggaacacaaatattgggaagaaagttcaagttgcagctgatcatcacaacaactttcttacaaagtccaataataatacgacaagtcgtaaagcatcatccaatattcgttgtagtagcagtagtactactactggtagatcattacaacagcagcagttattagtgtcaacaaagctgaaaactactagtactactactagtgctgctgcagatcatgatcatgatcatgatcaattgcagccatctaataagacaaataataataataatcaaggtaattcaaatgtagttcgaaccgtagccacaaggtgcaccaaagttgtactcctttcccaaacagaagcacaaaacaaagcactaccacccgaacatcatcatcatcatcaggactactgcagtaattctgatcctacggttgacgattgctggttgccctcagtggttgattacgatgaacaattagtcaacggctgtgatcaaaccacggggctcgattcctctgtagttcctggttactcccacctcatcagtatgattaatgatgatgatgataataataataataataatattgagtttgagaaatccaatgatcctggagattacttgtcggaattccttgacgttgactttggatttattaataatgatgacgtgggtagtcaggtaatcagttcgtccaatcaaaaaggaggcgcgtgtagctcggatcaatcttatactgatcataataatagtgaaactttcttcttctctcaagatatgatgtttggcgtggatttagattcggcttcagcctctctccagctcactgacccagttgacatggattggcttcacgactagactagttaatttaactagaaaaatcaataagctataaagaataattataaattgtttgagcgttaataaaagcaaaaataataaacagagatgagtgtacaataattagtcgtgtaataattataagaatgtttaattacctacgtatttttatgtaaagtatgtataatctgtagtcttctgaaccatatgtattcgaataatattaatgtgtgcatctggctaaatttttgcatgtcccgctaatttatataatcatcttgggtttgattagtgccttcttttcaatttttatttaaattaacgtacatataaacaggatttatcattatatatatgcattagagatattgaaaaatttacaaccaataattacaataataataataagtaggcaaattgatctcattattagtcaaaaactttcttaattttaaagaaaaactccaaaatgcccttgaattatgattactaaatggtgaatttggtaaaacttatcaaacgttaacacaaatttatgcatgtgaagttggtctttaatttttttggttattctatgaaaaagttgtccttgcaacctttgcatatgttttcaaaacatgtcattatgctttagtttattttgttaacacatatacgtacgtttcggcgaattaatcccaaatttctagttgaattaaatacaatattatgtaattaagtggaatatgctaacttatattggcaatacacattacatagatttcaacaaaactaattaacaacaaaaagaaaaggttttcggagataaatttacacaaacacgtacataaattaaagttagaaaaatcataatatacaagcatgagatttttggttctatgaagatacttttctttacaattatctagtgtattaaactaaattatactactacaaaaataatttttcctaatatttttaaataatcgggtttctataattattacttatataccatcgttgcaaaacaaaccgaataaggcactgttttaaaccgtgccttacggta

SEQ ID NO: 186269 - DNA, 1375 bp, Cannabis indica
cataccaagcacaacatccagtccccaaattggtaacacaaacaaatctacaacaaacttatgtccttgtaagcttaactcaactcccaaacaaacctgtgaacaccatagagaatttccatttcccatatatactttaaatttttttgtgtcagaacactgtaatcccagccgaagtgccaactcttcttgaataaaattgttgttactcccagtgtcaatcaatacttctagcgattcagaaccgtgttgagcaatgatacgaaaaatacgaggattggcagcattagaaagtgcattcaaactgacctcttcagccactgtttcagagcaatcagagagaatctccatagccgtttcgatgtgcgcatcctcctcctcctcctgggcacacagtatgagcacccgattcttacatttgtgtcccgcactaaatttctcatcacatgtgaaacatagacccttctcacgcttctccttaagttccgctggagataatcgtttgaccggtaatgctggttgatgtgccttaggaatcggtgatggtgtgatagttgtggttgtagctgtcttcggtgatgctggaaagctgttctgaattgagggcgatggagtaactctcggaggccattgagggcgatatccatcaccacgagctcgagtgaggatgtcatcatggcgatcctcatatagttgtgccttcgccatggcgtctgcgagatcgaatggtttagacaataatagttctcttcgaatttctgttttcaggccccaaacaaagtaattcagaaagtagtgatcgggaacacccgaaatctgagtcatcaactgttcaaattcctcccgaaacgtcgatactctccctgtttgcaccaacttagcaatttttcccagtggatcatcataaatggatgtgccgaacctcaaccgtaatgctcgcaagaacgactcccaatctgcgaatccgccccccttctccatccattgataccaagtggacggagttccttcaagatgaaaagcaaccatagccaatcgcacagatggatccacctgatggagatcaaagaacttgttcatcttataaatccattcttcgacccctgccccttcgaatctgggtaccttgaccctcatcactttcaatatggaattcacctcacgagtctcagtgttggaattcgaacggtgtatggtcgccgactctgttgcgtgattggaattaccgaattccccctgtggtttagacgctgaaaactgaagctggtccacacgaatatccaaacgagccacctgttcatccaatttctcagatactttggtgaattgttcttcggtatgcttgtggaggctggcctccaaggcttgaatcatt

SEQ ID NO: 186270 - DNA, 1860 bp, Cannabis indica
gaaaataatgtggaaaaaaatttcaaaaaaaaaaatcactttagatactattttttttttttttaaattttaaaattgggttctggtagtttctcggtgggtggtttctatacagattttggttgcttcgttagttggtacaagagtttctgtgtaaaatttcgtaaaattacaagaagactaatttaaaatgtaaaaataaaaaaactccaattaaaaaccaatgagatgctttcaaagaatataaaaaaaacgaatgaagatgttctaaattaatatgcagctttgaaaaagatgttctaaatatgcagagaagtgaactaaggagatgatgagattgttttattaattgtacatgtttagacaaaattagaaagaagatgatgaggacaggtagatataattgggtttattagacattgttttgttaaggacatataggatttcttcctgggccaccatagtaaaactcagggtcagcaatataatctccaacatagtcaacatcatagcagttgtactcatcagtgtaagtctcaacccattcagggaatttcaagtagagagagttgtcatggattcggattctcttaatgtagcctgagtttccatacattccctcaggaaacctaccatttcccattgcggtggaactgtgtggtgtgtgccccactctatcgctgtacacctctcctccccactccacgctgtccgcgttcgaacgcagctctttgaatagctccccaggccaataccctatctttatcctatttccgtattccacccaccagttgcttgtttcagcatcctacataattaaaatatatataaccaacaacacaaaacataccaattatatatctatttataatttatttaccttgaaaatgtaaatggttatttcgtaagaaaggtcatgagggaaggatgtggggtagattgctgcgccaagagctatttcattgctcgtttgaacaaagcctgggcatgttagatcaaagcaaccacttgtttttgaaccatcactctgtatgaaaaattattattaataactatatggctacatatgtttcgatctctccaaattaattataatgaattattattaataaattaccgtccaatatacaaagaatcgagtctgtctgtctccataaagacgcgggtttacctgattatcatcatgcatgatataattgacacaattaattattaattcataagaaaaaagagagttaataattaattaattaccgcccatcctgattcgacgctttcgtaatcattgtaatcaccattggagagtgtaacttgagaagtggagtaatcatcgtctttctccacttgaggataacaaactttgatgtctccttttgctcctaaatatctataccctactgtaagcagtattgccttctgatcgatcgataaaaaatgtattataataattaaacatctctcatatcatatgagtcagttaattaatattatatatgacttaattaataataataatagtatataatacgtacgtaccgagtggtttgtttgtagaagagacaaattattgttattatgtgaatggtgtggaggagttttccttataatattagcagcagttgtagtaagtctactgttgattattcctcgtcgaactggaatggttccctttggacaactcattccacttcttttccatacttgactaattcttatttccctattattaatatcatcatcatttctctctgcggccttattatagctgggtgccatctgaatattaacaatattttaacattaatataatggggactcccaaaacattaatattttaacattaaatataataaatttttt

SEQ ID NO: 186271 - DNA, 979 bp, Cannabis indica
aaaaagacacaattaatataagagatcaaatataagaaagatgtttgaactttaaatttgaattgtaatattttgaaaaagaattacactttcttgtatagccaaatttaatataatatttataaatattataatcgtagaattacataaagtactattttttgttctttgaaagaacacgaaaataataaaaaaaattacataaaagtgacacgaaaataacatccaaataatatcaaaatatataacaataaaaaataacatacagataacaaaaaattaacaagagatcatattttttgtaaataaaattataaaaattgtaaaaatatttaaaattttgtaaagccgtatttttgttattattgttatttgtgtatgtctgcagcatgttacactgtaatttaatttttaagtaccgctggccatagtgaatgagagttgaatatcaccacaatggggactatcatcgcaaatgcaaatgaagatgcacaatatttggttcttggtgctactaaaacaccaactcccacaacatctgaccgccaaactaagtgctcggtggtacctttgaatcaaaagaatgtgattagttcattattcttaattaaaagaatttgataagttcattattaatttgaataaaattgaaccaatctctgcctgatgcatctaattactcgagtttatattgtaacaattatagtagagggtgagtgagatgagaggggaaaaagataaatacccctgaccactttctttgtcatctttcaatatagttataaactttctgagcatgatttaatatagtgctcacgccactaaaatatgcaaaacaaacatagcatgaaaggttaaagcacatgcacacccagagctttgaagctctttctttgtgattatctcctattaatagcagggatggagggaaaaattaacttcagaagggccataagattttttattaaaaataaaaaaa

SEQ ID NO: 186272 - DNA, 5237 bp, Cannabis indica
aaaaaaagaaagaaaaacaaaatgaaccaatagatatggagatttctaccagataggcaaaatgggggcgattacgagagatagcgagagaaaaagatagaatatacctggatccattgtatgcacaatagtagagggacagggacaaagatcacatcaacttagttgaggtgctgtggagaagatgggtgtgagggccgaagactcgagcacagacgcaagacatagtctgacaggagtctgggttagaatttggtgattgcggtctgggcgattgttgtctacccaattggtatttggtcatggtgattggatttggattggggtttggctcattttattttggcgataggataaggggaagaagaatggagaacaaaagaaaggaagaagaaatatatttgtatttcctttattatgattaattagccgaacaaaagtgagagaaattattttttttcatttatttttctcattgggttttttcgtcatttgtttggaaatctaacaatggaatcctggaattctttttaacttaaaatcacataccatgttgtgggttggattgcgttattctcttggtcaatcagtttctatctctaagtcatcttgaatttttgtcgaaataggtaactatctaaaaaagagaaaaataaaattaataaatgtgtcatacttttttgatttgatgccctgccaacaaagactttttggacttctagttttggaataagttctttcgaaccattgtttataccgatacactacataacaaagtttgcgagggcctatcccttgatggaaagtataggatgatactaaatatcgaattggctgagctccatggccaactttaataattttctagagaattctagtttttgtatcacttggaggagagggtggtttgtcgataccttgtttacatgggcctgaaagtattgttgtagcttctgcgacgcgattagcaagaaataggacaacttatcaatcatgggatatctggactctatgcctagtagtcttttgcttaaatcatacactagaagttgtacatttcctttttctagcactaaggttgcacttatatgatgatccaaactaccaggtataggtacaatggctggcccttaactggtttggatagggcagaagcttttgctagatgttccttcatcttccagtaggcttcttcacactctgtagtccatttaaacttcttacatttgcataaaacattaaaaaatagtatgcacttgtcagttgattttgagacaaatctgttgagcgttgcgatccttcttgatagactttggtcgtctttatgctttttggaagacaacatgtccaggaaggctttgatctttttaggatgagcttcaattccccagaaaatgacgatgaaacccaagaatttccccgaagaaactccataggtttatttcttagggttgagcatcattttgtacttcaagatgatagcaaaggcttcttccagatcatttctatgctccctaaggttttggactttaccagcacgtcgtccatataaacctccatgatttccccaaagacacccttgaacatcttgtttaccagtctctgatacattgctatggcgttcttgggcccataaggcataacaacatagcagtacacacccttgtctatatagaaattggtgcgctcttgatctgcaacatgtattttgatttggttttagccctagtatgcatccatgaagcctaatagttcataccttaaagtggcatgcaccatttgatcaatttacggaagtgggaagcagtcatttgggtaggctttattcatgtttgtgaaatgaatgctcattctccatgttctatttggctttgggaccatcacgggatttaatagccaaactggatatagagcctcctagaggaactctatagaggttggatgggtactctaaaagcttcttcaacttcttgcatgatcataaaaaaatttttagtcgagattttgggaaatttccttgcgctcctctgatcgcccatgagcactttgacacttccattgtgacatgggaattttcatacgcgtgtaatggagctaatcactttgaaattgactaagactgggcgtcgtaggatagcattgtaggtaatgggggaatccactactacaaacatacaatgcataaatgtagaagcattattacttccaaccacacccccattaaatgtaacttggagttggaatttccccattggcagtagggaatctccattgaagcttggaacgtagttcgggcatggtgtaagatcaactttagttaacccaattctcggaaggaaaacttgaacagtatgatgattgagcttacatggtccactagcactcttgacactccattgttggcaatttgtgcttcaatcaccagcagatcgttgtacgaaaagagtacattctcaaggtcctctttcatgaaggtgatgggaaaattcatcattcttgcaagatgggctagggattgcactagggcacatagttccccttcatgatccaacacgtttaaatatcttttctgaaaattgcaaatacttctgacgatttgcttccctctagggatagtcaccacataactgtccatggaggcagagcaaaccttggacaatatgggttctcgggtttaggagcaaggactaccatggtagcctatgcgttgggtacctcataaggggcttgaatggttagggcttgcatcattagagcttgtaaggttggaggttgtattccaagagcttaaaggagactttactgctgcgaaagatttatgtatccctgatgttcaaagattacgagttggatgtgagttataccttgtacaagatatattacggggatccaaactcaatgactaatatggtcagaatgggccaatgtttctatctcgtcttttaaataatcacactcattggtagtgtggcaaacataatcacggtacccgtacctcttactttggtatcatattttcttccatgctttaaagatctaaggtggccttttgtagtggaccatattgtaagtatccttatagtgattttctctagtgtcgattaagctggtgtactaagtgtattttgggtcatactacattcttgctttctttggagcctcgctctgatactagctttttccactactcttgctccgtaaatagcttacatttgattaaagaaaataaaattttgactatctgacagtgccactacatccaatttgtattgccccgtagttaaaaaaattagtctaggtaagtgcatactcggggacagcagattcgtagactgtaggagttgtgtgctggctactggttttctaaagctgagaattgtagtataaaattcgtgttactgggtggagttggtgctagagcatcttcgaaagcatgagcattagtgacttctaaattaacaattccttgggccttggacgtgaattcagatagagtttcgaccctttttccttacatttcgctctagaggaaagatcgaactgctaatccagatcgaagggccacaagctttatctcgtcatggacttggtctttaccgcctctccatcagtctttggatgaaagattttaggctcccatgcctattttttgatattggtttgggatccaacctccatgttaaagtccttgggggtaatgaattgttctctaaatgtggattgtaggttttgccaatcgtgaactaatcctggaggaagcctcttccactagtcttccatggacatggttaatgtcaacagaaaataaaggcacttagtatcatcgctagcttttcccatttgcattagcaggttatatttggaaaatgggcatgtgtgttcgtacttccttcatataactccatttgtggcattttgaaatttttttggtagtggagcctctatgatccatcagacacatggttctagatcttcctccatcagagatggactcactttatttccttacaagcttggccagggcagctctttgctcttcagagcacttgctatcattgtccaaaagctaacacccacctatcctgtcattgacatggttctggagattgtctccatgaggccttgccctttcacctttggctttttcttatttcgtgtctaggctcctacagaggtctatagtggacaaactatcttcaagagaaattatctctgcctcccaaccttggtttacagaattgcaagggtggcttttggccggccttagtattgaagcatcgggtctaccactttggtcaaccttggctcacagatcggaagggtatccctgccatggtgcatgggtggccttccttttccgcaaaggtcatttgagtacatctagttagccctaggtacgacgggagctgtctttttattaagttcatccactttacctttccctttgtctttcactgagcagaggttccagtgttgacagagtttacactttttgtgggattatttcccttgtggacaggctcctctcgagcattctcctctgagatttccccatggacctcaagtctagcctgtaggtgagccaacatttttttgcatctgatgggagacatcttcttgttttgccagctttggatgagtttttaaaagttccttagccataagatatagcttgggatcttgctcataataatatccatgtatataataccaatctttaatctcatcgtcgttctggccatcaccaatgcctttaaggtcttattctttgttgttcgtctggtctttgtcactagggttttcatcgataaatttttcctgaggattggctttctcgattggattgctgctagttttgaatgtttctgcatctctcgcagtgctttgacgagcgtgcactctagagggtaggttaacatcatccatgatgacatcctgatcagggttaatgggcctaatgaaagtctttctggtataaactatttttattgatactatttggcttaaagtctttcctcagctttcaatgaaagcaccaaaatatttactgtgattttttgaaactcaatatatcaaataacaactaagaaaaatgaatcaaatagatgagaaaggagatagagatatttatgtggtttgggtattaatgaacccgagtcaatgagtcagctgtattggtcttaaaagccttgaagtattgcaatgggattcttcacaagcttaagaaccctagcttt

SEQ ID NO: 186273 - DNA, 3259 bp, Cannabis indica
atggattcagtataaatatagaaaaactacctaaactctgcctcaaatgtggagtcatctcacatgatcaaaaattctgcttttaaacctccaacggtcacaaaagactccactggcgtcctttttttcctctgtttgggaattggatgaaacatgaagaacctgctagacggccattctccaccgatttgcccaaatggtttcaagaatggattattcaaaagcgacttacagtggacaatcaattcaagaaacaatgaaagttgaatcaatcgatggtgattactgattcctgggaggctagagaatcccgtcgacaacttcccggtaagcgaagactagttgagcagcttgtggaggaacttccagccacggaggaggaaagagtttgtcgatttccgatggtcacgctgcccagaattggagaggtttgcccctttgatgatactgcaaacctggtggttccgaaagtccctgcactccctcctcatttggattcatcagttgccgtcaatgacagtgatatctcttcacccacgcagaccagcagtgatagtaccctggtctcctctacagcaccagacttttccaaagaaggacaaacacctactgaagcctcttccatgactcctgctatttgcctttcttcgtcggactgtattggagggaactcagagaggggtaaaatcaatttcaaagatcgtatggggtcttattcagccctgctgggctctcaagcccaacccattcagtggccctcgaatgacttatggaatctgggcttcaaaactcttacgggccttggtactgtggacaaattcatgacggagccctctctcttcaaccctatcttgggcattgaggattttaggtccctagagtctgactttgggcctaaaaaacgtaaagcccttgagggtgttttcattgacccgaataacataaacaagcctgcattgggcccaatgattagccctaatacacagtctccatcgccatctttgaatgaaacgcaagccctctctccctctcagtcaaacgaccctaaggtggatcctacgacatctcgagcggttagctcttattccccaggctcctcagacactattattcagagaaggaaaagaggaagaccagctctcaaagattcaggaaagtcaattcttgattcagctaacctgagtccccagtctggaataaaacgtagaggaagaccaagaaaatcggagggcatcctcgaccctaaaactcaatctctcaaaagaaaatcgtccattgcttcaaggaagagacatgcttcaattgtttcatgctgggataaaaacactttcgatttaaaggtagacctaaacaatcattttgtcattgttgattgtagttcgaaaccaagctcttcgtgtgtaattgaagaagtgaaagaacagaatgacgacgagggactcaaaccaagccaggttttttgttttggggctgtggagacttgcccagaaaagtcccccgaagcattatgaaagcaatcgcttggaactgtcgtggtctcgggaatgcagcgatagttcgacaactgaaggatttaatccggaagtcgaatcccgaattacttgtgttatcagaagtcagattacaggaagggaagctaaaaacttttatgtcaaagattcatttcgaaattttttctatgtccctccagttggtaccgctggaggccttgtcatgtgttggatgaaaggtgttgattgcaaaattgaaagtgcggataagtttaaataactgcgtgtatttcttcggaccccccgagtaaaccttggatcttcatgggaatttatggaccgcctgtctacgcggataaagaagccttctggactgatgtgggagactatgttagtaattgtcacctccgggttgtgctgatgggtgatcttagcggtactcttaaggatagtgattgcctcaactactccaggacgtgtaatattgcaagatactcgtttgatcttagaagggcggtgcaaagttcagggcttatcgacccttgcttccttgggactaaattcacatggttcaaaaagggttcgagttcgacagggggcagcagcttaaagagagccagacttgacagggctttggcaaatgttgagtggagactcgccaggcctaatgctattgtgagccaccttacagcgtcaagttcggatcactctcccattcttttggacacttgcggtggaagacattgcaccaaacctcaatttaaatacgaattgatgtgggatcgtgaccctagaatcttctgggtcgtcaaaaatgcgtggatgttgcaccctcatgaaaaccctatggttaacatgtatcacaaactcaaagctactaaagatcatttacggaagtggaacttttctcactttcgaaaactttccactcagatttcagaggctcgtactagacttttggagttagaaagcactaatctagttgatgaagcaactcactctgaagcccgggcgactctaaatgaggctttagcaagagaagaaacgttttggcgccaaaaatcgagagtgtcttggttgaaggagggagaccgtgcaactaaattctttatggcaagtacggtaactcggaggaggcgtaactatatccaatcattgaaaaatgaacagggtgattcatttgaagaaccaaaagatatagccacggtttttataaacaaattcagtaagatcttctcgaaaactcagaaccgttcatgtttgggagactttgagtggcattttgctggattgaattctcatctgggggaggatctttatcacactccaaatgaggaggaagtctataatgcgctcaaggccatgggacctgacagagcccctgggcctgatggactccctgctgccttcttcaagactcactgggatactattagaggagatcttatggctatgatgcagtacttcttttaccacggcgaagctccctgactttataaacgacaccaacctagtgctcattcccaagaaggataatccggtgactgttaacgacttttcgccccattgttctatgtaacgtcgtgtataaatgtaatctctaagatcttggccttgcgtcttaggccgatcctgccccatataatcactcctgctcaaactgcttttatcaaagggagatcaatctgagagaacattgcgatggcccaggaaattgtccactctatgtcaaagaagaagggatcaaaaggttttatgatgatcaaatt

SEQ ID NO: 186274 - DNA, 3227 bp, Cannabis indica
ttggaaaatatgcaagtgaattggagaaccatggtcatgaagttcgaaagtgcgggtgcttgggtgactttacaaggtgatcccagtttgtgcaagtcccctatttcactcaaagctatggtcttaacagtagagaaagggggagaaggttattgggttcacttgaacacagtggctgctgataaaaccggagaacaaccgccaatcctagaatcgattgctgaacttctcgacaagtatcaggatgccttttgaaactgccccccggtttacccccagttcgttcccgcgaacatgctatcactttgaagcctggcacgggacctatttcggttcgaccttaccgatatgcgcagatacagaagagtgaaatagagaaaatggtgagagaaatgtttcatgctggaatcgttcggcccagtacaagtccattctctagtccggtattgctcgtgaagaagaaagacggtagttggcgattctgtgtggattaccgggctttgaaccgtgaaactgtggctgataagtttcctatttcagttattgacgagcttttggatgagctccacggggctaccattttttctaaaattgatttgaagtcgggataccatcaaattcgaatgacgccgcaagatgtagagaagacaacttttcgcactcatgagggacattatgaattcttggtgatgcccttcggtctcacaaacgcaccagccactttccaagcgctgatgaatgaggtatttcgtgattttcgcggtgattgtgtgttggtattttttgatgacattcttgtgtacagccctactttagagtcacatactattcaccttgaattagtgcttgcacgactacaacaacaccaattgtatgctaacaagaagaaatgtacctttggccaacctcaagttgaatatttgggccatgtgatctcatcccaaggtgtggccgcggatccgagtaaaattgcagccatagtgtcatggccggtccctaacaccatcaaagacctccgtggtttcttgggcctcacgggtactaccgcaagtttgttcaaggctatgggggtattgctagaccactcactgatcagttgaagaaggatgccttctcttggtcacccgaagcgcaagttgctttcgaccaacttaaacgggccatgtgttcagttcccgtattggcactcccagattttacagctccattcgtggtagaaatggatgcttcgggcaccggtcttggggctgtccttatgcaacacagccgccccattgcctatttcagcaaggttttgtctactcgtgcgcgcatgaagtcggtttatgagcgagagttgatggctattgttttggcaatccaaaaatggcgtccttatcttttgggtcgcaagtttgtggtgcgcacggaccaacgaagtctcaaatatttattggagcagcgtttggtttccatggagcatcagaagtggcttaccaagctccttggttatgacttcgaaatacaatacaaacccgaccttgaaaatagggcggctgatgcactttctcgggtcaatggggacgtttctcttgcggccatctcagtgcccaccgtgctgtccataccggatttacagcgacaaattgcagccgatccctttctctctcaagtgaccaaggaccttgctctgggacaggatagtggaggattcactatggttcaggggtgtctcaagttcaaagggcgattggttctacctgccacatcatccttcattcccctactcctccatgagtatcattgtagtaatgtcgggggacattctggtgtgtttaagacatttcaacgtctggcttctgagttctattggcagggtatgaggaaaaccgttcaacagtttgtggcagaatgtgcggtctgtcagcaaaataaatacttagctcaatcgccggccagattactacagcccttgcccattcccgaacaagtttgggaggatatctttatggatttcatcgaaggcctccccatttccaatgggtttgactctattatggtggtggttgatcgactcactaaatatggtcactttgtccctctccgccatccttacacagcccctacggtggccaacacctttgtcaaagagattgttaagcttcatggtactccgcgctctattgtttctaatcgggataagattttcatcagcttattttggaaggaattatttcgtttacagggcacaacgctgaaacatagtaccgcctatcatccacaaacagatgggcaaacggaagtggtgaatcggtgccttgagacatacttacgctgctttgtgagtttcaaacccaatcagtgggtcaaatggttaccatgggctgaatactggtacaatacttctcaccattcttcggctggcatgaccccttttcgcgccttatacaatcgtgatccgcccccctgctccgttttgaggcggccagcaccaaagtttcagcggttgaagaagtgcttcaagctcgtgattctgtgttggagttgctgaaacaaaatctgactcgagctcaacaacaaatgaaggcccaggccgatcgcaagcgtcgcgatgttcagtaccaagtcggtgatcaagtgtatgtgaagctccgcccataccgccaacgtaccgtggccaaacgtcccaatgagaagctgtctccccggattttttggtccatttcccatcctggctcgggttggacctgctgcataccgtcttcagctgcctccggacacctccattcatcccgtattccatgtttccctgctacgagctgctctcggcccacatcagcaagcttcaccccttcctccaggactcactgccgatcttgaatggatcttggaacctgaatccttgctggccattcgtccgggtacacacaaggtcagtcctcaagcactcatcaaatcgaagaacctagccaagtacgaagcaacatgggaagacttcgctgtaattcaatcccaatttccagatttccaccttgaggacaaggtgaaacttcaggccggcggtattgataagcctcctcttacttttgtttacactaggaagaggtataggcagcctaagggtggggcagcagtagagtacaactccactgggtgattttctgttatgtgggaattgtttgggtgtgggtgaggtgtatgttaagcctcttggagtctagttataaataagtgttatttcctttgct

SEQ ID NO: 186275 - DNA, 2682 bp, Cannabis indica
tattttgagaaaatgaagtatatatgggcttttgtcataggtccacagctaataaaaaacgggagcccgttgaggcccaattatatctaagaagttgggtagatatttagggtgagtgacagaaattagggcaaaataaaagaagaaaacgacatcgtcttttatgtctttccttctttcattccatacgtaaaaccctgcaaacacttagcagcgcctttaagctcaggaaggaagaagagcagccggtagagatggacactcatgaagcttttcaggttgaccttggtaaccttatggccttcgaccctcatcaccaatttcattccgtcccctcatctaggttcgttgtttttcggtgattcttcatgctttttgtaaaaatataattttttatgttctttaatgtttccgttgatcagctcaatgggttcatctatgtatgtgtgaatatatatatatattgtggatttgaggttggtatgaggttatggttaaattgaatattatggttaaatggtactgttgattttgaagttcaagtgtatgttagtatagtttgaaactgaacaaacatgtttacatattcacatttcaccaaggttcccagttaaatagatgtatgctttttgcaagatggaagtggaagtgaaagtgaaagcggtattggtttgtgttttttaattttttgtttctttcttgatttgggttttatacaatgctaagctatggaatgtgataatctctgatttcatttacctgtatatttcaccatataaatacaaagaagtttcttttcacaagctgcgtaatgtgagaatgggatactgttgaacatcattatatatgctaagtgttttagattttgaaatgcaaatggttattgttcttcatgtactttgaattttgaaagtctattggttagttcgaacatatacattgctctcttgtgctataatgatcacacgagttctagtaaaattcactattggcatctcttttataaccaaagtttgtaattttcttcacaagcaatttccggttgctaaaattgtacttgtgatcccggtacctgtcatattttggagaggggatttcagtttatactttgtatctttcttatttataatgaaattcctatttctatagggcggagttggtggaggaaagtctaaagagaggaactgagttagtacaagctattgcagatactcttttcaacttaccttctactgaagatatagatggccctcttgtcagattgccaccccctgtgactagattgcccagagagaagcatgtaagattttttttttctactgcataacacctatagactatctgctaaatattgtttagtacatgcaatgaggtgtgataacttctatgtgattccttttcttagcactgaactgcttcttccatttttttttctttttccagatgccaaagcctagacctccaacgaaatgggaagaatttgcgaaagccagaggttggtgatgtttacttttatttactgtctgtgtgtaatttgatgaagtaatttctcctttcctctatataaacttcaagctcaagttaaatttgaaccacaattaagtctggattgtgtttgatgttacatcccaaactattttatctattttaactcagagtttgtttgcaggcattaagaacaggaagaaagataaggttcaatatgatgagcagactggtacttggaaacgtcgtttcggatatgatcgtgcaaatgatgaaaataatataccaatccttgatgcaaagatgactgatggtaaatttaattcttctggcttacacttgtcttgcttttaaaaattaaaatactggtctagaaaaattcatagattgtcgagagcaattttccaattcttgtccagaatctgtatcaagaatactacaatttgttgatacattagtaccatcagagaaatatttgagctgtgcttctaccttttgcagagcctgggctggatccatttgccaaaaaacgtgctgataaaaagaaccgcgttggaaagcaagagaaaaatagaatgcaaaatctaaaacaagcagccaaagttggtgacttaccaaggtttggttcttcttttgcttcttggcttggtgtatgtgtaatggttacttattgaagagtttgtcttataagctcttttacttttccatgatccatcttaaatttggttcctgttatgatttcctctcgtatatttatttcacacttcatcttggcagagagaatatgattggttttctcttatatctttatatccttctctttttcaatcttgaaatgacaattcttgcagtttgcatctatagaataaaatctcagatttttaattgatatattatttgagaattgagattcaacattgttgtcatttacatcaaaagaagaaaagtagataacaagaaaaattatgtgcagccatatacaactttctgcgacttctttgccgataacaggtagccagtctatgcccaagagggctactaaagaggagctgggaagtgtggcgggaatggccgcaacctcaacagcaagtgggggaaaatttgacaagaaattggcaggtgaaaagccccttaaacataagggaaaacatcgcaaggtttgtatactcattgcatactactttttttaacaacatt

SEQ ID NO: 186276 - DNA, 3519 bp, Cannabis indica
gagagagagagagagaaagggtctgaagagctactggtaatacgtagataatactttattaaaagaatttttgtgttcaatccatctatctagtaagtctttcttcaacaatatcgactactgtatttaattagacgtcagcgttgtgttttttttcctgcgtggattttcttccactttcgacttgtctctacttgttgaatccatgtgcccccactagagcttagctgggggtttgggttttactgggtcgctttcgtatttgatttttctaccctagaaaaagtacaatttttttttggggggggaagaatgggtcaagggttttaggtgggaaaatgtgaagaaggagactcatattttccatataagttatttgtgccaaaaacaaaaacaaaaatcaaaactttattgctgctatgtcctttcctggatatttcgtttaatgggtagtttgctagttttgttctaaataaaataaaaataaatatattgaaaagtttttagagatgttaggtgaagaagataaggaccggtttgccggagctgcctcgagaaggtattcccggtcagtttcttggactgaccggtcaccatctaagcctgctaattctaatcctaggccacaaactaatagtaaagcaaggtcttgtttgttaccaccacttcaaccactttcaataactcggcggaatgttgaagagtggccgcgagcgggttctgatgatctcggtgtttggcctcatcctcaaaccccaagaggctctgctaatccacctgcaagtccgaatccggaacaaactgtaagagaattccagtttaagagggataagcttgccttttttgataaagaatgctctagaattgctgatcatatatacttaggaagtgatgctgtggctaagaaccgcgagattttaaggcagaatgggataactcatgtgcttaattgtgtcgggtttgtttgccctgagtatttcaagattgatcttgtgtacaagacactttggttgcaggatagcccttctgaggatattacaagtattctttatgatgtatttgattactttgaagatgttcgggagcaaggtgggcgggttcttgtgcactgttgccagggtgtgtcaagatcaacttccctggtcattgcatatctcatgtggaggaaaaaccagagctttgaagaggcctttcaatatgtcaaggcagcccgaggtgtgacaaaccccaatatgggttttgcttgtcaacttttgcagtgccagaagagagttcatgctgtgcctgccagcccaaattccatattgaggatgtatcgtatggccccgcattctccatacgatcctctacaccttgtccccaaaacagtaaactatcctggagttcaagcactcgattctcgtggagcatttgttgtgcatgttccttctgctttatatgtttggaatggaaagaattgcaaatctgtgatgtcaaataatgcacgggcagcagcgtttcaggttattaggtatgagaaggctaatggtccaatcataaatattaaagaaggagaggaacctccagagttttgggaagctcttgccagtgggcaatccttaccagaggtggagatgaaaaaggaagatgacaagtgtcctggaagcattgaggttgctacagaaattggcaccgaggttggtgagaggaaggtcgatgcatatgatttggattatgagctttttcacaaggcacttgctggcggggttgtgcctcctttttcagtatcaaatactggatctgaaacttgcttgcctgcaagggagaatggatggagcaggcttaggcggaagttcgctataggctttatgaaagaactgatcacatcatccaagttaaactgtgacactgtgccatcttctgatgtatcggacatggttatagataaccgcagacaggaaaaacagctcgatcccccttcatccttggcatcttcaacccacctgtgtggttccccggattcctttgaatgttttcctcatggcagcccagataggatatcagaaacatttaaagaagtagaatcattagatcctcttcctcatcccttctcaccacctttttgtggatcaccggattctttttctcgttttccagacagcagtcctaagtttagctctaagtcccctacactttcaccttctacctctgattatgctagttcattttctttttcgccgtcatcttctaactggtctgacctatcatacctatcatcgcagcagccttcgccatcaggcttactagattcaacagatctatttccaattaagaatatttctttgttagatatgcttaacaaagaaactaataccccaacacatccagaatcattttatgataatcatacttttagaacccaaacatccggttcaccttgtaaagggcttactccctctattgcagagcgtagagggagtaatccaccacctcgtatgttgttatcctcggttgatgaatcacctcaagttccaagaactctgggacgatcatggtcgttttctattcctgaccttgatgatgatggtatgaacgatcttgaccataatcaatgtgagaatgaagacagtagagaagaggtaatgatagatattaatatctttagtcaagcaaatgaaataggaagtgaaattagagaaaaagaagagggtggtaaaactcgtctttttacaggtgaaataatcgatgaggctgcagaaacgttgaacttagtcttatacaagtggccttcattgaacaaaataacggggccttgtgttagagaacttgactcagcatcagcatttatgctattagctgaagatgcgagtttgggatcaaaaaatcactgcacgttaactctctggttgggacgtgaaatcttgcaaaagaaaggacagaagctcagtgagcagaacgagagtggcgatctgcactgggagatgattgctcgcaacttccttaatcaaatggagttgccattaaatattcctgtccaggtaactatttcactttataaatcttactcaattacatgttagataagagagtttcttgcaactcatgcaaactaataactattaggtatgaaaacatcaattcaattgtgcatatcataaaatggattttgagatcattttttctgattatgtttggtgcttttattttcaggtggtaagagaaggtcaagagccagaacaatttttaaaccatcttagttgcttagctcaacaaaaataagtgaagtgttttaaccaaagatgagatgtttgtatgtaataaaacaacaccacctaataatgaagattagcatttagcagtagtatgttgaagattttgaaaggtgggtgttcatcccgggcagcttcatctatctatctgcttgtgtgatgtgtggtagagaatgtaagttacctatatagcaaaaatatgtacacagaacagaacagccaagctgtaaaaccaaatactaattacaagtaaatagtattaggttcttct

SEQ ID NO: 186277 - DNA, 5605 bp, Cannabis indica
tatcactaatttagtgtcattacaaaaatccatttatccaattcaattttttatttgacgaagtgattaaaatcgctcatgaatttacgacacagacatccacaacttgaaacattctcgagccaggatagttcatcatctaaccgcagagcatgctttgtcaaaccatggaccgttaaattctcaaagcgagccacataagacaaaattgccttaaaaaatttagacaataaaactatgatatcttcaaacaacgctcgtagtattgttattaattatactaacaacggtaggatactaagaagagtaataagcaccagttatattttttaacaattatttattaaatattatttaaatactctaaatcattattaggcaaggtattcaaactcattttctttcattcaatggtaataaaaagatgagaaatattaaaaggtactagtggtgtctaacacccttttatgtgttaatatcgctattagtctaactaaatattaagtcttatatagtttaatataataactttaaaaagtatcgatagtcaattgtaatataacatataatgctaaacactactaaaatctaataacaattctctaaaaaggagaagaatctagtactcactaactactagtagtggcatataacatgtgaagaatattataagcaaatattctatagcctttccagaagtgacaaccaaaaagccaagcaaagtatctaaataatgcaattagtgagcaattagaaaagacacatgcttaaaggtatttggaacattaaaaagctcattcctcctaataatatttctccttcttttttaagagaggctaatattgtagtctattgactattgtttagccaagtatgctcaataatgtggagttaagcccaagtgtgctcaataatgtggagttaagcccaagtgtgctcaataatgtggagttagtgctcagtgaaataggaatctttcttttattatcagtgtcaagtgttgtgagacccttgagtttaagaggcctcctattcttctttttgattgtgtattaaatttgtgtgtaaattatatgtgtatgtattattactcaatttaggactattggcaatattcatctaaatctaaagttgagaaaagtacacgtggacaagttttattggattagaagtattttattttaacaatatctttttttagtttaagcaaaacagaaaggaaattttcttttcagctttccaaaacaagaaaattaaattaacttaacatggaaaaaaggtttttgcgtacgtatgccgccattattggaattcacatgcgattttaaataccatttttttattaattgttttattttattcaatttgactaacttcgagaatgaaaaatactgaaatcataaccgttagattagcttactttcctacatcgaacgactagtgttgacttatgggtaatcactgagatattactctgccaaatactttaacgttattataaagaagtgctcgtagtgagtgctctctttctgtgtctccatttctgtaccttccaaccaaaaatcagtgctcagctcagcaacattgctactctctgtaagtgcccttgattctttctcagtagcttcatcaaccatttcagctttcaatctctcaaagcttagtcattttctctgtgtgtgtgtgtgtgaatctcttctatgatgtatattaccgttactttgctgggttttttcttttgagcaaatttaatgatacccatttgagtaaatctcttgaagattgtgtatttggtgaaagtttgtacagattttctctttatctatgttgtttctttgatgggtttgtaccatttttttttcgttttttttttatgatgctgagtttgggttatttgggtctgtatttactctgaccaccattttgtaatctcatagttatttgagtttaatttgtgttatttgaccaccattttgatcaattgaaaattctttttcaaattgtgacctttttgcccaaatttgagtatgagcttaagaaaattttggatttaattttttattgttatatattttgaaattaggatcctacctaaccctacagatatttttttggggactgtgtatagaagggattagaacctgaaatttgtggcagcaaatcacacacatgcctaactagtagtactagtaactagtctatgcctaatcatttgagctatagtgtactgaatttgaatatatgacccagctcaatccagttttggtcaaggctaatattaatactttttctgcttgtaaaatcctatttagttgcttctaaaagagtaactatacaattaagttttcaattttcttaaaagaacataatcataattttactattattatcatttgtgaagctattacaaattatgactttatgagcatggataacaggttcaatatggctgagaacaacaatggggagtcaagtgtgaaaaattctgtagcccgtcctgctttaaatgaaaggattctttcttcaatgtcacgaagatccgtggctgctcatccctggcatgacttggagattggtataaagtttgattttatgttttcaattttgctccattttatgttaattagcttttattaactactgtgattgaagagctatcacagctgcgtacttgcaatggtggtgagattataaaaaatccaaattgctctgtgtattgtaatcatttccaatttacctggtaacgtttgttgtttgctttatgcaggacctggtgcccctgaatttttcaatgttgtaagtccattctctatgtaccgataatagcgtaagcttttagctgggaattaggcataggcagaagttcggttagctggaccgaaatcacttaactagaggggaattgttgttttgtttgtttcacttcttttttgttacttctgttttgcttaactgattggatgtggctgcttgatttcgttttgtcaaacctttattagtactggtatttgagagattatgtatttgtccaactgatgaaattaatcccatttgaggagttatgtttttcatccattgcctgcctcatttatagaaccttgctcactgatgaatcaaacacaaccaaccatttactctgatttatgtcttcttcaggtgattgaaattggaaaagggagcaaggttaagtacgagttggacaagacaagtggcctcataaaagtatgatcacttttatttcattagtccattagattggaatcttatggaaaacgtttttattgtaaacgagaatagctaatacataaatttgttcaatctaggttgatcgaattctttactcatcagttgtatatccacacaactatggtttcgtcccacgaaccctttgtgaggatagtgatcctattgatgttctggtactgatgcaggtactgcattttggtattttgaatgcaccattttccattaattccaagttccaactataagtaattaaacaatcttcctggatttttctctgcaggagcctgtgctgcctggtacattccttcgtgctcgggctattggattaatgcctatgcttgatcaggtaaaatgaccacatacactcaatcaaacatcgaacaattaaaagcttaaaatgattgctctctggttatgagtgtctacagatgtggaattttacaggtgggagtcatgagactgctttttctgtccacaagtgaaatggtttataaattgttggttctaagttgcagtatctcttgaatcctagattatagtttgtatagttacagtccatatgcattgctgtgtcaacacgaaaatgatattgcaagtctcttctgtttgttttgtaacatctagtaatgtcttacaacattatttacatccaggaagaaacttagtataatcaaacttaatgttttgagattcttgtataattgcttatgataacataaaatcaaattgcagggggaaagagatgacaaaatcattgctgtatgtgccgatgaccctgagttccgccattactctgacatcaaggagctcccaccccatcgacttgcagaaatccgacgattctttgaggactgtatccacataaataaatcacttattacatttttgttatctcattgttaattttgattggtcataagattgaagcaccacatcttcacaaccagcattcttcttcatagatcactcttttattcatgctttatcttaaatctatatcaaaacttgcaatgtatgtgcttaacttgaaaaatagacaaaaagaatgagaacaagaaggtggaagttgatgactttttaccatctgaatctgccattgaagccataaagtactccatgtgagttaccatttctgctgctcatttcatcatgaattactctttaagaagaaaaacatatgattgttctttacatctttttggtgctacatttttaataaaagtgacttctttagaacttgctctactgttcttcatcttcttaaagaaaaaatgtcatcttttttgcagggacctgtatgcgtcttacatcattgaagccttgaggagttagtgactccatgggagagcagatgggagctgacaacataccaaataattttagcatggctaatagatttggttgtttcttggtacaattaattagaagttatgttattaagactgtgatcttctgatacttttctaaaatttgtaagtgttgaaaagctgcttttgaagtaatctatatttctgttttatttttgttctttaatacacaaaagatagataaacatacacaccatctctattttcaaaagagctgcaaatcccacatgattttattttaaaaaactagcttaaaattcagatacaaatattagtttgggaaaacattcaaccaattcaataatctatgcttttataaatatcattttcttctcatattaaaatctggtttttgtggatgtaaatgaaaaattgaatgttgttttagtgtgatccatccacatgagttagcagtttcacacatgtctataaaaagaagttggaggtttggaagaaattctatgtatgtattagtacaattatttatatttttgttttaattttttattcttttgatatgttttagttggggatcttgattttttcattcttccaatgaattaaaatggttctctatcgaatatatatttaaaatttataattgtccaacacaaaatacttttaattcataggtttttttttctttcaaaattcatacattactattcacttttcaatttttttccttttaataatagtttagattgggatctaagtttgggtctactctcacgtccttattcccgttaaggattctaatttttatccccacttcatccttgcttattctccatcaaaaatggggtaggaaatcctcttatggggcggataaggaacgaaaattcccttaatataaaataaattaattaaaaattaaatgtataaatattttttgtcatgaaatgtataaaattactaaattacacatcatttattatttaatatattaatcattgtacaactttaaaaattataaaaaatgtaacactaat

SEQ ID NO: 186278 - DNA, 6876 bp, Cannabis indica
ataatcaatagcaagttactaaatgtgaaagactcttaagactataaattaacttattatatatttgttaaaaagaaaaaatctgtggcattttttttttgaggaaattatttattattattattttgaaaaggcttttatttaggttatttattgaaaaatttgcggtaaaatctccatgttttaatttttatatatttaattttttattttttgtggcaaaatccctttaaatttatttttttgtaaatttaaaatttcaattagatatttgagattttattattacatatactttcgctttcgctgcaaattactcttatttattttgagttttctattttattttggtaagggttttttttttttttttttattttttttttttaagttcgaacaagtgaacggtcaaaaaataatgaaaggaaacgtttgacttgacacgcaagtcgagatagtatacagtacacagtaacggtagcgtgtacctctccacacagaattatcaaaccgcccttaattcgaaccaggctataaaagaggtcctaaattatcataattctcgattttttcttattattattattatttgatttgttcttcaattctttattcatggagtttcccgttcttgtcaaagaagaacaaattgaatcaatcggagaacctttaccagtcaagctcaagctcaatccaaacccatcttcttcttcttcttcgccaatattaattaacttagattccgactccgattccgatatggcggagaaggaggacgataatgctttaccggtggggttttttaatccagaacaacaaccattgttgttgccgtctcaatctggtggtggtttgaagcttgcgcgtaaggggggttgtaaacagttctggaaagcgggggattacgagggctccccctgtaatagtgactggacatctccattaggtaatttcttttctttatttcttcgcaaacttggttatgttgttcttgttttttattaattttttgagaaaaaatgaaaaagtgagttcttgcaattactgcagtgataaagtttcaattttttttcccattatgtgagactttttccaatttgggaaattttttaggtattctaatgattgtttatctgtttggactgtcattgaataaatgcatgtgatggtttctgagttgagttcatgctaattaacagttttgcaaattggtccgtaccttgcactctgtttattccctttttcttttgggtggttatgtaatgctgtagttttgacttttgaatgttgggcattgtctctgggtggcataaaaatagctttttgtgctctctcagttgttggagaagtataaagtttcccacatgtttactgactcagtagggtgtatcctatgaaaggggtttgtttggtgtgattaaatctatccaaaagaaaaaaacagatcactcgtggtgcttataagatttttgactgtgtattgtattgtaggtggcatggatcacgtcagggttcatccaaagtttcttcattcaaatgcaaccagtcacaagtgggctcttggaggttagtataagcgcatgtaactaggccatttgtatgtgactcttgattattttcttataccaatttgttatattttcgatattgtgcagcttttgctgagctattggataatgcattggatgaggtatttctttcacatttgctgagctttttacaagaatacactccccttacaccctagattgagtattctgaaacaaaaattatttcaatatcaggtctgcagcggtgctacatatgcaaatattgatatggtgactaataagaaagatgggagcagaatgttgctaattgaaggtaacttcttctttgactttgtttccttattacataatttgggtaattgtaattgtaatgttgtgctgtgttctttatctttaaaacttgtgatatctaagaagtattaatttaatttccttttgcagatgatggtggtggcatgaatccggataagatgcggcattgcatgtcattgggatattctgagaaaagcaaattagcaaacaccattggacaatgtagaaactggtctttggcaaattgtgttattcttcttttcacttttttttctcattataagatggattttgcattgtctttgttacagatggaaatggttttaagactagtacaatgaggcttggtgcagatgtgattgtgttttctcgttgccagggaacttctggaaaaaggttttctttttatcttcatttatgctttttttcttgaactccgggattttcatgtttctttattctgtattggattgtagctttaacaatgtatttttatattttttcctcattcacgaagcttagttgaaacctaccatggtcgatcagtaagctgtagtcaacttgtttctttaacatctttatgatttgtttactttcagcctcacaaaaagtataggcctattatcctatacatttctgagaagcactgggaaagaagacattgtagttcccatggtaataagatttatttattctcctcaatttttctgctcattatttacattggcatttttcgattattaaatatggtactagacttatttaatgtgggttcttgtttaatttatgtatgatagcttgattatgaaagcgagggggagggatggaggaagatggtgcgttcttctctcagtgactggaataaaaatttggagactattgtagaatggtctccattctctactgaaggagagcttcttcgccaggtgatttttgtacatacataaaaagtttttgtcattactcactgtatttcttattcttactttcttctcataatttgccacatacactcattgactttattgctttgcctaatttcagttctcaatgataaaaggcaatggaacaagaatatacatatacaacctttgggaggatgatgaaggacagttagagcttgattttgattctgatccacatgtatgcctcaagattcctactctcattctttctttcatcaagcagaattttatctataaaatttatctaatattattgttattatacaggatatacaaattaggggggtaaatcgagatgagaagaatatacagatggctaaacaattccccaattccaggcacttcttgacttatcgacactcattgagggtattgtcacaattttagtttttgattttggtgatttatcatcctatgctcttattatccaatttttaattaattttgctttaaatccagagctatgcatcaatattgtacttgaggcttcctcctggttttcgaattatgcttcgagggaaagatgtcgaccaccataatattgtaaatgatatgatgttctctgaaaagatcaaatacaggcctcaacctggtcctgaagggatctctaaagatgtcaatgtaatcttttataagaagaaagtttgcttagttttagttctccacatattgtatgtcattcctaattacaggctattgatgtgattagatggttgctgatgtcaccattgggtttgttaaggacgcaaagcatcacatagatgttcaaggatttaatgtttatcacaagaacagattgattaaggtactttctctatttaacctttttctaaatgttttacatttatgatataacaatactactcactttctaatcgacaagcttctttgtacttctctgttctgtttattttctggtacgtttctttaatagttccattcaatacggttttttgttatgatgctgtgatatgtttggctgttataaaaggttaccttgatgctggacaaggttaacagtttacaacaagtgcaattttatttatagtgtacatggttggagtaaaacgactggagattttcttttctgcacatttcgtaatgtgtagaagtttcatcttatgatattcttttttatgtttaatttgcagcccttttggaggctttggaatgctgcaggaagttcgggtcgtggagttataggtgtcatttctgttgaagacccaaagctttcatatcaatgttttgtatagcccaatatctgattttcttaatgtatgttgacaggtgtattggaagccaactttgttgaacctgctcatgataagcagggatttgagcgtacaaccgttctttcaagactcgaggcacgccttgtacaaatgcagaagcattattggttagattttctaaaagcttttaatttttttttattattatatttatatagaggtggtaattgatatattatgtataggtctaataattgccacaaaattggctaccagtctcatcgtaagcacctcaatggaaacgatagaggtattaaattaaaacttttcgtttattattattattatttattatttattgcatttttctttacatgatttcataattttgcagaaaaatctcctgattctataataaataatactcttccaatgaaaaggagaagtgattacttaagtgatagaactccagctcataacttcagtgatagaactccagcccataacttaagtaatagaactccagctccagctgcagaaaggcactttaatcagaaaggaacaagtaatttaaattcgtcgattcctcatgagcaaatcagcgataatagtgatgatagctcatacactcccatgcgcgagaagtacagtaatggcggtaatgataagacaatcccagctgagagaacatttaacacccccagcccacccatggctcggaaagatagtagtgtattcggtggaagaagttttcatttcactccggtgaatgtacataaggtaaaaaagacttcttccaataaatggtataagaatgacctgcgactagttcctcttttttagttgaagttgaaaacaatcacatgatattattgatcagatacaatcatgcaacaagtctacctttcttaatgtgcataacttaatttatacgcgttgctaacatggtttaaccaatggcttttttatcttttccagaaaagttctgttgatcataccaggcattctccttcagagtcagagtcaaactccctcattgtggagcagttgagaaaagaaaatgctgaattaaaagagaagtactactcgaccttataaaacgctactatatatcaagctgtttcatgtttgtgtatcttattttctttctcactttgtagattgaataaaatcgaaggagatgttttaggtgaagtactgcaggatttgcagtacgaaaaagacagatgcaagctttagagattcaggtatggatcttggttttaacaaacatgatttgttcactattatactcagtttttgttaatcactgctttaatttctgatcagctggaagcatcacaacaaaaaatcgacgagttgaacaaggaacaagagagccttatcgatattttctcagaggaaagggatcgacgagacactgaggaacagaatctgagaaataggctacaggtatgttaattgacttagtggttcacctggtattattctctgattatattcctcaacaataaatcactattttctgcaggaggcatcaaataccatccaggagttgcttgacagagtaaggatgctggaaaggtgaagacaccatttaatcgaatgttatagagagcagtgatagccatgccatgtacatacgacgtaactaaatttcggttcaagatcgggaagttccaattgggggttcgatctttggtatatggatggctttccaatcctattttgaagactaatctgattagagagagagagaggatctcaatagctgtatagtttagtcatgtcttttagttttagtacttttgaccattattttctactgtacaaaatgaagagttgggaatgaggagctactagaggcctattttactaattggctgttttgccatttgaccttttgggattaaaattagtggtccaatccaatgtaaatgattcattttttacattacaatatatttttattagctacgaatctatgtgtttggtggtgaaaaggaatggatgagaaagtttctacatttaacttgagacttagtactagaacacaaaaagattaattgcttactataattgaatggacataatggacaacatctaaaactgtgaacttccttaaataaatggtgttgttctttatagtttgttgtttggtgttacaacatgttgaccatcagcttctataattgttcttttttaattataatattaataataaaacagtccagattattatgttttttttttttgacaatttttcctttgttgggtttctttttctccatgaggtgtcaggtgtggaaatattttgctgttgagattttattaatatttttatactttagattagtgattaaattttttttgtgttggtggtggtggtgggtgtttcatgttgtatctcaagtttagagaccgattccctatttttctgagcaaaatatatatgtttagagagaataacatgtcatttataaaattttgactaaattttcaggttctcattatcaaacaatttattatagaaaaaagaaaaaaagtaaacctcaattacatagaaaagcattttgaaaaaagaaaaaggaaaaaagaagattgaagagaaaaactaatacaatgttttcaggatacaagctatatttattatttaatgaagtatgaaataaagtcgtcttttgaaggcatatcccgtgattacatctaatattggttcctttactactggttcatttttaacaaaatttctttttcattttccactaggaatggcaatgctacggatggtttttaaattgtcatacttatcctcct

SEQ ID NO: 186279 - DNA, 2021 bp, Cannabis indica
tttttttttgttgaaaaaaaaatgcttgagcaagacaggcaaatttcatagaaaactgaccagttgaatcaatagaccaaatccattaatcactgccttgtcccccccgacctacctcctttaaggatattattggtggttacttggtcaaacagggagttgagtttggaaacatcccaattctcatcaccagtgagtaaattcgccattttattccaacccttaggacgactattttttggattgagatagaaattctgcccatgaatcacccacaagtcctcccagatattagtatctttcccattcgcaatgaacttgcatgctcctttcttaattaagtctttgaatttaactatattcttctaaaattaggagtcagagttcttgtaagagcattttaaaaagggtctacccttaaggtacttcgcatttagcactttgcagcacaacgaatcaactttggtaaggagagcccactccaatttagccagaaaaacttgatttatttttgaggtcttccagaaactaagaccacctctagatttcgggaggcatagtttttcccaagccttaagatacaagccacaatttcctttttcacagtcccaccaaaaatctctaaccatgccatcaatcttagacgcaagcttcttggacaacttcgtcgtttgcatagtatacacaggtaacaaaaggcccacagattttatcaaagtagcacgatccactttcaaaagcgattttaacttccacccatgcaacttcgagaccaagttatacatgataaaatggataaaattgaagtcaacatctttcttccaacaacggaaaagcagaagacccaggtagttaatgtttcccacagttgcgttgagccctaaggtctgaatgatattacgcttcatcccatcactagtgttcttgttgaagaagatggatgtttttactttattaatgcgatgtcccgaccagttacagaatttttccaggcattgccaaaaactcgtggcttcctctacggtggctctacccactaaaataaggtcatcagcaaagaacagatgagacactctagggccattatggctcaacttatcactttaattcttttcctgtcaagggcattttctaagagccaagagaagatttcagcaacccatataaaaaggtatggggagagggaattcgcttgtctgataccgcactctgggttaagtctatccaccttaccactattaaggcaaatattgaatgtagttgttgaaatgcactaacggacccacccacagaacttatctggagcctttaagttgcatagcacgtgatctataagttgccagctcaatttgtcataggctttaaccaggtcaatttttattgcaaataagaagccctctttcccttttttacacttgaaagagtgaacgatttcttgtaccagcacattgttaacctagatgttcctacccgtgacaaaagctgcctaggttggacaaataagtctcaagaggacaagtgtaatatgcttgcaattatctttgaaatgatcttgtacaccatattacaaagcgagataggtttgaactgcaacatttttttgggtttaacaccttgggaattaagactatattagcttcattaaaccctttatgcataaccccagttgtaaagaagtccacaacagcctcacagaagttctttcccaccgaaccccagtagtgtttgtaaaataacactttattttataactaattttaaaaaaaattaatataaaacactaattttgtaaattttttacatttttaacattaaaacaacaacaaaataacataaaaaaataatatacaaataacaacaaaatcaactacaaagcacgagtgtttacagcgtgctttgtcctcaatcgcacacttcctgggaaaacttcccaagaggtcatccatcctaaaattaccccagatcaagcacgcttaaccgtggagttctttcgtgatgagctaccgaaaaataagatggac

SEQ ID NO: 186280 - DNA, 6162 bp, Cannabis indica
aattgctctctctctctctccctacttttctttttccttttagttgaataatgaaggctttttcctttcatgcatttgaaacgtaaataaaattacactctttacttctttctttttctagcttcagtttttaatctgaattttgtcaagttattcctcaccagaaatctgtctttgatcaccgatacacgatatgcctccaggtttcaacatcaatttatattaaactttctttcattggtggatttcattgttgagaatgatcatcttttctgggattggctatagttaatttctatctacatcatgtcctctatattttttttttctcttcttctttactaatcttgaatcgactatttgactatactaacttttttgttggattttcccttttcaggtaacaggccagtccaacacccaagcaattttccaaagttggcctctgattctagttcttgcagtagtggcacagcagatgatgactcggtacgcttgttttctttactttgcttattctactacgtgacttgataaatttgtgctatatttgaagtatagctgtaccacgttaagatctgttctgtcttgatgcatgaatgttatgatacaattataaccagaatgtgttcctcctatacagttcacgtttgaattggggttgagatcttcaaaacaagctgctggaactccaatcaagaacttattagctaaggagatgtcgaaagaaaatgaatcaagaaggagagcacctagtgttgttgccagactgatggggctcgatggtttgcctcctcagaaaccagcttacagagaaggtaatggcatttctgatggttatcttaggacagtaagacctgtggagaaatgtcaaagaagtagccgtcgatatgacagcaaatcttcaaggaaaagctcaatggatgaacaagaattaaggatgtctttgaagttctggaaacatcaaagttagggagttgtagtcatccatcgcagaagagtatggcaaactcgaatctgactgatgctgagatggcatttattcggcagaaattcatggatgctaaacgtctttcgactgatgagaagctacagggttcgaaggagttccatgaagcacttgaggtccttgactctaacaaggatctcttgctggaattttttaagcaaccaaactcactgtttacaaagcatctacaggatctgcaaggtgctactccccagcctctttgtgatcgcgtagcagcgacgaagtcatcaaatgctcggatttatgagaagacacgccatgacagtaaatcagctagagagccttttcacaagagtcacagtgcatcttctcaacggcatcgtgataggcgcagtaagaactctgacttccatgctgctcaaaattccctcaagtcattaaataatcaacgagagggaaaggaggagcctgccattctccctacaagaatcgttgttctgaaaccaaatcttgggaaggtgctaaatactgataacattgtttcatcttcttgttcttcacatgcttcattaccagagtgtaggaatgacactgaaatctcagctattaaaagcagggaggttgaattattaggagggagaaacttcagacgtgatgcggggatttctggtcataggtctagggaatcaagagaacttgcgaagcaaattactcggcaaattaaaaatagttgtagcaatagttccgtgaagctatcatcttctacatttaagggatatgctggggatgagagttcgtgtagtatgtctggtagtgaatccgcaaatgaatcagagacaatgtcaacgagttccaaatattctaatgacctgagtaagcgatccaggtccttgtcatcacgctctactgaatcatctgtgagcagagaagccaagaaaagattgtcagaaagatggaaactcacccacaagtctctggacatgtcagtggttagtagaggcagcacgcttgctgacatgcttgctatccctgataaggaaactagaccaccatatctggatagcataactgatgaggaaggatccaggaacaaaattgtttgtgatagtgatgggcctgctcagtgggttgaacctttgggtattagcagcagggatggctggaaagatggatgtatcagcaatttaacaagatcaagatctcttccctcatctactaccgtctttggaagtcccagagcaatcacacgctgtgaaccaatacgtgatgacaggtatgtaataccgaaagaggctttaaagcgagaaagagttaatgcacaaaagattaaaacggataagaagagtgtcaacagaaacttaggatcaagtggcaagagatcacatcattctcgctcaatcagagaaagtaaggactcctcaatgaaaactgttgccacccaaaatcatgtaaatgttaaacttgaagtgagtggccgtcagccccagcagaaaatagaagacattaagtcgttaactgataatctcacagatgataggagtccagttcctctacgttgcttggatggtgaacataagacaacaaagcctctaaataattcaatcccagaattaccagcacatgtaatggttgctgatgtttgccatgttggtgaccgagattgcataaatcttcaggtttgtcttaaatctcttatggtcttaaatgctgtaatgttataacatttgtggagagtaatctttattcctaagactgtcgatttctgaattgcttgttgccttatttgcatttaactctgctttataaatcatttctcagaagattcttattattttaaccatagtattttgcactgccagttgcaatttcatggagaattgtattttcaatcgacaaattttgtttctcaacctcttataatgtttaggcacaaacggactcccatgaacaaactccaataccctcaaaacattctgttcctgggctagaatcacctgcaagttctaaggaggctgaacaaccgagtccagtttcaattctcgaagttcctttcactgatgatgtgtcttcttgttctgaatgctttgagagtctcagtgctgatttgcaaggtaattatataagccaaaatattatcaaacttttgtagcatttggatatatgtttgtttaaaaatttccttggtttaggatgcctatattttgacttcacatgttctgttcttttggtactagggcttcgtatgcaacttcacctactcaagttggaatcagaatcctatgaggaaggacctatgcttgtctctagtgatgatgaagttggggaaggagctgaggtttcagatgcatttggatcgtctcaacggagttgggagtcttgctacgtggtggatgtcttaatccattctggtttaaaagaagctgatccagatgaattcttggcagcatggcacactcgagaatgtcctcttagtcctttcttgtttgaagaactagagaagaagtacaacaacgagacttccccaccaaagtctgagagaaggctgcttttcgatagaataagtagtgggattttggaaatgtatcaaccgttcactgatcctcatccatggatagggtcttctactggaacaatgtcgggtccaaggtggtctaagaatgaggtagaggatggtgtttgtctgtggctcactaagcaagcaaagaatgtgaagaaagagacagcagagaaagtgatgggtagggaatcagagtggctggacatgggcgatgacattgatatactaggtagagaaatggagacgttgttgttagaagagctaatggaagagtttttagttgccatgtagagattttcttttaaccaaagctatttttgttcttaggagaccttaatagttaatactactctcgtcttatgtaaatgaagagttgttcaccatgaaatgattatttcatgagaacatgaataaacaaatatgaaatggttacaccaaaatgacaaattatcttaaacctcattttatgacatttttttttatttcaaattacaatttcaatctccaataacattattccaaattttacttcagaaaataatattttttttaattcctttttatcattagaattaatttgattaataaatttattctatataaaatgtggccatgtaataaaattctttgtttaacgatgggtcttttctaacgctgttaacttatttttcttatgaaaaaaaatgtaaaaaaaatttaaaaaaccaatggactcttccagaacgtcccactcttccaacaaagtgatactctcttttttttttgaagaaatcaaaatcgcactgcaacaattcaaaatctcaatcaatccactcttccaatcgagtaatctgctcttcttttgaagaaatcaaaatcggactgcaacaattcaaaatcccaatcgatccactcttccaatcaagcgatccgctcttcttttgaagaaatcaaaatcgaactgcaacaataatagcttcttccagaacgtctcaaaatcccaatcgatccactcttccaatcgagcgatcggactgcaacaataatggcttcttcctgaacatctcaaaatctcaatcgatagaagacaaaagtacaatgataaccacttttcaagatattcgaacacctaacatcgaatttcttcgattgatcaacttcaaatcgatttgttaaattatggagcacgattgctccgattcgttcacagacatgctcatttagagaagtgcagcagtatactcttctttctatcaagacaggtggatgtagtcaggattgtttatatagcctcagtcatccaagtatgatacaagaggtatccacctttaacagatttgttgaaataaaatcccatattacctgtacactataaaaccagaacatttacaaagagttttacaagacagtataataatccctaagtggcctttggcctctaaacaacctagacagattagttaagttagttacaaagtctgttaacactttgtaactaactctcctatctctgatctcttctatagaatatataaagccgaaaaaacaaaactcaaagcagtacaacaacccaaaattagatcggtacagaagaaacacaacaacaaaactctgagcagaataaccaaaccaagatctgttcacagagaaaacaacagacagagattgagttggaggaggcttacagtgtgtaaccttggagccctagggattgggttcggatatccaactcagtggagggtcgttcatgcaatagaaagaagaatagttagtactaattttagagagaaaacagagagaaaagagaggatttaaaatactgtaaatattagggattatcatttcataccctgtgtttgaaatcctagccattgtaaactctgctcattgaagatccatagtgaatcgaggcgagctcgaagaggacgtacacagtacaatttttggggaacctctataaaaatctggtgttatctcttccttttatctttttgcatttttctatattgttttttttttttgtgttggtgtttttcgtgatcttcagagaagaaccacgaagaagaaggctcggtttaggcggttgattcgaactgggaaaggggttttttctgggtctgtatctggttcttgtaggtgttgttcttcatgttcttcacagaagaacaacgaagaagataacagcctctgctagggttttcatttaggtggctggtttatgtgtttgggtgataacatagtatatatatggtctaatattttagggtttcttgtatgtgtataaaacgacctgctgcgcataaaggggctgtcttttggcacaaatcagggagtcaaataagggttttgactaggggtacacatgggtcaggttttcgggtggtcaggttcgggccttggaaatgcacaaccgaacccatttttcgggtgtgtcgggtattaggtcgagcttttttcgggttgggcgtagttgggttccggtcctattaggctgagcccgaatgtttaatttatgggctgaaataaaacttaatttttaaaaatgccattttatatatatataataataacatatatatattagtattaaactaaagtatataataatattatatactttatgaagactttcagtagttgttgaccgaggttttcg

SEQ ID NO: 186281 - DNA, 594 bp, Cannabis indica
aagtcatttttaatacttctactaaagcattatctaaataataataattaataaaaataataaaggtgagttgtgtgtttctttccgtttatagtataaggtaatagtattataatttactaataagtattagttaggagtgttgaattcgaattttatttctctcctctttttcatcccaaatttactatgagctagcctaattagtggctttactcctcagttatggctaactgccatataatgtataaaaaaatttgatatttgcaaaatagatggaagagtatttttgttagtttgcagattaagttttaacttttaacaattaagaaagtataatgaatcattaaagttgtgtcaacgatttcatgttcttaattaattaaatcaaagtgggaccgaaaattaggttaaaagtcaatttattagggacgtcagtctttccctttgattattcttatacaaataggataaaaagaggggtatggtatggatatacctttttttataattagtgaaaggatgacttgtgtaattaataaaatgttaaatctattattgcaagttgcaagcacatcattataattaaataaa

SEQ ID NO: 186282 - DNA, 1799 bp, Cannabis indica
atatgaagcaagcaattttccatttaatttgctccagatacgcctgcttgggcagaagccttttctcaaagactcctccataacaagtgcagcattttcgagctgcccaatgttgcaaagtccactaataacatactcgtacacttccatatctgaagaataaccgcattcttgcatgtcgttccataagcttaacatcattccacatttaccgaatctagaaagccgcataagcaatagcttgaaagcacttaaagagattctacagccaaccctctttgctttcctatacacgaccataacagcatgaggaggaccaaaactacacaaaggttccataaatgaagttagagtccctgtactgggaataattcctctactcaacattcgatcaaaaacctcaagtgcatcagctactttccgggctttcagaagaccaccaattaatttggtgtaagtatcaacatttggttcacagttacttctcaacataatgttataatacttcatatattcatcaaaattcccagaagatataaaattagaaatcatagcattgtaagcacttgtgtctgggaccaaacatttctcttccatgctctgaaaaactttaactgcatcatcaatttgaccagctctcccaaaaccctcaataatataactaaacgtcaaactatcaggatcaattccatttgcaaccatcatttccaaaatcttctccatttcaccaactctaccaaattttgaccacccatttagaacaacattataagtagtaccatcaaacagtattttccccttgaatgaattaagtagagaatttgcagtaccaacataggatcgacggcatagacattgaagaagcacattcaaagtctctgtaccacattctaacccgatttcatccaaattccgaaacatttggattgctttggatacttgtctagccctaatgaaactgtccattacaatagaaacggtctccaagtttggactaaccccttgagtctttaactcatgtaaaacttcaaccataaaactaagaaattttcttctgcctaatgccttaaggattatatgataagtttgaatatttttgggaatggttggctgtcgaatagcccaattgaaaaacaagaccattttcctaccatctaagctgcctcgatttactactttcgcaacaatatcaagatccaaatccacacaaacactcgttaaagcactctctatagcagccttccctctcatattctgaagaaaaataccacgcagtttctcttcaggcaatagaaacccatcaactgctctaacgatctctttttttccctccgacttcgaagctaaagtattacttggtacgggaaatagatcagagagttggtcaagaacaaagctttcatctaaatgaggttggtttttgatatggtacccctcgtccaaaatagatgattgatcatctaagcttgaaaatggaaccggtgaacggaggtaggggaaaaagaacctggttttggtaatgtgagtggaataccctatggagtgctgcgcctgaaaccccaatacgcgccatgaagcacagagaaacgccatgaagttctgaaccaacaagaaatagagtttgaagtttgttcactatcattatttgtattctattcttcaaaataaaaatacaacaccaaaacccaatcttctttattttatctcaaactcttaaaatacatcatatataattttttctattataaagctacagaagtaacacactttaataatttttttacaattctctactctaa

SEQ ID NO: 186283 - DNA, 3947 bp, Cannabis indica
acatccagactccactggaagaaacatattcatcagtgctagtatgtaatatgcaccgcaatagatatcaaacattctctaaaagagaaaagtgaaataaggcaaggataaagtactcttattttcttgataaagaaacatcaggagatgcttgtattggccgctggtttgttaacaggttgaaattagaaagaagaacatgatcttgtatgatatatacctttgtagcctcagtggcatacccccattctggagatatttcgtgaattgtaaatttctgcttttgttcagtagtcagacttacacctgattcaagtggtccagtttggccttgatcaaacaacatagcataatattctgaattggtgtcaagaacttttgatgaagatggatatgaagaaattttaagatggtcaacttcttgacacatcactgaggaagctgataacacatggacattgtcaacttgttggagctttcaccaaattaaaattaaaagaatggtaaaaggggctatttgcatgtatcataccattatcaacaatgctactactggatttctgccattgaaggtattcctgctcttcagttggtccatttcttgtatattctacgtgctgccaaagtagaatgacgtcaacagttcaattgtttttattcagtgcattaagattaatgttattacaaatgggacaagcagttaagaaggcatataaaataactaagaaaatctgtcacaagggaatacaaaattacagcctgtaaaaattcatcagggactcacagttccattcaacaatgcatgattattctggcactcaacacctgaagaaatattgcacgagtcaagcatctctttccaggatacagactcctttcctccatacctatgttcatgctcaagaagttgatgatgatctccaccactgtcacctaagataatgaatccacattaacttggtccttactggttctttgatgaagaattttcttaacttcagatttatacaatcctaccaatctcattttcatgaagcatgtacagaattcaagtccaaaaaaaaaacatatagagaatttttttcttaattctggttcttgatgtttaatttagcataggttacttcagtgaaaataatcaaatcacattctgcttgctgcttttggtacaattgggtataaatttttggttatatgtgccaagaagtaaaaatcagagcaaacaaattacatgtgtaagccaaaaaaaaaaaaaaaaaaaacgaagaacgagaacaaatatatgaatcataatcgtaataataacaaaaaaagaaaaaagaaaccgaagagcaaagaatcatatatatcctgtgtgtgttacctggcaccccatcaaatccagaatagcattgatcaactgcaagatttcctggttcattaaaatctaaaaacgtattttgattgtacatctgattttcacattccagtagatctggatcatttggatcttcaagcttactaggtgactcgaagtctttaacactatcctcatttagacttaactgcacctcaagttttcgtaaagcttgattaacatcaccctgtgttgtactcaatatccctcctgttccatctatactgtcataatgcccgtttccatttgattggattactgaatctgaagtaacttctattgaccctggactataactctgataatcactaacaaagagagatcctgcattttgagtattagaggggctagggctctggctgaaagacaaaaatgattctggggatagttgagtagcagagccagagccagagccagagccagatcccgacctagaactggaatttccctggaaagcaccaaaacacaaatgttgatttgaaactcaaacaaataactactggcttccacaaaatatgtttcacaatctttcaaagtggttagctgctaaacaacgaaatgtgtatctactgatccaggttaacgtcttttcctgtgcttcaaaaaaggaagtctagataaaatgtgcaagctaggcagaagttctagtaatgagagtagaaagagattttaattttcctctttctttcattatctcttatcactttctttctttctattttttaatttaacttttggcttccatagatagactaccattataattcatataaaggtgtaaagagactagcacagctataatgatggcagttgcatgttttttaatgaataaaactgacaagggattgatgatgcaaagcaatctaaaaaattacctcagttatgtctctgtaatgaacaagaacaatgtgctcatacgccctgccaatataattaagagggaaatgtgaacatatctaatacaggtaattcaaattatataatacttagtaagtgtgcaaatttagttttaaatagagatcaggtatgtagattgcatagccattttgtaataaacatgtttgtgtagtcctaagtctaattgacaccaacaaatatttttgaatgatgacttagcagacacaaaataacagcgaaattagtagaatacttacggatcaagtatccaatagctacgtctctgaaaactgggattctcttctccatgcgcataataacagttcaaagtttcaacatttcccacctaatcaaacatgcatcttgttatctctcaatttaaaaactcagtatagaatttcatcaaattcagaataaatcatgttagcacgtaacaaagttataaactgagcacatatgaagtcagagcttgtgcaattcagtaccaaaacactctgtcactgatgaaagtgttcaactgcacattatatatgttgaatcattatactatttaacatgataaatccagtacgcgccacatttccagcataacttactttagaaattttcaaacaaattctgaaaaattgggacaatcaaacatatttgagctcttgaatattatttatatgcaccatattttgatcagtatagacagttttaagagaccttaaggcgttcgtgtgcttccccaacagttcttccatccttctttttacgccaattatggccatctctacgaaaaaaccgaaggatcctcttgttatagagcaacaaagatccacctgtgaaatagtccagttaagaccataaacattataaacacacacaacttctaaattagatagaaagaaaagaagtgtaagtgaatattgttacttgttggctttttaggcggctcctgggtaagtttgtacttctcatggttctgtaaaatgaagagcacttccgcaggcttcagccaacggctttgagcttcttgaaaaagatcattaatatcataccctgaaataatttagtacaaaactatatatcatgactgaagtttggaaaaatcttccatcataaataatccctaacaaaaaatgagtacaaaaggaagtgattttgttatcagagcatcttcaactatgctctctacacacactccttagctaaaatagggagtgagacttgaaaaaataagctccaactatacaaaaaataccctctaagatagggagcatgattagagcaacaacaataaaaatgacactttattttagttttttagtcttaaaaaaataagagagtattattggagatgctctaagttagcaacctaaaaattccaaggaaacttcaaagaagtatgctaaattgtaacataacagagataacatgaaccacctgtgcagttccaaatccaaaaccttctacatgaaaccctaagctaaataattaactaattaaactaaaactcaattattaacatttctgtgcccgataagcttaaagaaattagaaactaaatactttaaagtactaaagaagaaggaaaagaaaaaacgaaataaaaaataaaagaaaaatatactgcaaaaatcactaaagagaaattacaaaatttttaaac

SEQ ID NO: 186284 - DNA, 2707 bp, Cannabis indica
attgaatcctgaaaaggcatccaatatgtcgcaagtgacattagagaagaagtttgggcagtctccagtgtttattgcatctgcaattctagagaatggtggagttcctcagaatgttagccctgcatctcttctaaaagaagcccttcaagtcatcagctgtggctacgaggataaaacagaatggggaaaagaagtaagtgaaattgtaatgtgtattatgaagttattttcactctcaagtcaccttattgacatctatcttaacttctaaattaaaacaggttggatggatatatggttcggttacagaggatattctgactggattcaaaatgcattgccatggctggcgatctgtatactgcatgcccaaaaggcccgcattcaagggttcagctcctattaacctctcagatcgtttgcaccaagttcttcgttgggcacttggatctgttgaaatcttcttgagtaaacattgtccaatttggtatggctatgggggtgggttaaaatggttggaacgcttctcttatataaactccgttgtatatccttggacctcccttcccttgcttgtctattgttctttgcctgccatctgtctactcactgggaaatttattgtccccgaggtaactcccccattatacttcctttcttcctcacttggtcaagatatttatttgtacattagcttgtgataaggttttgctagtatatacaaatatatgttactaaagtataaatcaagttctttcttgaaaactcaagtgtttgtgcatttgtgctgcatcttatcaattcaccctcgaagctggtgatggacaatatatgctacaatgtgttctaatatgtgctctttatacaaatgtgcagatcagcaactacgcaagtattcttttcatggctctcttcatatctatagcagcaactggtatccttgagatgcaatggggtggagtcaggattgatgattggtggagaaatgagcagttctgggttatcggaggtgtctcatcacatctcttcgctctttttcagggtctgctcaaagttttggctggtgtcaacacaaacttcacggtcacctcaaaggctgctgacgacggagagttctcagagctgtacattttcaagtggacatcactcttgatccctcccataaccctgttgataataatctagttggtgttgtggttgggatttctgatgccatcaataatggttatgattcatggggtccactctttggtaggctattttttgctctctgggtcatcatccacttgtaccccttcctcaaaggtatgcttgggaaacaagacagaatacccacaattattgtggtctggtccattcttctggcctcaatcttaactctcatgtgggtgagaataaatccatttgtttcaaaagatggtcctgtcttagaaatctgtggtctaaactgtgattaggatacaacattaaaataaaaattaaagtttaggtttgttccggtctctgttcttcattcttgtgttgcagaagcgaatcgttcctcgatcaactttgagatgtttcactccattccagatgggagggactaagaaatttttgtggggtttaattatatataatataatatagtatgggggtgtagataaagcgggcttgggggagatgatatacattgctatttgttttatcaattcttttatttttgtttctgtggggtctttctagggttttgctttgttttgttgttagattctgtaatttaggacaaacattggattatttattattcccttttgtcttaagagaaagtaaagaaaaaaaaaaaacaggggctacactacatacgggtgtctcaagaaatcaaaaaaattggttcttgttcatcaatgtactggtatctacatacccacttattccaacttttttttgccataaatgtgttacttctaatttaagaaaattcaactgtggaatttcgttgtttcctttgctatctcgttgagatgaagattctaacctgaatatatttttgctcaagagaaatttttttattgcacacaaccaaaccttagaaacacactactaaaaagtagaaaacagaattacatcaaacgcatttttctctttgttactaggcatctagactttatcaacataattttggcctttgaagcccttttgatttggctatcaacaaactctactagcacttgctctcaaacacacaagttcctactcaaccaaacccagttgacaaccgccgtgcctacagctgagatgataatacagaagtgcatcagctggtaatccagtccgagaaaccatgaactcactgcactactctagtagagaactcacaatcaaggaataaatgattacgactccctttgcttctcacaaaccggctcagcctcccataacataaatttgtgctttgggaaggaaagtctacaccaaaatattattacatgaaataaacaaaattctaaattttatatggaattaatacatgtagtagtaccacgagaacaataatacatattaataaacttaagagctattcattttcaaatgtattatatgagactacgagagcattcatattacaaataaaactgaaagaatgattagttacataaactctttacccatttaattatattaacaatatttagattttaatcaaacaaaacttaagtgcaaa

SEQ ID NO: 186285 - DNA, 4139 bp, Cannabis indica
acaagtttttgctttatgcagttgttgatgtagtttttagtggagaatatttaacgagtaaaaaaaattcaaagagcacaatttaataatttataataattttatttcaaataatcatactttaatatctctttacaaaataattagtatccttagaaaatactatattttaattatgtaagtgcaaaaaaaaaaaattaattgaatcattatatttggtacttggtagtacttgaatgctgaaagagaaaaataagttcattcaactcttccaaagactgcaaggaattttttacttggcactacgattagttatgtcgagccttttaggcaaaagaaattttgggattagtaaaaggatcaaaaccacatgatttgagtattattagtgtccaacaccattttatttaatataaaactatttgtgtaagagtgttaaggtaccataaaccttagaaatcaaattaagatgagctaaggtttgaggattagttgaaaaatcaacgtgtaaaatgtcaaaggctttagaaagacacaaccaaaaagaaggaaggaagcatcccttctcttcttgcttgctatcaacatagtaagacaagtgtgttctaagtcaaaacacttcatatgcttagttctcaattgagatgctcgaccaacctcgtgcagctacgtagttcggattagtgagttcaatcgggacctatggctttatcgattcatcaaacaccccttttgaactttggtatagtgagcacaagttggtagacttttcataatatgtgaagttgactagacttttaacaaaggtcaacaatttcataacacattttcaactgcttcaattaccctttttttttttccccttttctattaggaaaagccaaaaagaacatcataaagccacccaaaccaatgagataacaacattagaatgaatgaaggaatcatagtaaacgtacctcggatttagtttgtttctcaaacctttgaattaaaaccaacaacaatgccttattgttcaagtcaacaagacacaaaaatgagcttccaaaagtcaaagtcaaagtgctacaactgtatacatgtctgtacttatattatatcagatagatattgttgtagcttctagttatagtaataacaactgttaagtgtttgattattaaagatctttttatatatttatatccaaaaaaaaagaaagaaagattaaatgaatctaatttggagagattgataatgcctgttgattcttgagaactctgtctttgtgccttctcttgaaaacatcttgcctgaaccttttggtttcggttttcatatccaagaaaggcgtcttctcaatgctttccttttcattcttcaacatctctttcctctttgctaccgcttcagctgcatccttgttcgcctgttgccacctattttcttcctacaaacacacacaacacgaaaaattgcattcacaaatcggtgttcattcctttgaacgtgttgtaatagcgctaaatgggattaaagggacaaaaaaaagacctgaaggtctcgaatgagactatccagcgatttgatctttctatgtggccaacgaggaatcccgaattctctacacttcttctttagaactgttaatcctactttcagattccttgaggcttccactattgggagatcaaaatatttggctaaatcagataatgcaagtcttgctatgtctttacttgctgctcttttcttcttcttgttatcctcttccatcacacctgcaacacaatcttcttactcaaacaaaactccaacattcttttcccgcgatccaggaaactaactataacaactgttatgtgatatccctatccaaaacccaaatgaaaaccttatcaactattcttatgatgttatgaatggtaccactaccacccaagagggattcgaacctcgaactctatgggagcgaactacatgtctgaccattcgagcaagtgttcccactaggctagttttactttcacattgtttgcatatgtcataatcaaaatcaaaacttgattgagttattgtctaaacaagctaatatgattctatttctatggcactaatttgcaggctgaggtgtttgtttgtttacctgatgaggattgatcaatttgctgatcatctgaagattcagaaggtgtgtctggataaggaagacaattaagatcttgatcaaggacaaaatagctttttctctttagaggtttattttcattctcattggatttctctttgtcattatcatctttggctgtggtggccatgcatctcatttggaaaattgcttgaagatcattggccagtgatggaattgacctcagcttcggatttctagaacatatcatccaaaaaacataagagtggcacaacaagttcaacaactacaaaggctcaatttttagcagagtccccaattacatacatacatacatacatacctatttagtatttatcattaatccaaattagagaacacaacacaataacaacaataacaaaattgtagtgattagagaatttggggtaacactttgaaaagcaaagccaattgtacaaaacaagccaatatgacaactcaaaagaggtacccaaatgacataaaagcaaaaatcagattgaaattgaatgagagaaagagaaagagggttatacttggaaggtttaaggagagaaggaattgatgtgagataaggaaaatgaggatgatgggcatggaaagcgaatatgcaaacccataaaccattgacaaaacatccttgagaatgaaaaacatctgaggtttttaatccaagaaaaagtgggttacacatagcattatccatttccatgtatgttccattgattgagaatacaaactctctttccacttctctttccttcccatcatcacatcgatacacatgcaagcttcttatcaactctgtcaaaaaaaaccaacaaacaaaatttcataaagttcaaaactttaccatctgaaacgtatgaaaattaaaactttacctcgattcagagtgttcttgaagattaagagagagattaagaaatgggtttgggatgaagaatccatgtcattgtgaactaatcaacaaagtttatttctttatataaatatctttaattaatttgaaattgcatggtgtttttggtcagtttcattcagttcctacttcctagagtcctaccaaaattaaaagttcttttttttcactcattagaaaattaccaaaaatttgaagatgtatatttttcaagtgaattaatttcacttggatactctatctttccataacaacaaattcttgtcataatttcatataaataaaataaattgtagtattaaataaaaagacaggaaaagtgaagtagttagttttggaacttgggagagtttatggaatgaagtgaaagaaaagaggtagttttgaaatttgtcatacattagtaatgactgcactagagagtcttttactgcactagagagagtcttgtaaaaaaagaaaagtgggaaattacataaatgggaggatggttaggggcattggggaagggcatttatggaaacaaagaaaagaaagagaaataagttagccatgagttgcattgcatgcttgagaagtggcagagagagaagtagtgaagaaagggaaactcctaccctaactacattggcctattgtgacggttcaacttattctcttttcctctttttttgcattttataatatatttgtactttttatacaaacaatatcaacaacaaaattaaattaaaattatggtgagaggaggaaacaatggaacatctaatcttatattgtaactttgctttttatttttggaggtcttctccgtgaggagtaatgccagtgccagactttgagacccgagtgttagattaggtcaaattcttatggaacttgaaggaaaaagaagtggaggttcaagaatttttttttatgtctctattattgtaacgccctaacaattaggcacgctatctgaggtaattaagaaaccctaatctcttaaacgagattactattaagataagcgcgggaaaatttaaactttaaatgaaaccataatgaaaataaaacttgtaa

SEQ ID NO: 186286 - DNA, 3217 bp, Cannabis indica
ctattattagatttatttaatttatgaagtttttctactattttaatccataattatcaaatttaaaaaatttaatttaattttttaaaaaataacattttagttagtggatccgtctctgtcaacctcaacactttgctagtagcaattaaaaaaacaaagatgtcacatgtacaagagtacgcacataaacaatcataatagcaattaattggatgacaccttaaatttactactgaatagtttaaagaattttactaccaaaatttaaacggtctaaatacaagtaaacagacaagaactattattattattattattattattattattattattattattattattattattttgatccaatttattattattcttaaaaaaaaaaaacaaaatttataaagctatccaaaagcacactgaactttctttctattttccaaaacaaaagagcaaagcaatgataatggctacaatccgaacatgttgcctttactcccctgaaacccttctcctccgctcagctccatctctcaacctccctcgttgccgccgtttcctcaccaccgccgcttcaaaggacaaagacaaagtcatagtcatatctggccccaccggtgccggcaaaaccagactcgccttggagctagccaagcgcatcaatggagaaatcatcagtgccgactctgttcaggttcgagggtcttttttttttcctcattttattgttgcccacataaatataatttagaaaaagagagaaaaaatttgtcttttttgattgaaatttcgagttgtttgaagatatgaatgaatgaatgaaattcatttcttcagctaaacattcttaaggttgaaaacaagttagtttaaattaccaacatgttttttttataagattcatttccatttgtgtagtttagctacattttttaagaggtcttgattgtttagaaattgaattggttttcaaattattgattttgaaggactaagtcatcatattgcctatgctttattagaattggctggtgatatatacttgatttgattcaggtgagggcaatcttttcttaacaagccagttaatctcaataacttttctaatatagttttagagtgggcctagtttttgcatgagggtgcttattagagtctcacattggttggtgatatatacttcacttaataaagtgagggcaatccaaccttaacaagccagttttgttaggttgagttaagccaataactttcccaatatgcttatgcttcattcatggcttgcatacatacatatgcaactacttttaaaactaagatgagaattatagcagatattaattacatttagatttaacaatctcatcaataataacatgcatttgatgttttagtttagtatactatagctaaaagaagagtaaatagatgtacacctccaccatggctgctttgaccttgagtaaaagccatcttcttccatgaaaattgttagccaaattgttagatgaagatgatggtaagaaagtttgtagagtgtatgagactcaatgggctagtcacataagtttgtagagtgtgtccaaggagactatctaaattagaaaaatggcaccatcccattatggtctctaataatatcattatcttgccaacacaaatatggttgtctaacaatgcttaatatgtttatactagtccaccaaaattaattccaacaactactaatcttataacaaatgagataattttgttatgttattttttttatatttgtcacaggtgtataggggtctcgatgttggatctgccaagcctcctgaaagtgacagaaaggtccttttatcttattgtatatgtttctttttcaagattatgttttaagcaatgaatattgaccttatggttgctgtaaaattaatgccagatgctaaagttgagattatacaaccttttttctttttgttcttgtgggtgcaggtggtgccacatcatctcatcgacattttgcacccgtcggaaggtttgtcatatttagaaccccctacttgtaaatgtaatatgttcatgattttgtaggatttggaagctgtaatgaaatgatgaatcttgctttgaattttgaattggtagtttggtatttcgttatattcttcagagtattctgttggacaatttttcgaggatgctaggcaagccacgagaactattcttgataatggccgtgttccaatagtaactggtgggactggtttgtacttgagatggtatgtattatgatatcgttttgtttcatatagatcagtcttcgattttttcttgtttctttcctctttttctaaacaattagtttgtttcttcaataagatttgcttgttaattgcttgcctaggttgtatttcatatgctatatttaactgacacttgatagtttttaaatatcttctatgctgaatcggtttagcagacattggttactttgtgaaacaggaaaacgattatgaactttagttggattatatcgatgatgttgctagttttactattagaatgctgctgattgaaataatgttcatgagtaatatacatttttgtttttcgggttttcttttaacttataattcagttgtgttctttaacatactgatatactactggtggaattgatacaattttgattgttgtcgaaaaggtttgtatacggaaagcctgatgttcccaaagcttctcaagaggtcgctgctgaagtgtactccgaactagctgagttacagagaactgaagactgggatgctgcggttcagttggttgtcaatgcaggtgatcctaaggcccaatttttggctcacaatgattggtaccgacttcgacgcagccttgaaatcattaaggtaggcctcttgttgtttctggctaccttgaaatagtgtgttatctctttgttcctcttgtggtttttagggtccattttgcaggctgtataaaaagttgtattgtattaattattatgattacaaattttaatacaatatgaatcgtattatttgatacataagaatgatttggattagcttttattgtaacacttagaaatgagggtgcacatcgggtgggttctgactgggttcgggtttggctgacctttctttcattttttttatttgaaagatacaatttatatacattttttcataaagaaaaaaacagaaaaaat

SEQ ID NO: 186287 - DNA, 2902 bp, Cannabis indica
gcaagcccacaatacaaacctgctgtctaccatcctctctcatgcaaagctttctgcaaaagtaaaactgttcagaaataaggcaaatgagatagaatggatatgttttctgctgacaggctgaaacaacttactttcgatcatttaagagatcaaaaagcttaccctccatatatctcaaagaagcttacaaataactgaaaaccttggttcctgtatgtttggtgcattaatcttaagatatcttgtgatgcctttaagtggcagtggctgcatagtataagtcttaccactccctgaacaagcaaaaaagattagtgcaagctaatgtgtaacgatgtacaatgaaatacaggaatggaaaagaggaatggaatatattgggtgggcgggggggttgaaaaaactgagtctctccagagtatgaattacaaacttttagcagaaaaaaaaaagtgacaagagaatcatatgaggaaagtagatgaagcctttccactaacagaagcctagtttctgtaccccattcttcatattaaaaatgttaaatcttcaatttctgaatgcatgggtgagatatgagggtaagaatgtcacaagttcaagaaaaccaaagtgaccaccactagacttgtttttctaatgtgaagttgtcaataagaatatgaagattcatgaggtcgggaagggtgcattcatcttcgtctatttgaactttacatattgtacagtaagaagatttagttgcagaaaatggaaaagatagtggaattcaatatgcctaagttataagcacttgcctgtttgtccatatgcaaagcaggttgcttttgttttgtggaaaattagtggaactacaggctccacactctcagagtatacctagcatggaaaaatgaaactcatcaagctacccaaggagattagccattagacatccacgtgcaatgaacttaagcttgttgatatactcacttcatcatttgaaacatcctcgtcaagcacagcatcaaaaacaaattcatgcttctcaacatactccgtcaagtcaacctgaaggggcagtgaatcatcagacctttcttttcatttatatctacatatataattatttatttcttccatcaagaaggcagactttggagaagatagtaaaatagttgtcccataacatagaaaatttaaggaaacatagtttaagaaaactaaaataatcattacttacagttagacttagattcaagactttcacttttaggcaaattttgttcacattcaatccaaagttaatattccgtttttgtttagacgtaagataaagagacagagcgggtataatgagtactagcatagattcatgatgttaaaacaaatacaatcatccagaagtagattcttttaccttgagttttgtttcatggacagtaagacaattagaatttggtgctatcgttattatgtcttcctccttttttgacatttcccttttatttaaaggtctcttgcgcacctgtaacaaagattgtcaccaaatattttacaccaaaaagaaaaagccagtaaacaggaccacaatttcacggtttacttctttgcagtgatcatatgactataaaaggacggatagtaatgtagcaaatggaagctttaaaaatgaatatacatggcatcaaagagacctaccacaactttgatttttgcaacattgttggctctttctttatcagcagcaaaacttttaagaagagcattatcatttaaacctcgtgctctgcctgtaagcttgttgttggagagaaatgactcggaatcatcaaagcttttgccacgaccagattgatgtccattatatagactggtactcacgggtatctagcagttccattcaaaccaacaaatataaacagttagcacccatatcttacccaacaaataaaaaaaaaaaaaattgtacaattaagtagtataaatatgcaattaatgaacaaaattgctttatataacgaaacttcgggtactgatggtggattggagatctgtaaattcagggtttatcctaaaattgcacccattaaatatgcatattttacgcagtttttatgtcctgataaatgcaagttaaataatatgtacatatagacacatatatcaatcaatgcgccataaatcattacaagaaagtataattcataaaccgtaaccggcgtctagcgattgtttaggcctatgagctactgaaattcaagggaaacactttcatcttcattgaagtaattaaaatttaatgataacaagcttaaggtaaggctaacctcaggcaatagctcagtatcaaaggaatggagatcgagcaagccagagctgagctcactcggtgagagttgatcgtcaccgtaccttctccaactggaagatctcgtggaaagtgaaggcgccacagcatccggcggagaacgatcgctgccgctccgaccaattctgctgggtctggacccatagagcccaaaatcctgttttttttttttaaaataaaaaaaaaaaaaaaaaatcaagcttctgtcatccagacacatcaatccaatccatgtagtagctactatctcgcctgggaagtataaaactcaatagggtttttaaggaaatgtatctacatatatatcaagagaaaaagagagaacctgcgatagattattggaagaggactggaaccacttagaggaagagtcaaggaagttatctgagtactgccgctggtgatgcaccgccggattagatctcgatagctgcctccccaccgcattcatcttctccgattagtctgtttccttctcagacggtcaccgtcgttaatccaaaaagaaagaactcaaaataattctataatcggctagctatgtatatg

SEQ ID NO: 186288 - DNA, 1361 bp, Cannabis indica
aatactttttgctggctctttacatatatttgtagtaaatttacatctatttcctaattttgtgacaggtaaggcaatcacaaattatccgaggcatttttcccatgcttgcagatcctcgacatcctgtaagatttattccattaattgagatgattcagcttcataatttttcgtacttcttttaaaaaaaataattaattcagaaagtttatgaagttttaaagtttaatctacaacagtgtaacttctagtttacgtcagaagactggcatgctttgtttttatttcgttataaaaatgtgttttgagaacatttaacgtatttgttgaaagcaaaagcaattagtcagataccattactaccacaatatgaccacattggcaaattcttcgtaccttaattaatatatgcagcatttcaatcttgcttagttttagcttttgcaaggctagaagagagactattcattgtttgtgtacactcttctctcacttcctgggcctttaacttaatttcttggcgtaactaagtttaagcatggttgtatttgcaggctgaatctactagtgcaacaaacgagtctattttaaaagttgccttggatcatggaaaggcctctggtcttataaagtctcatgatcgagtcgttgtttgtcagaaaattggtgatgcatctgtggtgaagatcattgagctggaagactagaattattatttgaccttcgtttttttttcttttcttactatgtatccatagtctatctataatctatatcaataatttataatctatatatctatctataatctatataacatatatataaagatgggtgatgattttttttggtttggtgaagttaaatgtggatgtgggttttttcagtttagtcaaattattttgtcattttgtaattattttattattttgttcattatgttatagataacttaatgtttttaaatgtttttcttttttaatttattattgtcatttttatttatttttcatacgcttatttttccccaactactttattgttgttaatttttttattattattttcaacatgcctttgtccaaactaatgtattcttatcaatttttttattgttaattttaatatgtctttgtcattttttttctgtcactcaatattttttttaactttttcttattattgtcactttttttaaattttaatatactttacttttattgttgttagtttttttattattatttttaatattcttttttcatattcttttcaaatttgttaatactctataggagaattatttttacttttaaagtttgagttgttctttagttgcttcggtagtttttatgtaa

SEQ ID NO: 186289 - DNA, 1618 bp, Cannabis indica
actcgagccatttggtccaaactgggggtataaagtaagtggaagggcctattacctcttttggagatgctggctcatggggtgccctcgtccgggtatgcaactacaaacctttccacaatctccttttccttggttaaagggtttggatggtgacgagcccagtctaccatcatatgtatgtcctctttaagggacttcttcataaatgtggagatcccaacgacaattttttccttgacctctaggtaaatgtaaccaagacccctgtttcaaatattatcaacactctaaaatttggctatgaacccatattcatggagcaggctagtggtaactaggttactcatgtttaaagtgctatccaaaatgaggtcgtgtatggccaatcttttcatcaactcctcgctcacaagagttccaggcacaggtgctagcacaaatgggaaaaattccattagtcataaatttaaggtgagaaaagaatattaaatagggacaaaggaaaaaggttcttacctggtgttttgaagtcctaagagagctttgacaccctcttcactgggaaaccagtggataaaaaccagtagtcctagaggttaggagattatgatgttgtgctaacagggcaacacatgtttgggtacttctcaagattgtaaaccccgatcttgcgcttgttgatgcgcatttggcagaatcaaggcatttaatcataatcatcattttcctcgagccccatgtgcattaaagtgttgtcacatcataactctttctccatttgagttgtcctgcaataaacgttcttccagcatgcacgtactattcacaaatctgaaggatcatgacacgcaggcaatacaagttgtttactataacattttttaatctcccaattaccaagtgccagatgaagagatgcttctgcattctcgagattcgtccatgtgtcccaagtgcaccctagtaatccagaaagagactggaagctactaccactccggagtcctagaatctttactggtaaatattatccacattttttatgaaggacacgtggcaaaaggtaaaaggcaacgatcctagtaattaccaattaatttcccttaattgcaaaaagttgcaaaaagactaaacaaacctagaagaggtgcaaatctgggaaaggcccagaaatttaccacaacaaaaattactgtccgggagtcagacgctctgtcatccctctgggacctggagaagattataccaattgagcttacagggagacacctggaagtcatacgaagggtctaaggcggatgccaattgcacaagggaaactggaagcatgtcacgagttgtatggactaacacgtgccttgcatcaacaggtgcaacttctgcccgacacgtgccttgcattaacaatggtcctaactgcacggacccttcgccccacgactcctctgagagttttctctaccaggtgcaactttttcctaacacgtgccgtacacaaacaatggtcccagctgtacggaccatccgccctacaagaaaagccttcttaggggcccaatagtgggtgggcttttgcagaaacccaaggttgatcatgggtatgtccatacccgta

SEQ ID NO: 186290 - DNA, 1229 bp, Cannabis indica
tgaaagcataatatatatataacttatatcgatctgtatttgaaagttttatttgattccgtttttctcggatgtctggaaatctaaaacaataatatatttgtactagctaggtatatagtcaagacataaaaatgcaaaggtaataaccaaaatatatatatactaatattttttggattcggtattcaacatatgaataagttgtaatttttgtttatacatttatatatgatattttatattagagttatataataaaaaaatcatcatactaattaatgttatatataaagataagtcatattatataaaaaataaagttgaaaaagttatttgcatgcttacaaattataccccaatgttttttccaataatattgtgaaattaatacagtgtgtttgatattttattttagtaccgtaaattaattattaaaaaaaaaataaaaaattggtaaaatatctattataataattataatatagattatggtagaagaaaaaaagttgaatcagaatttatttattaaaaatatatataaggccaatacagataagagtactaaaagtgatcactatactatctattaataagctgggccggtagatttcatgcatagatgctgtatagtgatgataatgatgatgattgatgatgataattattcggttctgcccaacatatctctacataggaattttgagataatagtgaatcttgagagagtttggatcttcattaactttttacagtggctgtatatggtttatggaaatgcacaacagaaattgagctggctggcctaaagtacacattcatattagagagaaattatagactcgagagagagagccaaaccaaaagataggtctgtttgcagagagagaacatgggtatacgtacgtaaatgaggtcgtataggtggggactattcttagatttccaaatcttttttgggatcaaagccccaaaacctatataccccacacacacaagactgatcatcacgtgatccaaacacgataacaccacactactcactctctatggatattcatgtgtatttatatatacatgtaaatatgtaaatatgtgatcatatgtgtacaaaagaattagtaccaccaccgctaattataaattatatgttacaattcatcagtacattttataacatacttcaaaatttatttgtaataatcttcaatcaaaaacggttttatcta

SEQ ID NO: 186291 - DNA, 1991 bp, Cannabis indica
aattttgtttgactcgtgttcgtgtaggagctaacattttgtttcttactgtccttattgcgatactcacaggagggaggaagtatcagatcaagggtcgtgcaggtcagggtggttttgctcaagtctataaagcatgtatctattctaatcctgatgaaatagttgcattaaaggtaatttccactttatagtcttctcaaaatgtaattgcaaaagaatgttattttttttctttcaaaaattgacttcttgtctagtcttacaatattctatattgataaacctaatcttaccatatttgagaacaacaaactatagcaattgtaatggaaggacctaagacttcaggccttgtgagaacaaagtatatatattatattgtatattaccttttgagcagctcacatgtttcgttttgtcttgttgtttatagcgttgtgaaaattactttaacatgaaacactatttaaacgagaaaactgtacaataaaatttaaaattagaacacaagatacatgaggtttgggttcggctaataaagcccacttccttgggaagggcagtgttttgactatcacataaatccaatgtcaccatatgagcttctcctccatgaactctttgcctctaactcttttttacccattagccattacaaattttttctatacccttgttcttcactaagtgtatacactccttggattttctgtatttcactcaatgaaactattgtatcaactacttttcctaactctcactattgcattctatagaaccaatgtatcaatctatattaaaactaaccatccaatcataacacaaaagggcataacaacctcaactaaacaagtacctttttgaatcaattatgcctactaactgttttaagttttaacaacttctcaaaacatctttgattggcactgtggtgcatctttccgccttggcactgacttataagagattgtttcctggatattggtgccatggtactagagactggcgtcatgctgccgaatttctgttgttgagttgtaaattttaaatttgagaggtaccatttacttatattgattataatttacaatatttcctgcagatacaaatgcctgctttcccttgggagttctacatgtatcgtcaactagatcaacgcatctctgctgaggaagtatgttaatcccgtgtttctcattttcgtatttatacacgctggctctctgtattttacataatctcttaaatctcatgttatcagaggtcaaaatttggttttgctgagagactgcatgtctattctgactgtagcatcctcgtttgtgattacctagccaatgggacacttcaggtaggtttatagtgccgtagagtaccgtaccatactaataagtatagtttgtattataactatgctgatataagattcttgtataggatgctataaattcgtacgtggtcattggcaagtccatggaagaggtgttatgcatgtattacaccatcgaaatgcttcacatgctggaaactttgcacggtgttggtatcattcatggtgatttcaagcccgataatttgcttatacgttattctaggtaccaaacttttcattatttagtatgaaacgttttgttttgccgtgttgttcaacataacctatttaaagaacagatagaattgtagaaataatttttgtttagttctacccttatgaacgtgaatcaattgcggagctataagagtaatgatatgtgcactcattgctccaaaatactacacacagtgacgtgttagtgttctttttactgtagatcccatcttaatttatatgattgactgaaattgattactcattttgtcacagtttgccatctaatgactaacaatcacatgacccctctcctctgcagggatgacctagtagaagatggtttcatagaccgaaatagttcttggcggcaccaggtttgctatggcagtatcttata

SEQ ID NO: 186292 - DNA, 2790 bp, Cannabis indica
aacaaatctcaacccaagaacaaatatcaatatggagtgagtgaggctaacaaaaagaaaaattaaatacataaacatatttatatatatatatatatttatataagtggcaaggactagaagaaccaaactaaagggaattatataacacttttcttcttcttcttcttctttttataatgtacttttctcaaataggtaaaacttttctcactaaatcaaagccacacccattgccaaagctttcatttcaaacctaaaaagataataatataaacgaattcctaataacaaaaaaagaattaaaaaaaaaaactatacaccaaccaacaaaatgaaaaagatttttaaggatatccaaccgtcttactcgctcgctcgctcattttcatttccaccaccaccaccaccacggccacccataaccgattgcccattgctagtattagcaaagcattgttaagtttttcgtttaaacatgtaaaacccgaaaaatctaaacaggtatcacgtcgtgtttggacgtgtcttcacatctcaaaacaacgccttcaaggttggcgggaaagatacattgaccccattgacatcctgttgttaacggctcgggtggagggacgatcatgagtacattctcgtttctttgtacaactcccatcacgctaaccgtgctaccttctttgatgtacctacaaaaatcatcattttaagattggactcatcaaaggtaacacattcaatgattttgtttttgtttacccttctttcaatcgcattgtacggtcatctctcgaaagatttctctcggtcaaccacctcacgaaacctggagacatgtcttcattgcccgggttaacatcgataacaaaggagtcatcgacataaggtgtcactcttgccccgccacccgtcttgactaatgctctcaagccagattggaaatcggatatgtaaaagtccacaacatgtctctgagataaaaaaaaaaatgagaaagatttcagttcacacaacacaatatgtgagatttataaagcttccttctttttcttacaaatatagcctaagcaaggttttgtattgagataaaattttgtgtgaattacaccgaaaactaatattgaaacttcaaaatttatcagtgtgttcgaaaaaagatgggctatagaatgatgtaagtaagcaaaatagcaattacacacctcagaggatctaagtccccacgtgaagcgacgatgtgtggaatttgctggttttgaatcccatcctcggtactcgtataaactcgttgatgtatagacacatcttggaacttttcggaaggatgactcgaggggtacattaccacaagtaacaaccttcaagaattacaaaaagagacataatattgtaattggtagcatgccattttgtgcatttgcaaaataatcgaaaatgagatcacattattatgttctttcatgcctaattagccaacctatgaccgaaaccattatcatttttctacctattttctactctataagcctcactaatatacaatacatagttacatttccaacgttaacttttcttctttcttttttctcttagaaattgaaacaagtgtcgatttttttaggggggcgccgagcccatgcagtagtgcaaagaacgaacaatactcaagagccccaatagcaagctcgtgtgagtcaatggcccacacatcagatactaaactgataagaacatatactagcatttcataacattgtagattggattgtatgtagaattatatgaaatttatagagtaatgcaatcaaggtaaagacaagaacatagtgattatgttacttaaacctccaaacacaacaaagattaaataaaagttaaatctatgaatggaagaaaggaaaaaactttatcagatttcggtaagcaacataccccggaaactttgacaagttgtccatttctcgcagttctaagttcagcgtcgggataactagtaatgaaattaatgacagctcttcttccccaacaagtattccaagtgaacaatgcagcaacagcaccgaaaagcaccacaacgacgatgagtagaatccaattgtgaacagctccaagaatgaaaccaccagctatgaaccccattacaaacaacagaatcacagaccatagtatcgactttggaaagttcctcctgaatgaatactcatcatcttggctcaaagtagtaacagcctgattatgaacaaccgaggagccttgtcctttcatggatcccatcgagtctaaaggacccgatacctttctaggagcccccgacgagttcagtggaccagaagttattggtccagatgtaattagccctgttgttggaagaacaggaatagggcctgaattttgtcgagtcacaccacctgattgaggccccgacgacttctttataggttccccgtgtttgttcaatggtccagaatttgtctttttaactgaggttgaaccaacccctgaagatacaggtcctgaagtgtaaacaacccgagctgaagtagatgtaattggtccagaatgtgaagcagcgccaccaaacgatccagtcctcgaaggtgcattgcttataggcccggatttcctagacttagaaccatccattgggatatcaaacattttccccaattctccagatttttttatatcgccaccagtataaggcatggctaccgagctcatagtgggagtcctttccttaggctgctcaggtcggcctgacacatagagcccattgctgagctgatgaga

SEQ ID NO: 186293 - DNA, 2715 bp, Cannabis indica
ttcctactcatcgctctcgaatctcctaccatctccacgaactccctcgacccacaacttctttgctctccgattctctctcctcacccacctccgcctccgccgcttcttcttcttcttcctccccaacttccctcctcacctcttcctctgcagctccactcctctttttcaccatcgcctctgtcctctcctacatcgcctcctctcgcccctcccccgccaggtcctccgctaatcgccctccctcttcctctgccggaaaatcttctgcctcagactactctgtctccgcctttcgagccctctccaccgagcacatctggtcccttgaggcccctctccgagatgcccagtggcgttcaatgtacggcctctcctaccctgtcttcatcaccgttgttgagaagctcaagccccatatcgctctctccaatctctcacttccttctgattacgccgtcgccatggtgctttctcgcctctcccatggctggtccgcaaaaaccgttgctgctaggtattctcttgacccctatcttgtttccaagatcactaacatggttactcgcctacttgctaccaagctctacccagaatttatcaagatcccagttagccgccgccggcttattgagactactcaagcttttgaagagctgacttcgcttcccaacatgtgtggtgccattgatgggagcccaattaagcttcataagcttccccatgaccagaatttgtctggtaattacaaatgccgatatggatatcactctgttcaacttcaggtggtggctgaccataagagaatcttctgggacgtttgcgttaaggctcctggtgggactgacgacgctgcccattttcgggacagtcttctatataatcgactgacttcaggcgacattgtttgggacaaggctattaatgtcctaggtcatcctgttcgaccatacatcgttggggactggtgctatcccatgatgcctttcttactgacgccattttcacccaatgggatgggcaccccagcgcagaacttgtttgatgggatgcttatgaaaggccggtctgtggtagttgatgcaattgggttgctcaaagggagatggaagattcttcaggacttgaacgttgatcttaatcatgccccgcagacaattgtggcttgttgtgtgttgcataatttgtgtcagattgccaaagagccggaaccggagctttggaaggagcctgatgagaatggaggcccgcccagggtgctagacagcgagaagtcgttttattactttggtgagagcttgaggcaggcattggctgaggacttgcaccaaaggctttcatcaagataggattttgtaagtgagccctctattttcctttaactaagaagttaaacatgtttacttcttcttgttattagttcttgagttgtgagtaggattttaaactagatgtttaggtaaaagttaacttgcaattactactctgtatgaccaattaactagaaaatgggattcaaaatgattacccaaatcgggaattggaaagagttgaaatccacaccattatcttctaaatgctgcatctttatcttactcatgtatatccctgtaatgcttgtttttattctcctattctaaatttaatagcaaataaagtttctttgggtaagaaattcgcttagtatatccaggcagtaatcaatactatttaatccaaatggattgggtcgactatagtaatcaggggacttgaataattattaatctgatctacaagaaaataacagtaatattttgatgtgaaagcttttttcagcacattaatcttagatgttttgtttttgatgtgaaagcaaaatttgggttattgatccgagggaatagcctaaggtgcagcgttgttgtgtatgctgttcatgtttttgaatgcggtagaaattgcgattcactataatagaattttagttggcttcaaattcgttttcttgcttctccatttattccctggcctttagttgtgacatgtggcattcgaggattttgtgttgtttcttcatttctttctgggcgcttgttttagttatcagttaaaattggagagttagtggttcactttattttgctgttcttgatcccatttttaatatttgatttccttgaacagaaatggatttgatgcttatatcaaattatattatggtttgaactttggtacttatgagtatcatgatttgatgcttgactaaatctaatacgtgttggttggagttatgaatcatgatgatgaagaatgttcttgatctcacttgtaacaattttcatttgtctaagttaggaaattggaagagtgaaaatccattcagtatagccatattcttctattgtcgctgtttgccgggtacaaaatgtaagcacaataaaccatggaaccacgggcggacccacatataagcgagatgggacaataacccttgaaaaaaaaacggaaaaaaaaaacatatacattttaattagttacaacagaaatttgtagtaaaagatgatatttacaaacataatattaactttggtataatgattaagctacttaaaatataggttgaagacaactaaaaacatttttttttctttttaagtttatttttgtccaacctctcttactaaaaaaaattacatcccctcactttaactccgaggtcctccctctgtg

SEQ ID NO: 186294 - DNA, 3294 bp, Cannabis indica
cattcacctcgatcaagaacacacaacacgaaacccaattaaacataacaatgtcaagaactaaatgaataggggagtcaaacttgtatagctttcggctactaaccgaataagataactaacttaacagaataagctaaccagtcacttaatgagagttagttactggttacttgtaactaaactcaacaaaattcatcatactcagcagtaatgcagctataaatttcaaatgacataattagttttattataataattaaaatttgaaacaccacactatattacaacccgtgatagacagacaaaccttaaatcacggttgtccatgccctccaatatcaacttacaaagctcctttctttttttcttctttatgagctttgaatctgaaataggggctcagatttatgtacattacattatactatatattacaaagagatcatattacaaaccctgcaaatccatatatctgagcataatacatcttattttatgatctttacacctctgtttcaacaccccaaattacaatctcaagcaggagttgttgacagaagtcaaagacgcttgtttcggtggaacaagtaaggatccaccattacagatatgaccagcagttacatctaaaaaatgaactggccattttaattttagtacacaaaagcatataaatatatatactttttttcgtaagaagtatgataaactagttcgcgagtttgtcaagccgggaatccatgatttcagagacaacttcaagaaatgctgtttcactcatgcccgggagacaggaatcccacgcttcttgaacaatcacctcaatgacagattccttatttacattttctctacacatgatacttccaatggcgaaaggagttaagcctctctctactcctttctttagaagcatagtggaaatacgaagtgttcgagcacactcaagaggaatgtcccaaccatagtatttcaaaagagaaatatctctttcagcatctaacgagtttatgtactcgacggtgtcaggagaataggcttggcgtgcctgtggccagtaaagccagtcaaatgtgcaatcttcaaactgcaagaaggaagagagagtaagtaaacttgtgattaaccacaaaaatccaaacaataaccagatgttcaatacgaaagtaagtctatagtctggatcagggtggttagttttaagcaagctaacgattttgatatgttcgattcgaacacttaaagctaaaagtttgcataaatcattatagaatgcaatgaaaaattgtggtatgatcagaccagttctacaaaagacaaactactgataagatagcatagcaaaggaaaagactaaaccatgaaaaaagacttacgctatcaggcagacagtatccatgatcaattggaatgagcacagtttgaccattttctcctttactcagcagaatgtttccagcatgcctatctgcattggccatccttatgtcaaagacagtgatcttatgcacctcctcgacggggaaggctccgggaccaatgtcctcacaacttccctcattcctcttgaacatctgcagtgatcctatcttaacattctttggtccactctcatacccatctggatggttaaatcctttgtgcaagcactgaaccatgatcgtcggaggtacaccagcaaatcccataacctgttcacccgctggggttcgaggtccatttattggatgatccaatatataggcagccacttctctaagtgctccatctccaaccttggttcctcttttaagaccttcaccattcagagaaacgggtaatcctcggggattgttcacagccataggctcttcatcaataggcttaaacacagaaacatactcttgtcctaatccatcttgcattagataagttcctccagttccctcagaggatctgatgggttcatagcctttctccaaaccatcaaatgtagagttaaacatatcccagacagatttcggaaacttaaccttgggattaacataaataggttccaacaagaaatctctatcactacaaggtggcttagttgttgttacaagtggaagctcctcagatcggatctcttctgactcattaacttcctcatcaagaactgcagccaccacagacagctccaaatccttctcaaggggtttagctctaactttagcagatttctgaaccaccaaatgaatagctgcatcattattcttattaatatcatcaatgagtctttgatcttcaagcttttcaccattaaagaagatttcttgatcatcaatatccacaaaacctttccctttcttcaaaatcctttgcttcaagtacctaacatttcggtatctatcaacgtggaattcaaactccttaccacaagtggttctaacagtgatgagcaaaagatcagagagccttaaaaccaaatgcaaaacattcccaccagtcacaccataatccttaaccaaggaatcattcctggccaattctctgcctccaaacacaagcttttgcttcttaactacaaaccctttacaagtctgaatcctaagtttcacagaagcaatggaatcagattccagaacacgcatgggaatcacagaaccagccacactgagataaattacaatagattcactcgaacaatgtgaatgtcttcctcctctcctactaccgaaaaacccggaagaatgtaccgattccttccgaatcggactcaaagcaacatccactgacattttttcccccaaacccaaaaataaaaaagattcctttttaccggcctttcaatcaaacttgacgaaaacccataatcaaaaacatcacaaatcgaaaaccccacaaaggaattaaaaatcccagggggttcacaaacaacaacaaccgaaactcgaaaaaaaaaaggaaaaaaaaaaacccaattacgaacaatctaagtgatggggggtagctaagaaaaaactctcaaaaagataacatttttttcttcagaaaagttgaaaaggagagagtggattcttacccaaggaaaagaatcaaaggaaaatggagatggaagttgagcttaaattgccaagagggaaagctggcatggcgatcaggtggcgattaattgagatgagttgtttacccagattggagggttaagagtcataggtctctccgcagtgttctcggcgagattttctggtccgagaaaattgtagtctgattaaagagaagagtaaagagagagagagagagagaggagagagagagagagagagagag

SEQ ID NO: 186295 - DNA, 4985 bp, Cannabis indica
tagttgtttttgtttttttttttttgcatgcgcagagttctggaaaatcgtccgttttggagagtattgttggccgtgattttcttcccagaggatcaggtttcctgtttctatctatgtatttaaatatttttaaataaaacgttaatagtttatgtatatatatgtatttatattatactaatctatttcgagttatctgcaatttatttatttggtcggaatttcaatattaaacaattgaagtttatagtcaactgtttatccttgtctgtcaatgtcatgtttggagaagaattaaaagcgaggagagtcagcagggtcaaactacttttttcaaatcttattggggccgatttgtttatttttatttttttttaaaaaaagaaaagcatgaacacttctttttgggtgaggggtcccaaatgctattttataatcatttggtttaagaaatatattcaagagaaaagatgggaagaaatgattatgcttggtttctgggaaaatacaaggaaaagagaaaaagagatgggaaaagctttagaagattttagcttgcacaattgggcttgcatgaattttatattaataatttacaatatcttatttttcatgcaactgtataagagaagtttaatttatttatttttttctttacatgagttcttataataaaaggttttacaggaattgtcactaggagaccgttagttttgcagttgcacaaaacagaacaaggtgtacaagagtatgcagagttccttcatttgcaaaataaaagattcattgattttggtatgctcttttatttctcttggctgtgttgtggcatatgatttgtaactatggttaaattataatactcactttggaaattctctctaaagttttaaagggatgtgagaaatttgtgtgggtggggcaaagagttgtttcaattgggattgctcttaggtgattggatttttatttgagatgatcttgattactgttgtgagagttttagactgtgtagtgtatttataaagacagatgttttggatgtgggcagctcaccttgaatacattcaacaaataaatcttgttttcttattgttcttgcattttgttgattggtttgtgtggtcttagtataaataagctgagtttgcaaaacttctaaataatttgtcttacattttttttaataaaatgcaatttcgttattttgcactcttgcacagccatggttcggaaggaaattcaggatgaaactgacaaaatgactgggcggtcaaaacagatttctccagtccccattcaactcagtattttctctccaaatggtaagcaaactggatcttgcttctgtgccaagtatcttatttgttattgcattttatttctatgtgttatatagttatatgtgggaaatgattcaatgccacatcttcttaggatgaaaagttacattttcatttttcttgacgtgtgagttggtcttaatgtttctatcatctgacagtccatgtttatcttttggcagttgtcaatttgactttgatagatttgcctggtttaacgaaggttgctgtaggtatattggcttcactgttgctttttttgtttttgttttcactggtgttaattggatgtacactttatgttcatttcctttgcaaaatactaagcaagaaatgtttgtttttaacagaaggacaaccagagagtattgttaaagacattgaaaacatggttcgatcctatgtcgagaaggtattttttttgaggaaatcttttactcttgttgagttaagttgatgctgctaagctttggcggaactcattagatggaggggtccatattcctttattcttcaaaaatattatttggccctccttgatttggttcaagttccgccattgctgctaagcatgttgttttgctgatcttctatcttagtgagctggactgaaatgtcttgatcttaagtaaattgtattcttaatatgcaaatatactgaactactgaagtaaaatcaagtatattcatttaatctagtgaattactattgtaaaatcaagtgtatcttcccattgcaatatgtatttttatggaatgtccattatttatgttcacatatttgccttatgttttatgaatgatttttttgatccttgattgcagccaaattgtatcattctggccataactccagctaatcaggatatagcaacatctgatgctatcaagcttgctagagaagttgaccccacaggtatctttctacacatattcctaatttcctactttattatgattaaactgtaccacctttatatggaggaagacatgaacatagtttcctgtttttcttactctggacttatttcttatcaaggtgacaggacatttggtgtgttgacaaagcttgacttgatggataaaggaacaaatgccttggatgtaagaaattttcttttgtttttctttttcctagtacaatctttggaagttcaaaatttaggatatagactgcttacttgcaatggggccaatgtgtgatccaaaacttggtatttcattttgaagcaaatatgcattgaacaagcaacgtaatttcaacgcttaaagataataactgggcttttcatgtgtgctatatatgggaacacattatttacgacaactttttattgtatttgctaggttctcgaagggaaatcctatcgtctccaacacccttgggttggtatagtgaaccgttcacaatctgatataaacaaaaatgtggatatgatttctgctcggattagggagcgtgacttttttgctagtagtcatgattacgggcacttggcaaacaaaatgggatctgtatatcttgcgaaacttctctcaaaggttctacttgttttatttgttataatctttttacattatttaaaatctagcagggtccctagtgtcatatatatagtagtcttattaatgtcatatggtttcagcatttagaatctgcaattaaagctcgcctcccaggaattttgtctttgattaacaaaagcattgatgaaattgaaagagagatggactatcttggtcggcctgttgctgtagatgctggggtgaggaactctcagttagctatttgattacttcttataggaattccagttttagataattatcttaattgtgtgaaattgtattgcttatgttgattaggcacagttatatactatcctagagctatgtcgtgcatttgatcgggtatttaaggagcatttggatggagggtaatattttctcaccttttggttttttgttctggaacttcaaaatgttatatatttacctaaatttcacacactaactagcagcttgtcccatgacctgcagctgttagttcatattataatctgtcttataatgtgatcatgatttcatgcagatctttgtttagtagattttagattcttattcaatcttgtttcatttgtatatggcagtatcttatacattctcttttgtctcagacgacctggtggggatcgcatttatgctgtatttgaccaccagctcccttctgctttgaggaagctccctttcgaacgtcatctttcttttcaaaatgtaaggaaagtggtttctgaggcagatggctaccaacctcatctagttgcacccgagcaaggttataggcgccttattgatagtgcacttaattatttccgagacccagccaaatgctctgtagatgctgtaagtactgctcttcttttttctgggtgatttctgagggctagacttgattaatgattatgatcaatgtctatcagtttaacatactctggcattttacatgtctttgcagctttaaattcttatattgttaatcagtattttggcattgcaggttcactttgttttaaaggaacttgtgaggatgtcaattggagaaactaaggttcataatttatttacattaaattcatttaatacttcatagcagttgtgatatagactgacctttctgttaatggagcaggagctgaaacggtttccaactcttcaaactgcattatcaacggcggcaaatgaagcactggagaggtttcgtgaggatagcaagaagacaactttacgattggtggacatggaatcatcatacctaactgtagaattcttccgtagacttcctcaggaacaggaagtagggaatgtgggaaaccaagttgcttcgtcttcttctggagaccgatattcagaggggcacttccgcaggattggatccaatgtttcctcctatattgggatggtttcagagacactgaggaattctattccaaaggctgttgttcactgtcaagtcagagaggctaagcggtctctacttgatcacttttacgcccaactgggcagaaaagaggtataaaatagatgtttatggggtaatactggtagattgtttattcttcgggtctcatttggttattcttgtgtacttttatagggtaacgaacttgctcgactgttggatgaagattcagaattaatggaaaggagggtgcaatgcgcaaagcggcttgagttgtacaagtcggccagggatgagattaaccaagtatcatggtccagataaggtgcaatctaagtgtagccctataaagaaacttgtatatgttaatagctagctgtagggtgtggctaacatttgaaaaaatggggttactttacttttgatttaatttggcttatagctccagtacactttttttcttcttcttcatgtaaatggtttgagattttacttagtattgttagttcattaattttcttcattcagtttctggtagcattgctgcttaatctacatatattaatattgtgaattgcacttcattcatagttttggaacagaatacgatttgatcaaatgatgtaaacatttttttttcttttctattaatatgatacatctaatcatattatgcacct

SEQ ID NO: 186296 - DNA, 2227 bp, Cannabis indica
tcaataaaaccactttaatgtttttcctttcttccgcaatattatttaaccaataactaacttaactacccaagagactactaactaaatttaattatattaactaacacttaggcatagactaacatactacttttggtctgaagtgaatatctggttcatattttaagtattggcaatggacatgattaaatgttgattttaactcatagaatacttgatgtaaaaaacgaagatttgagaacaaatgataatcaaatagatagtttatgaaaggcttcaaatatttcattcatcattgggtaattgatacaaatgagtgaccaaacaacaaaaagaacaaaaccaaactaagaagatacaaacaaaagaaagagtaagttaatgaaatatcttgacatcccaaattgccaaccctggaggagccttaatcttatcacaccctttaacatacaaatatctcaagttcttcaactttaacatttgttttggccaagtctgaaattcaggacaacgatagattctcaaagtcatcaaattatagagatcacacacttgttctggtaactccttcaaatgatagttgtcagagatacaaagatatctcaaatgtatcagctccttgatctcctttggtatttcagcaattctagcaccagacaagtgtaatgttcgaacaagttttaaattttcgagattcagccttaaaaaggttgaaccatccgatgatgtaataaagagcgtacgcagatgccttttcatgttcactgattcgggaatttgactatcagattcgagcaacaatgtagcatgacgagccttttcattggcttggttgacagtagtactaacagtaccttccctgccttgattattgttgtaagtgtccaccataaaatactctttggctgtaagatattgaaggaagtcgtgtatgagatcgtgcatcttgcatttttcgattctcccatcgttatcctttttgaaatcttggaaaaaggatcgtgctgctaagttctcgaaacaatctttagcctgcagctcaaaacattgctctatgcaacttaaatcttgttgttcaagatttttgcttggggaaaataaatcttgtgaaagccacattgtaatcaattcatctctatcaatcacatgatctttggggaaaacacaacaatataacaaacaaactttttcaaggggaggcagatcatggtagctcaacatgaatggaacaaaaacattgacctgaagatcttcaatattccacagagcactattcaaaatataattccattgatgcacatgtcttttcaaacgcatcaaacttcctagtgtcttagcagcaagtggcaaaccttgacacttgtgaacaagttccctcccaattctttctaattggctattttgttctctattgaagaaagctatcttactgaatatagaccaacatacctctttggtcaacacctcaagtctgatcattctttcctctgctcccatcatttgaacaacctcctctttacgtgttgtgatcaaaattcgacttcttggatccccactttcaagacaccactttatatgctcccacttttgataacttgttgtccaaacatcatctaacactagaagaaacaccttcccacttaaagcatcagcaatgagtttcgtcaaaatttccaactgagttatgttttgtgcatcataaactttgagaaattcaagaatctctttcataatcttcatctcatcaaaaggttccgacacacaaatccacattctcaagtcgaaatgttgcttcactttcttagcatggtatgcaagtttcgccaatgttgtcttccctataccccccattccaacaatatgaagggtattattagtcatattatttttatcatctcttctaccaatgccaccttcatgatcaccaaccaacttatctactaaaacttcctcttcgagatctctaccatacacttcagacacatcaatgaatgaagttgtcatcaaccgccgttcccctacttgttggctacatgaagcagttgagttgctcatgttgaaagaaaacttatccttctcaatgcaaatagcatcaactctaccattcaactcttcaatctttttcgagaacttgtaatgtaattttagttggcttattacatttctgggaggcctatcatgatgtgtgtcacattgaaagcacatgtaaaataataacttgttt

SEQ ID NO: 186297 - DNA, 3677 bp, Cannabis indica
taagaatagcccaaatccccctccccatcatgccatgaccaatttccaaaattttatcgctaagtttgatttgcacactttgccttttgtgggaaaccgtttcacttggaaacatggccaaatccgtgagcgtttggactggggagttgttaatcaagcttgggataaccttttccccacgtccaacattgtccatcttcctttttacggctcttatcacaaagccatcaaaattgagtgtgatcccaccccttacctttgtcatcgaaacaaatgtttcttttttgaaaaccactggcttttggatcctgagttccctagcctcatgtcaacttgttggtctcgttcttagagtcaatgtactttggactctttcattcagcttcaaaataattgtatccactctcttaaaaattagagtcagtctaaaaattctgtttgtcacaacattgtcaccttgcaaaaccaaattgaagctattcacagaaatccttccctttctactgaggacattgctaaggtcaaccaactccaatcccatgttaactctctcctcctcagagaggagtttttgtggaagcaacggtctagagttaattggcttaaagtgggtgataataacaccaagttctttcacagccgtgccaattccaggaggaggaataatatggttaagtgtttaactctggatgatggctccactgtcacttccttccccacaattgttaacacttttatggagttctatactaacctttttacctccacgggggctgatatggattccataaacttaatcatgcaggggatttctcaacgcatcaaccctgaccacttcactttcctcaataaagatttcgattcatttgaggtcaagactactcttttccaactttctggtgataaggcccctggccctgacgaccttaaccctcttttttactagaaaaattggcacctttttggtaactctttcactcaggctgcccttgatgtcttaaacaaaggtgctgatttgtggtccatcaatgaaacctaccttgttctcattcctaagaaatccaacgcatctaaagtctgtgacttcaggcctatcagtctgtgctcaaccttttacaaggttattgctaaaacaattgctaactgcctcaaaactgttcttacctctcttatttcccacaatcaaggggcttttcttagcaatcgtatcatctttgataatatcttaattgctaatgaagttattaatgccataaatggtcgtaaggctggcaaggttggctgggctggactcaagcttgatatggaaaaagcctttgacaaagttgagtggggtttccttgagagtatttttcttcattttagcttccctaccaattttgtgtctcttgttattaggtgtgtctccactatctctttcaggttgtgtatcaatcagggcatatctaatctcatcatcccttctaggggtatcaggcagggggatcccttatccccctatctttttcttctggttgtcgagggcttatccgtaatcatcccctcgaaagaacatttggctttgtttaaagatatctccatttgtcgctcttccccatctatttctcacatgctctttgcggacgatagcctcttatttacccaagtgagccatcataatagttcttatattcaggacattctctccacttacaataaggccatgggtcagtttgttaacttagccaaatcctctgtcttgttctctcgcaacacctcccaccatgataaacactatttcctctcatcccttggtatggctgacaaacctttcatcgacacttatcttggtgttcctcaatgttttgcaaggtctaagaaatcctctttccattttattctccaaagagctagtagtaagctgagtgtttggaaatctaagctcttttctaaggctggcaaagaagttcttttaaaagccgttatccaagctatactctcttatgttatgtcgtgctacagggtccctcagtctatctgtaagcagttggaaaagctcatggctaatttctggtggggtgcgaaaggccaaaataaatctaaaatccactggaagtcatggcacaatctttgcaaatccaaattctttgggggtcttggtttccgatccatcattaatcacaatcaggctatgcttgctaaacaagcctgcgtatttttcaaaatccctcttccattcttgctactcttctcaaagctaagtatttcaaacataatgactttctccaagcctcaattggtcactgtccttctttttcctggagaagtttactttggggtcaaaatcttcttcttaaagggctggtttggaacattggggatagtaaatctgttcctactctttctcctaactggctggatggagtcacccaccccttttttaaaaataacttaaccccccctgaaaatattgtttcctactttattaatgatcagggtcattgggacatccacaagctgaacacctattttgatgtggacctggttgcttctattctttccacccctattacttcttcatctcaagactgtctcatttggggttacgacccttctggcaatcttactgttaattcggcctaccatcttgccaactctactagctccttgccttcttcttccactcccaatacttttcaaaaatggtggaaatctgtttggtcctcccaaattctgcctaaaatcaaacatttcatttggaaagcgtttcaccacctccttccttcgactcttaatctccattctcatcaagttcttgactctccctattgttctttatgtttgaacaaagtggagtcaaattctcattctctgctagagtgttcccgcgcaggcaagtgttggaagaacactagattctacgacttttacaagaaaaatgtccactgtgatataaaagaatatcttttaaggggttttgacattttttcaaaaaataatttatgcactttctttggaattttgtgggctatttggaacaaccgtaaccagatcatttttgcagataagaagcctcacttcaaagacacataatcttttgttctatcttatattcaggaatatactgaagctcaagttaaagtctcatcctcttttcagctttctcatagccacttttcttctattacctaggaggtttctttcaagccagcggttgggttttacaagcttagtgttgatgctgcctctcaaagacagactaataagcaaagttttggagccgtggtgcaagatcacactgggcgtatcatggcagcactccattcctccaccttttcttgcactcagcctatctttgctgaagctgaagccctttacagagctataacttggtgtgctgctgttaggtttccaattggtttaatagtctcggactgtcagcttctcatcggcaaaatcatcaatcagcagcgcaacaactcagcgctttctgataaagtttggcagattatctcctctttgtccctctttcctgatgcttccatacgctacatgcctagaagtctcaacacttaggcgcatgatcttggtcaacaagcactaggaactgatgaagaggctctttggaacaattgcgttccttctccttagcttctgcttgcttctgcagtagctatgttctctcaaaaaaaaaaaaa

SEQ ID NO: 186298 - DNA, 2123 bp, Cannabis indica
tgacataatgtgatattgtcaaattttatagaagtcatttcttagtaatgattttcaattgtttcaggatagaaatgagaactttgttagtcctaaggaaaacaagcttagaagggaagagactgagaagcagatacataacaagtatatgcactctacttcagaacttggtcatttagctaggaatcatgcaaaggcaaacagaacagatcaaggacattgtcatgttcctactcacggtcgggctgattcagcaaaacagaagcaacctcctcataaaaatccagttactaaaactgtagataaggtagaatcaggaaaaggaattggtgaaaaggcacatctcaagaaaaggagaggctgtggttgcaagaatgttgattttgtcaaatatgatgagcttaacaaggtcaatccaaagttgctaaaggcaaatgatgtggctgaggcaattgtgaatcagaaatttattgaagggaagtacctcaacagagatggaataaaccagcagtctaatcagttattggatgctttagagattttgaattcgaacaaggatttgttcacgaaactcttgcaagatcccaattctttgttagtgaaacatattcaagagttgagggattgtcaagaacaaaaacagcagacaaaatcatccagtaaaaatttgacacaatgtgatgatccacagagttctgacacaatagtagttctaaggcctggttcaacaagcttgctagattcttcttcagacaaaatcaagcattgcccctcaccaaagtattgtcatggtgtggaaaaacatgttcaaagtgttaggcctggctatttttcccttgttcaaataaaaagaaagttcaaacatgctatgggagtagccacaaaagaggaggacttgatgtcaattgatggtgttcgagtgcaaaataattcttcatctcccactgaagatgggaagaaagggaaaggaatggagaacataagaagaaacttccgaatagaaaataaagaagtcaaagattatacctttgatatcgcgaaaagagacaagatagcgaaattaaaagatttcaaagacagaattggacaagaaactgcttccaccagagaaagtggtcatgaaaactcaaatttgttgagttttcgccatcctaaaaggagtgaatctagaatatacattgagggccggaggcattactatgaatctgaattgttggataacaataatgaggatggaagtttttttccaaaagaggtaccaatgtttttgcagaggacaatctcttctcctgactatgactcattgcctgtacaaagttctaggagtgacttcaaagctggctgtgttaatgctcaaatgagattctccccctacagctatagccaagtggtctatgaagatagttggaggcatgagaaagaacatgaaagtagctactcaagtttgctgaaccgaaacatagattcgacaactgataaaattaaactcaacagtcaattcctagatgttgatactagaggtatagttttctagattttcaagcttaaacagatcaacaaatatctacagatataagaatctcaccgtgctatattttatcatcaggaaaaacaaatccagtggaagtccaatgtactgagaagaatgctgccatggaagctactaatacaagacactcagaagaaacaagttcttcaatgctgtcttcatcagatggctcagatgatatctttacttcagatactagcgacgatacacagcaaaaatcaactgatcttttagatgcaccatctcaatcatgtagcacttacaagacaagtacaaatcaaaacacaaacacagatgaagaaaatgaatgtcttaagtgctcaagaatggtaaatttcattgacacatctcctgttatttgtgtttgccattactatttcatgtgtattgtttttaattaaccaacaatctttaatgttattcaggatctgcttttcgaggatcaaccttcaacatgttctaccgaggttttaccttcaaccccatcaaccagtgggagagtggaagaggaccctgatggcattaaagatagaggatatcaatcaagtccaatttctgttcttgagcagttttt

SEQ ID NO: 186299 - DNA, 784 bp, Cannabis indica
attttttaagagaaaataaaattaattatgttttagctttacatgagttgttggggttctcttgcttgggattcctacatccgtgtgggcacctcatagtgttttggatattagtgccacctttttaagaggctcttgtgtgtattttcacttcgttcaatttctctcctcctatctatctatctatcttttatacaaagcacgctcttgttaaagagaaaggtttttgggaatcctatgcctcttccttatattctcatagttaatttgcttcttattactttgtcccttttgagattacaagattcccaattcttaccatcatcataccctaatgtgtttagatatatggttaaatctcttcctcatcaatactagtttttcatgtaaacatcagctaataaacttgaattaaaggtggtcagaaatacttttttgactaaattatgaaaaaaaaaatagttgctagatacgctccaatgtcccaaagttattttgtacatttggcacaatttttttcctatgggaataatagaataagaaagtgtattagtttattattctaattatatttcaaaaagattatttgaattttccttcctttattatcttggtgatgatggtattgtaggaggtttggggcctattttgatcagtcacgtcgaccctagatgttttagatgaaaataaacgctaggacctatctgatgagtttaagtagcaggtccctgtaaatgaggatatatatatatatatatatatatataataatagtaagaagtat

SEQ ID NO: 186300 - DNA, 897 bp, Cannabis indica
caacgcatagccataggaaccttcttgatgaaaaagagttgcatcaacatttattttgacgtgatttacttcgagttttatccaatgctcagtcccttcttcattattctcaattaacaatgataaaagggttgatttgtcctgagctttcttccaatgatcaaaagtagttgaagcagaaaccataacatcattcacggtaaaggttcgtttgtcccacacggtttggtttcgagctttccacaccgcccaacaaaggacagtagcacgacatatcatatcagcatcaccaatatgcaataatgcatcaacccaagtgccaaaagaagctgaactatcagtgttcacaggggaaccgaacacattccagcaagctttggcaaaaccgcaatgtaacaatgcgtgagtggtggattcaggatgatttttgcacacagagcacttgaccgagatctgaacatgtttagcaacaaggttaagacaagtagggagacatctagtgattgcacgccatagaaaattgataacattgggtgggattttcaggtgccatagttttctccaaaaaccagagttgttggagccttgagttttggaacgttgctgctgtagcagtaagtaagcactgcgaactgtgaaaagaccatttcgattttcagcccaggaccagcaatcagaagtgtcagcatcataaagaggcatccccaaaattaaatcagcttcatgaggcaagaacaggtcatagataacttcacaatcccatctacgaactccaacttgaaagagtgaattgacagtgttattttggagagatggacgagtggaacttacaagtctgttacttggttggggcagccaagggtgaccaataatattagtagtagctccatcaccaat

SEQ ID NO: 186301 - DNA, 1813 bp, Cannabis indica
aagtaatctctcaaaggtaaacagaataaaaagtaatcccttcctaaagagaaccaaaaattcagctgtttttctcacttaaattgtctcaataaacagatctagcaataagaaatcttacttgctcctttaggatggaaataagtttcagagtttgcctcatcaattgtaattcgattcttttagttctaacagattcacggagttgttctgttgtgacccatgcattaaaaatgcttctctgatacaaagagacacaagctaataaatttctaccatgtaaatagcacaaataaacaaagaaaacaatgataaattaataaatttcaactaaaagaaaaatacatgtaaaaaaagaaagaaaaaacactcgaaggttttctcgagcttcagataagcaaaatatatttctttaattttctgctagtctacgatattaataattttgggagccaatttctagtagatatgcactctaaactgtaaagaatgccaaagtaaaacaattaacccgttcccataggccttagtcttaggtcaaaagtcggcttgtccagctaaaagagggttataactactgactcagtaaaaaacaactgggaaaaaaaataataaaatccagttgccccattgtcatcggtatccttttttagtcattaacctaccaacagtctagtacaacaacatacacaaacaaactcgcagaatagctgtaaagtaatctgaaaaaaaccctacaaaatgcagttttatagatttagacttgaagcacctattatggataaacaggcttctaatttcacactagtgttgacattcagaagcttggaaacttcctttttggtgtattttctaaatgaacgatttctgacaaaatctactactagtcaatatttttttcttcattgccagaagtttactgtcacttagcacttcccaccagtgctaagcaactgcgcatgatccttcattcaacataaccttttcacttattcacatacttttctatttcacggaaaccctctgtcaaatttctcaggaaggtatagtaatactgagtagaactaaatataatatctaacatgatatacaattcctctttgttaaaaaatcattttctaagttgtcgttatctcgatatatggcaaatctaacccaaaacacacacatgacatagtaagtgattataagagctactaatttaagtgaaaagaataaaattattaaaacaataaagcaaacctctgcattcaacctctgtgccgaaagagaagcatcaactctagcatttatgaatcgccattgcaagagacgattatataagagccttaaaaagtgagcatcaagtagtctgttttctcctgctttccctctttgaatatcgaccgcaaaacttaaaatcgatggtgcgtttttattactcatcgtacctggaactaaattcctgatctgcaatgggctcgttcccctcaacgtggatgacacaacagacatggaagctttactcggcgacgcaggacgacaaatccctttaatcggagaagtctttcgcctactactgctaagtactcctcgaggagataatacaggactctcaatggataacttcttcggagtaatgagctttgatggggcaaaagctctcatcgcagtactcctagagaatggagaagcaggctctggtaatcgttgggaccgattcttagactcttgccagaaccttgcagccgccatggctcctcgagaaccacgttgctcttgacaaacaaaggcaccaaactcaagtgttcttggagttgtacaactggaagaa

SEQ ID NO: 186302 - DNA, 4167 bp, Cannabis indica
tatatatatatatatatatatatagtagagagagagagagagagagagtagatttctttgatggttttcttttagttaagagttgaattaagtgtttgagtttttcttgttttttttatgtttcaggtatacagcagaaaattctatcaagtatggagctcctcgcgatacagatcatcctgaactaaggcaaccactatcacaggaagtatgggattctgtactgaagacacttgatcctggtttaaagattacagtgctcaccaatggacccttaaccaatctagccaagcttatttcatctaacaagaaagcaagctctctaattcaagtgagtataaagagaaatcccaagtagacttacttagcatatcaggctgcaaactccaaaactctttagaattctaacatttttgaattatgtctatgctcttttgcagcatgtatatatagttggaggacatataagcaatggtcatatggacaaaggaaatttgttttcagttccttcaaataactatgcagaattcaacatgtttcttgatcctttggctgcaaagacagtctttgaatcaacacttgacatcacactcattcccctcagtgtccagcgcagcgtcagctcatataaaaagatcttgaaaaagttgagcaagacaaaaacgacagctgagtctcggttcgcgctgcgtttgctgtcattgctacatcttttgaaacaaaatcatagtagatataaccacatggtaaagtttttcattcatttctactttttgagacattctcctctttctgcttcttctttatggtaaagaaaaagattttgtcattcaacgtaacagttttttatatcattttgaatagtatttggttgaaattgcaggatactttcttgggggaaatccttggtgcagttttcttagctaatgatcattctcaactgagtccatcattgcaagtcaaacccatcaaagtctatgctcatgggattgaatcaaaagatgggcaaacttggattgatgtaaagaaaggaaaatcagtcaaaatattggagaacattaatgacactgtatattataatgtgcttgcaaaacaactcagttatgagaagcagtctgctgtcatagcaagttttgatgaacaaaataaacagtgaaatcagctaccagttcataagaaaacacatcaatgattctaaatattattactattattatttatacagtttttatttttttgacataatacagcttcatgtgcaatgcttatagtgagaaaatatgttcaaagtggaaagtgcttgtagtgcattgtaagtagttcagttgaacaaaacaaagatgagatagaacaaataaaatggcattaaatcattgttttttgtattattctttttagctttggaaaataaacttgacttttttactctttaaaagcacaaagtgaatgcaaaaacagatgtacaagatggattaaggtttttgtctttaggtgaatcagattatatatatttataaaatttggattaagaaaaagtgtattctaatgctgtgagtaagggtattcttttctctatctacagttttcttgcctttgatcttggtggtccatgtgctgaaagactgaaaacccatatgaagtgtcagcagcatatcttaccctgttgaaataaatgaaaatggtattaatatttcaggatatggatccgtgtatggagtttttgtcatatcttcttcagccattaatattcctttcttagttttttttttaataagacaaacattaataaattcattgaataaccaaagggtgcaccatgcattgcatattcaccattttcaatttccaaaactagtacttgcagattttgttcaatctctaaatttgatttggttggttcaccaatgaaaagttattgaattaaaatctcttggatttcgtttataagaaatgacttaaatagcaagttatcatagacgagctaaaatttatgcaccttcctttgattctacctaatattctaaatttactttggtaatggtgagtggtctttgttcaatgttcactagagttcttctccctttctcttttaaaaataccaaacaaaggaaaagatggggtatcctatgccaccaccaccactaatttgacatgtttttggcactacttttatctatcaaggggccaaaaacatcccccacaaatcaaagattgacctctaaaagagtcatatctttcaaattgattcctattattttctattggctttatacaaacaacaaaaacaaaatggagtttctcaccccaaatttttgtcaatttttgacagcaaagcaaggaagccaactaacaagtcatatgaagcttaatgatacatggtagcaaacagctaataggatgataaataatgtagtgataatgattttgacaagataaattgattggaacaattacttcttgtccaagtaagaagatgtcatgttgtaggctaaactttccaagccacataatctctgcagggtgtaaaattttcatgaccaaataaaatgacttgaaaacctgaaaattacaccaatgagatggcataatgacatttcatgattaaaaatgcaatgaatgaatgagtttgtattgggtgtgaaagatcataggaagtaggaaatgagaatagattgatataaactctttttctcagtgaaaatcatacacaatcacagattcaccatcagttaattagagaatactaatacaaagacaaaagtgtctgaaacacttgtaacatgcttgcttctctacaacaaaccccacccctcatcttcttgttttgtctgatttttcttttgttttttgtttctttttttggtttttggtaagccttagaatcctaattccatcataggaattgacccaccagctgccacaatttgttgctccagctgcaccccacaaaaaataattatcagttacaagactaattataccagataattaataacattcacataaatcagcaagttgtttaagcaaaaacaaaaacaacttcaatttccttaccctgaatagattttcaagcttgttcttcacaaggtagtactcttgttttacttgttgaagacatctaaggcaactgtttacaaaacattttcactatgatcaccaaaagtccaaaacatttatttgaaccaaaagaaaactgcaaatgttagagagcaaaagaactcacgcatcggtgttctgttcctcgcagaagttgcggaaagcaacacagccatttttaactctctctgcacctatgctgttcaccaagaaaaaaaagaacaagaacaagaaaactcagaaaataatgtggtttagaatgacttgaaccaaccccttttaagagaataagtcagacttctaagcctgaccatggtggttgatctatatataaagtgtgtaaagaaatggtttaaaccaagttgggcagtagcaagctcagctaggagccaatggatcctatgcacaaaagaaaaactaaaaaaaaaaactgaaaactgaaagaggcattattttgtaaagtcaagattgcaaataaggatctttaaaatcaatgtttctgaaataaaacttcaatttacctagagctgctacccttgagctggtgaacatgggcatcaactcttttgaagtcaacacattgctgttctctgtatgaagaaagaaagaaaaagttataaaagaactcataacaaacattcatgtactattcaaagttaccaaaagcaaaacatgatcattacaattaaaaacttaaaaagaaaaaaagagtttgctgaacaaacaaaaagaataataataagaactctgaagataagaaggaaatttggatccttacaaagctgcagtgagatcattaagaagctttttcagtatcatcaaagaagagagacacaacttcaacaacaaaatcagggttgctctcatcttgtaactgcaggagctgtaagaactgggagtccagatacctcttctctcaccaaaacaacaacaaaaagaaagaaataagacaaaaacaaacagaccaaatacacatctataaaccaaaatcagcaaaaacaaaaacaaacccatcaaggaaataaacccttttatattatttattattaataacatttcaagtgtttttac

SEQ ID NO: 186303 - DNA, 1898 bp, Cannabis indica
aaatcagccacatgaattttatgtattattagttatttccatctctttttctttactcatctcaactggttttctttaattacataaaacaacattgagactaatgaaacagctaaggtttgaaaaatgaacaaccatatcatctttaatgggcccaaatttgagtatttttctgagggcccatcaaacaacaaaagcccattaagagttttatactatatatctctgtatattttatgagaagagcttggaagaatcatacaaacatgagatagaggtttacaagtgattaggagtttctatatattttcgattgaagcttatgggattcgaacctaggactcttacacacacgcatccaccactactttttatggctacttgagctagcttaagagtttctttttaagtagtttgcgacataaatatttaagtttaactttcggttgtaaataaatacttaagtttaatctttgacggtaataatacttaagttataattctagaatttttgtaagtacctgattgttaaggggttaggtaaattattacgtgacaatttttgattggttcaggttattaaatttttataagtattattactaccaaaaataaatttaagtattaaacttaaatttaagttttgcatcaaaaaaaaataaatttaagtatttatttacagttaaggattaaatttaaatatttatttgtaactaataatttaaattgatgttgcaaattactctttctatttatataattatatgaaaattgatagtaaattgtactactaattttaatgacatccttaagtgatgttgggtaccattggtactcttttgcatatgtcatgaaaacaaagaaaagaaatggaaatggggttttaaacattttccaagaaacaacaaaaacccatatgagacttttcaactctccatacttaataaataaaccaatataataacaccatttaattttcattatttttttagaacaaataatataataaaaccattgactatttataacattttacaattacttaccatatgtatgttctattttttttatttaattttttggtttttattataatatagaatcactactaaaatattctagctgtaacttttaatatagcaagttagcttagtagtccacattttcacatggcataagcattaatgagatgtttattttgcatttgttcaattaatctacacaaacaatttttatatatatatatataaatatatatttgcaccaactaaggaggggtgtttgagtagactttctcaatattaattacaattagaaacccattaaaatatataaatatttgtatgtagtggcttgcatttgtttggatgagacaaaatgaagaaacaaaactaaactaataaataattatttcttaatatattattaatcattagtgctaactactaactgtctattaatttatataaataaaaactcataataagcaagtagcgtgcaagtcatttttgctccaaacatggcaacttatcttattggtttaattatttaaattctaatattatattatatagttttatatatttagtgatatatatatatatttatatatgtttttagcttgtccctttgaagagaaaaaaaaaaactgagatgttgaatgtatcttaaataaatttatattggaattctttacaaacaactatggattaaataaaatgttatttatatatacgatatatttatataggattaagtccaaagcacatgtaatatatatataaaaaaaatatgtataaatactagaagttaaaatgtatgttcttgctgacttagtgtttgatcttatatttcaataatttaatgagaaataaataggccaaatacaagtcttttat

SEQ ID NO: 186304 - DNA, 1828 bp, Cannabis indica
aaaaaaaagaaagaaagcaaaagagacaaacaaaattatctcgaactatattttgttattttcaatttaaaactactaatgaattagtaaaccatggactgatgggcaaaccttaattaaaagaaaacaaaattctcttatatcactcttataacctataaaatcaagcgctacattattttgggaaaaataatatacgaaaccctacttaactaatcaaacttaatcctctctcttaaaacatcaatattgagaactaattaataataataatcaggaaaagaatcctgagttatcaaaggtgaagttggagtcgaattcatgacctgatatttccataccaattggttgagtagtatttgcagttgaagtgattattgcactaattatctgatcagactcagaaccatgctgatcattatgatgatcaaaagattgctgaactgatgatcctccaaattcatgatgatgatgatgatgatgaggcgacgatgagaaatagtttgtcccagaagtttccggggacacaaacgatggaggatgatgggaaaattctgtcattaaactcatgtcgtcgatgatcatagaataatttggcgaagaaaatcttccatgatcagcagcagtcgggttttgatcttccccggctgctgctgctacaactgcagtggctgtggccactgcgtcgatcatgttagcattgacgggtagtggagtagaagaggagatagttgggaagttgaaattattagaggagataattaatggtggtgattggccatcatgaggattctctaggccttcagtgataactttgaggcctgatcttagactagaaagaatattgttgtgatgatgatcatcttgatgagtttgatgatgactcatttgttccaataatgatgggaagttgttattattttggttttggtcagttgaggctgtcgaagtagtagtagtagtagttccaatcacgtgaccgggagcttgggtgcacgtgtgccttgctcggtatgtgatttcgaagattgtagggtcatcatctgatcgttggacttgctttgtggccaaacatccttgaacatttcgatgagtgcatctgtaatagcccctgccaagtaaaaagtacaaaatgatgataaattataaatgtcaaagaaaaagtcagctttacaaaatctatcatcaattgcggtttttgcaagtggtcatcaacgaaagcccatggtattactacgtacgtacagttatatgtcaagtggaatgatctataaatatatgtatatatatacttggttgctctaactagttgacaacaagtactatagcaagtggcgtttgattttgtcaacttaaatattacatataaacttttttcaataattaattaatatatacatatgattgtcaagaattaaatcattttgcgttaagggtatttatacttatgattatagatttttacaactacgaaccaatcctaaatcgtattatatttaaactcttacgtacgtaataagttgcaatataaacgaatgaacggtccaatgtatagtattacatgacaaaagttgtattgacacaaatcatgccaatttatataggtatatatagctttaaaaaatgtcaaacatggatcaatatataacaaggatattgatttgtatatatatatattataaattaccttggatatttggctccaagaatgtccttttgaccatatttcctccagctaaacccatcatcaagaggcccttctagtcccatcccaggactcactctcacttgcttcgtccaccttggtgtcaagacagttataaagttg

SEQ ID NO: 186305 - DNA, 3408 bp, Cannabis indica
gttataataaaacttattaattacatgatatagagatattatgattaaattagttgcaatttttttatttattagtgttaaaaattatttttaagttggttatattaagaaaatatatcgaaaattgagtttaaagtgctatattatactatcttgaaaaatacaagatctaatttgtcatttaacaaaattaagagtctaatcagtaacttttgcaaaataaagagtctaaaatattattaactcaagcaaaaagagaaatgttaaaagataccagtagtgcttaatacactcatagttgtcgtatcaatattaatacaattaattatcatttttcgtgtaatttaatataataatttttaaaaaatatcgctaatcaatttaagaatactcccaacagactctctactctatttttgaaatacatcactaaaattctattttttttttaattttagtagcacatttttaccttacatcacacacttacttctttaaaatacatacatcactaaaactttaatttaatttttaatatattttattcatttttattatatattcacatatccctatgcaaaacccattatttaagctcaaaacaattaataagatatgtttggaggaatgaatagtattttaaaaatataaagcatgaataataaattttaaagaaactttaaaatgaataaggagtttagaacatatattgtagcgcatttttattacaattcattatttttttaaaaaaaagcttctctattttaaagaaactactgtaagtgctctaaggacgtcacatttagatagtgctagatactataagtatctaataacaattcttgagcaaaaatttaagattaattatgattttaacctaatgaactttgacatggactaaattatcttccatgaattttctttccccgtttaaaatcctcttcaaattgagatggttagatttaaggacatttgtctaatttcattcaattttactaattatatgatttttttaatgtactaaatcatgctccttaaactttaatatctacaaaatcatacctattaaattttgatatgtatcaaatcaagcctcctgaactttcattcttgttaaattttccttacttaaattaaaaaaaaaaaaaatccttaaattcaaccatttcaaaatatttaacaatttaagacatgatttattacatagacaaaaatcttaaatagtgaaatcttaatatccaaatgaaataaataataataataaaaaaataaaataaccaaatgtccaaacacacccttaattaaatccaaaaaaaaaaaaactgaaaatccacacacaaaaagaaaaccaaaactttctctctctttccttctccatagatccaccattgttgacctcactccaaaccttcaaaccctcacatggcgaaaccccaccctccacaccgcccaccttcccgttccggccgtacaaacctagcatcttgcattgtagccctaatcttcctaatcttcatcataatcatcgctctcatagtctacttcaccgtcttcaaacccaaagaccccaaaatctccgtcaacgcaatccaactcccatctttctccgtcactaacgccaccgttaacttcaccttcgctcaatacgtcgccgttcgaaaccctaacaaatcttccttcactcactacgacagctctctccagcttctctactcaggtaatcaagtagggtttatgttcatccccgccggaaagatcgacgctgatcagactcagttcatggccgccacgtttgccgttcaatcgttcccgatttcgccgcctcaacagtccggaatcggagcgaacatgttatcgggttcggattcggactctgtgcccggaatgggtatgggtttgggtctcggaccacagctcggtaatggatttggcggcggaaaccgtggcggagcaagtatggagatcgaatcgaagatcgaaatggcgggtcgggttcgggtcttgcatttcttcactcaccatgttgaagctaagattgaatgtaaggtttccattgctatgagtgatgggtctgttttggggtttcattgctaatgataattagttaattaattaattaattaattgattgattaagtaattaattgattaattaattaattgatacccaattaattttttagtttttgtaagttttatatgttagtttttgggagatttggtgagttgggttttgttaactcaagttaatgaatgtatcatgttaagtgtataaattagtaaactttttatttgatgattaatgattaatgattgatgataatcaaaccaaactcattcgaattatagcattgttagtaccttataaatggttacatgttactttaaaataattgttagagcaatttgggaggtaaatattttaactatttaataattttggaattaatatttgcattttatttgtttagtggtatattaaaatgaataagtattattactgttaaaattaaatttaattaattatctataataaaaagtaaaatttaaatatttatactgtaaattactcgagtctttttaattttcacatataaacacttcctatgacatcatgcatgatgctattagacaaaatcccttaagcatatttttcttcatgtaatggtatttttctttgtaattttagaaagaaaatgggataggtttggtgagagaattggtcataataattgtaagctttgttttttatacacaacaacatagtttgaaatattaataaaggaaagctaaagctataataatgtatataataagagagcttttttgttttgcttttgctttttggaatggaaacaaagaaagtgagagagattaattagagttgaagtaaagtgttcttgtaaaatgggtattggtattaattaatgaggctaagacatctttaggagttttgtttgtgattccatagatgggttttgttgtggtaaatgactaaaggtaatgtaagagcaaaattggccaataagtgtgaatgtgtggagttttgggttttgggtttgggtaaaaaagagtggttgagttaaataagtgtaagtggtgcagacaagactttgggattagagtcaacttttttgacttctatgctatcaagtatgaatgctactaattgtaattactattattctttcacgcatttttccacttaacaaaaattacatataaaattaaggaaattaacctttggacaaacaaattacctcaaaaattgtgtaaaaataaaaaaaaaaaaaaaaccaatagtccaaaaccgtagttggacttcgggaacttagctaaaagaataaaatttaagaaatttctaatagattctttaattttatgattatttttagtcttgttattttt

SEQ ID NO: 186306 - DNA, 4073 bp, Cannabis indica
ttttttttttttgaacattttaagttgtaaatttttaaactattaaaattgttaaatataaaaatttatgtttaattttactaataaacgtctaacagtaaacaaaaattcaggagatacaaattagccaaattatacatgatatataataataatagagaaaagaaaagaaaaagaaaagaaaagtgtgagcttctagaaacggttgacttttttaagatcactacagcagataaaagaaatggcttactgcatcccaaaacctccattgcagctctgcaagaccagaaaatgtctacacccacaaagcttaagagcttctgctctcttgcaatggctgctctcttcgcttactctgcatctgtacagttaaatgaccatggtaccctcaactctgactcacacttcttccttattttactcaaaactaagctcaactttctcattcattttcatttatatatatatgcatgtatgtatagattggtatttttggcttcccctctattctggagcaagtattgtgaatcttgtgagctgggtcatctcctccaaaccaatcaaccatctgggtgaggctgtattatgccttggaatctttctgtttataaaggttgtaatggaagatattggggatggtataagtgggttctggtcaatggatttgagtgaaagagttattagagagaaaattggaagtgggttagttgttatctcaatgattttgcagttgatagcgtcatcatcatcaacacaatctccacaagtttcaatgaaaagacagagaaatagttacccaagatatgttgaatatggttagattaaaaccattggtctttttctctttccgattcttgattttttatacatattttttcatcatgattttctgatgtttttttgtgattttgataggaatggcatttttggtgggcttcagttatggccttccttttgttttctttgtgctccagagaggtgaaatgaagttgtgatcattgtcgtttttcttacatatgttgtcgtttctaaattgtggtatgtaatgtattagtattgtcgttttgagagataatggcatgccattagtgtaattcagatcagactttttgacacatgatatgacacgaaaaaatataaatttgggtttggcaccatgatatgattatataagctttgaacatggcctaaaaaagtacaggcttaagtataatacaacatgataatcattaaaaacatgatatgaaaacacaaatatataatcatgaaaatgggacatgtaagtaataatgggatatccatccaaatctcacatcagaaagaataagtaatgctttgaatataagtgttcacctattctattaatataacatctttttagaaggtgtctaaaaacaaaatcgaaacattgagggcataggctcaaagtgaacattatgtactaatataagagttaaaagtgaagtggcagttcaacaaacgaatcaaaagtttaggagcgttaaaatagtgggatgcatttgcaatgagtggaagaaacttttaatgtgataatcttgcgattgaagatctatatggtattttgtatcgaaagtctacttaatattgaagtggtcagacaacaagtctcacatcagaaaaatatgcaacaattgataaggcctcaagcatgtatgaaacgaccgagcaaactattaacttgaaattgaaaatttacagttaaaaaagtgacaagcatgactatagactcaaagtttacaacacctcatccattggtagatttaacttcaagcaaatgtctttcattgaaggacattcataagtaaactttctcaaactcttttgtccttcatgagatttttgttgactacagttagccttgacagtcaagaaggattattgctctttctatatgaatttaacattactaaacacttctgcctaatgctatttgaaaaaagccatcaatttaggaatacaaaacaaaaaaccattaaaaactacaaatgagctataccatgttgttgtcaggttgtttttgacaattcccaagccattgaattgcttaaggttatagtcaaagaatggacaatctcagccatagtgggcgagctcctggatttttctctaagcaactataagttactctgaccacaaacttagcaagttcataagggtacttctcttccattgaaaaatccataaaaagctttaaactttcttgatcaacttcatcactaagcacagcactcaatgcatgagataagttcatattctctttatatattacagcaatctctttccctgtgagcatttcaagcaagagaattccaaatgcatagacatcaagctttgtagataccaatccattttccaagtactcaggagccatgtaaccaatacttccaacaatatgatttgtcaaagaaaattgtccttcctcaccttctgccaaccttgctagcccgaaattcgcaattttagccctgaaatcactatctagaaggatgttgctggcctttatgtccttgtgaagatgaggtggagtggtgaagctgtgaagataattaagtcctgtggctacatctaaagcaatttgaattctttgattccaactcagaaagattccatctttgctgtcattatagatccaatcacttaaggaaccattagcagcatactcataaacaagataccactgaccctgatgaaaacaaaaaccagagaggtgaatcagattagaatgattgaccttttgaagcaactttatctcttttgaaacatctccattcattttctttatggcaactaaatctccattgagtttgccacaaaagacagaacctttaatccaacaacttggatggaactcatttgttgctagctgaagttcctcaatactgtaaatatttactgattgagctatcatagatatactctccattaagtccttggattcttcttcttcttcctccaacttttcttctactaatgtttcatgtgccatagtgttttccgagacaacattagaagttgttttcttctttcttttatggaagacaatgcagaacataatgctgcctatgaccaatataacaacacttcctccaacagcaccaagaagagaataaatccatgtcttgttcgagtctttttcggttgaagaggaaggaggcgatgatagagatggtggcggtgggggtggtggctctatgatttcggaacctgatggtggattcttaagaggaactaaaagtgtggtaacaggataaatggtggggttgtgctcagaaagatcattggcttgtaaagtccaaccagtatcagaaccaaatctattagcaatacttgaaacaaaatcaccttttgcaactaagtatgttaatagatagttaagacccaattcagtttggttctttgtaggacaagcacatctaagagggacatttattcttgtcccactatataagagcctagtagtgagattactgttttgatcctcaagagcttgacatgtagtgagaccttggaaaatgttattagctattaataggaaagtgtcattgtgttgaataacataagttgtgttaacctgatataactcaccagaacaggaacacttaactggaacaatcactaacttgtttgtttcgaaagttttagccttggaaactgaatttctatctgagatttgagaagggtctgaagccaatagatgagagatggcagaaacggtgtcgtatgggggaaatgatctgaaagtaaggtaagctatgcaacttctgttaaccccattacaggtgtatccaagaacagagtttgaactatctttaatggaacaagctgttgtggactttcccacataaggctgctgtgaaaggctcagagaaagacaactgaaaatggtgaggaagaaaactagagaaaaaggacaacaagagaaccccatttttgttgggaagatgggaatagaaaatgacctgtaatagtcatttttttctaaagatgaattgtagtgtagaatggcgtgttaggcaatgtgaagtttcgtggaaataatatgataacagtga

SEQ ID NO: 186307 - DNA, 689 bp, Cannabis indica
tatttttcatatatttttcttttgatgaatcagagattcattaaattcaaacaaaaactttacaatattgcagcacagggctgagtatagttctcctttacaagctatattctttaaatttacaaaccttcaaaccactcatcatatatacaagcaattttcataagattaatactatgaattctgctcttgacctcatggattatactgtgtatcaccacctccactcgtttgatttgatggagccataatgtttcttttctagccttccacacttgatacactatagtagcaacaatggcagtgatgacaacctttttgaaattactcaactgtgctcaggaaatccatcttagtaatctgtttagagaatgtgattgaactatctaccctagtcgattgtttacctcttggagacatctgtgactgaattggcattcaaaaaacagatgctaaataattcctcaccatgcatggccacatagtaaatagatgttatatgctacaatgttgtatttataaagcctatgttttgtttttaatatgtcaagcacaaccaaccacaagatatactatgctttggcaagttgaatctcccccataccttattgctagaatgaactcgagatttaggagggcacggtggcaagtaacccttcttgatggtatatttctctctctctctctct

SEQ ID NO: 186308 - DNA, 2137 bp, Cannabis indica
gttagtttcccccttgtttgccattgatttggcttgagctttgctcaccattccaattttttacgtcaagctgagtgacacaaatcttctaggaatatttcttattcagatgccatcgaaagggaaattttcacttaaatccttgtatcaacatacacaagcatgatttataaaacgtattttgattcttaaaagttgacattggtatctactgattgttcatttgcagcctttggatacagcatcttcaaagatagcaaaacaagtgagtttggaaaaagcagagggactttggagaactctttcaaagagcacttggagggaggcatttgatggtcttggcatctctcttcttttgacagccaacccttctattcaggtacctttttcattcttgtacatagacatgcactacaggatttgttaattcttatcttagattgtagtcgagaaaatcaattttcttccgtatttcggtggagtgtcaatgacctatctgtaagtatgctaattgctaaatgccttaatcacaaacaaaaaaaaaaagtatgctaaatgccacctgcaggtctcatttttcctagttgtacaaaagtaaaaaaaaattgctagagaagaacaacttaaattgtattgaaactgaattcctatggtacagtacactgtgtttgatcagctgaaacaaagactgttgaagggaaagctgggtagtaaaactggtaaagcatcgaccccagaagctctttctgccttttctgctttcatgttgggtgctgtctcaaagtgtgttgctaccatattgacatacccagctatcaggtgaatgaactactcaattaatcattatccagaaaattgtgaactaaatggaattttctaaaaggattgaatcccaaattggaaatggataaaaagagaaagaaacttggtctttcttaatataacccgtcataatccaaggttatcatcttattacaaagaaaataattccatgatttcattatttttatagtttgcataaggatttaaagatttgttgttccatttactatatttttttggcaataatagcagaagatttacatatagtaaaattgctatacaatttgggacagatgcaaggtaatgattcaagctgccgattcggatgaatttgggaaaagtgaagctgacaagaaatcccaaaagacaatttcaggtgcactatttgccatttggaaaagagaaggccctctgggtttcttcaaaggattacaagctcagatagtaaagactgtgctaagctcagctttgcatttgatgataaaagaaaagataacgaggaccacatggattctactaattgcacttaaaaggtatgtatttgtcacccctgttagactaaaatctacttgaattcagtgaaagcccagccttcatcgcaaagagctccatcagagttgtccacatttggaggattcatgtggcaaacgaaataatcaattatgggcgtggaaggttaaatgctagtatcgtaacaagggagtacagaacaagatttattttccttgatattttaatgtccttatttggatactcttgttaaagtagcatctagtacgttgggcctttattagtcttgtagtaacaacattcagatgcctcccattaacaggatgccatagacctttgttggattgtcaattagtcttacccaacaaatggcaaagtaataatggaaaaaatcaacaagcattaactttgtgcatttcctccataagtaataacttgttccatacatgtttggattatcttatgaaataaagtctatactaatctctaaacgaaagggacttcacttttctactatttgtactaaaaggccttagtcctagacattgtttcaaatgacaaccatgataatgttctcagaaaggaaggaagatgacaccgtccatatatggtatcaatggattgatcccactatttattaaattccatatcttgcaataataggtgatttcttggggtgaatccagtcatcttggtgataagcactcaatgcgtgttcagatgtggctatgagatacttctattccccctcagatgatggatttagctgtaccaagttgataaatcagaccatggttatttctgt

SEQ ID NO: 186309 - DNA, 3606 bp, Cannabis indica
cgtgagtatgttgaaaaactaaagacaatagcattagcatgattcaccttgacattgtcatactatgataagcgtctcgcatatgcctcacttgaaattaatagaagaacgcaaggaatactacgacatatacttagatggttatttatgataaactgtctagaagagtaccattgtattgcaagcaagatgaagcatagtcagcataactgcatgtacataaagttaaaagagtagtcatgagaagttttttgtaattatctcatgtgtgtaaatataaaatatgggcaatgttcacgtttcacaaagggttacaagtgataagatcccaagggaataactatcatcctagactcttataaatagggacagaacccggggaacaaaggacaactaatttgagaaagaaagataattatatctatcattcattctgtaaaataatttattgtattctgtataaaatttataaatccaaaaataaaatggactcatggactatgaagagttaactttaaaatcatgttaaaaatcttcttgtcatttattactatcataattattaattactgtctatttaattccttggtatattaattacaaaaaaaagttaatgaaaatatgcgttaagattgtgtttctagggttccattttgtatattcgtctaaaattcgcaatccattttcattaaaatagagttttgcagcccaaaatcgaaaaaagatgaagtttcccatatcatgtacaaagacaatgccacgaccataaatagcttcactgcagcgcctatacaaatacaaaaaaaacatcgtttatgtacttcctcgacgcggccaccattagcctcgtcatggcaataacacatttttcttcttcaacctctcttagtaaaatgtgcataacattcacatacaaactccaaatgagttgattcatgatgtgctagaaagttaaagaagaaactaacactgcaactatttattatcaatttttctaaaatatgattagaaaatattctaattcaggcttaaagttttagctttgttttcttgcaaatttttctctatgttatagatcactgtatttttgatatttgaccaatttatacatttcaagtgtcaaaacctaaaatcaaagaaaaaagcgtaattctattccaaaagtgataagaaagaaaaaaattaactccaaaaatatcacgaaaaataggctaaaaatagcctaacagtaccacacatgtggaagacttagatcattttgattaggaagctttatccataattcttagaattcgatcactatatataatccatgattgattttatgatagggtagatgaaatagttgaatgcccgatccattttcttccgcttacaaagtgtgatagaatagatccattcatcttgatgaagtatgcacgattcttccaatatgaaagctcctttggtagggaagaaatttcactgtttgtttgcagggataaaaaatataatagtactaatgactggatccagacttgaacttttaatttaatattttcttttgttttcattgcttccaagtatccaacccttgtcgtcttctttcaaaaaatctttaaaccttctagatgtgacttctcaatgacttcttgggaaccattattgtctaaaccaaagaggtgagggactctgctaagctagctaaaggtagaggcaagtttcaaatatcttctcggacataagcgaaaacctcatcgccaaaagttaaggtgttggaggttgcagtagaggctccagtttcagaaattgtttcagaacctcggaccaaggacaaagcagtggaacctcaagtctcaaagacagttcctggaaataaagttcaagtgatggtgatagacgttccattttggtggatcttttacaacaggttccacttggtattcaaccagttaacagtgaaacagaaaatggaagcgaaactagatacccagaagaaggtcaaaaaacaaatgttgacaaccaaagaataaattgaggaggagctagctataacatgacccaaagagaaaaaaaaagttggttggtgctcttgtagctaatcttctcttgctttgaaagaaggacccaaaattatagtgattcttgaagatgaaaagaatgcctacctttcccaaattaaagaaattgaaggacgaacacttcttccaaaaatttggttgaggattgtgggtttgaggccgagcttctagatacagagccaattattgaaccttctcttccagcttctaataaaactctagtcaccaacacttccaaacctgttgatgcttctattcaaccatgaaatggccataacctttatatttatttattttgggacattggtccttttaatgaatgcagagataatttctttttccttcaccataaggcaagataattttgtaaatttatagtttactttttctttaacttatttatccgcattatggttgatctgtcaattattgtacgcgcttgctaagtgaatttacttctgtgcgccctagggttttggttccaaaaaccttaaccttaggacatcaattatgtacttaggcttcgatttaggatttcggctaggttgtgcacttttggatgtattgatatactattggtctagatatagtgaaaagtaatttactcccgaatctctggggttgattttaaaggtctaaacctcacagaatttaattgttacccccacttttggatgtattgatggacttttaggtcaaatagagtgagaattaatttactcttagatcattggggctccggttccaaagcgctgaacctcatgaaattcaattgttacccccacttctgggtgtactgattgactgtcgctccaaatatagtgagaagtaatttactccttgatcccttgggttctggttccaaagacctgaaccatgcaaactttggtttgttgcttccactcccaaactaactaatatttacttggtgaattattaatcttaggtatggtaagatagcggcttacttttggctccatgaggctcaggtttcaggcaatgctttctactcccacatttcggttccctaagatttcagtttcaaaagaccttaagagtttcattctatacttaggttttgatttgaatttagctaagttgtgtgttttcagatgtttcgattaatccctaatttggatgtgatgggaggtaatttactcaaaggccctcgaagctccaattttaaaggtctgagccttgcagactttaattgttacttctacttctagactgcctgaggtttcagttccaacgacctgaaccttagaattttgatttagttttttcgtgaactgtttacttctagattccctaaggtcctagttccaatggcctgggccttgggattttcaacaattttgtactttgaaaagttaaacaaagtttgtatacttctggctcactgagatttcggttccaaaggcctaactttttcgagttaaactttgtttcttatgtcaaagcctgaacctcttcaagatttttcaacctggatggacttggtgaattatcaatcccaagtgtggtaagataataacttactcct

SEQ ID NO: 186310 - DNA, 2972 bp, Cannabis indica
agcttattttttcaagtctaagttatcactccggagtgtatttaaaagaatggttaaagtatttaaagagtaccattaaagatgctttaaatttctagccttaattcttaaatagcaaataaagttgttatttaattttatttctacaattgaaataatttatataatttcttagtttccttgtaaaaattcttactaaaacaatatgtgaagcgtttttaaactaaatccgagttcgtattaatgtcccaaaaaattaaggggaattatcctatatattatttttttttaattttttttttaaaatttacggtttgaatttctaaagtggttgcaacgctagttgcagtaagggtttctatacgatttttttgttgcaatttaggttgcagcgctagttgcaataaaaaatgcaaaaaaaaaaaaatttattttgaagtataaaaatgaaaaaatcccgaaaattaatttgactaagactcaatattatattaaatttaccaatgagaatgtagtatgtctaataacaatgttagatccactcaaaatacatgttctacactagtaaatttagtttggttaaaaatatgtgcctcagtgttatgttactttttttcaaaaattggagaaaggaaagaagaacaagtaagaaataacagcataatatttgaagtcatctgttatttggtcattttataatttagctgttaacaaagtcagtaaaatcacttaccgggagcaacataacactataggtgaaacttggattttacacaaaacaaaacaaaattaatgcaagcctttttctcaacttctcacaaattccaccctaaaccacataaacctctttcctgcacacgcaacaatacataaaaatatataaagatttacaagttttacaaagaatttcggtgcaactaaaatggacaatggcaaagctttaatctcgtgatggtttagatcatgtgggtggattaggaagggacacttttttctcccaatctcacttgcacagacaatttgaactcatagcgttgaaatggagctctctgaatctttcacccgaaatgaaggaaatcaccattagaacttctccatgtaggaaacttgtttaaagttagatctttccagttttaggaggctgttcacagagagatggaaacaatgctatcagactcaattcatctgcaatgttctgtgaatgaataattaacaaaaagggagaggaaaatggtacctttttcagagttattggagatgcattagaactactggatgatgctttatggttcattggtttcaaaatttcgaaagaacacactagacctttatctacactcagtagagcacctgcattgtcgaactccccaccatagtttggagctgaaaatattgtgactaatcttcgttttgcaaaaaactcatatccatcctctaccacctgaatcacatattaagagcttttcttagtctgaatgttttggattagagtaatcatcctactattaaatgatcatcgttatttatgcatcacgtctgcatttcctattattacctggtgacctctacaaatgagatcaagatcattcttctctaaaaaatcagcaactctgtcagctccaaacgtacaggaaacacctcgatcactgtctgcccagccctcaattgtactatcaggatcagaccaaagaagatcacagagaagaccacactctgggatttcagtaggcctttgaatttcttttatttggttgacattatgaagatctggagaaagccctccatgcatgcatagtatcttatcgtcgatgagtgctgccacaggcaagcagttgaagcagtcagtaaaaatcttccaaagtctgacattaaacctccttttacactcatcatagaaaccataaatacgattaatctttgcatcttcatgatttcctctcaagaggaaaattttgtcaggatatcttattttgtaggccaaaagcaaacatattgtctctagactttgtttgcctcgatccacatagtcaccaagaaagaggtagtttgcagcaggagggtatccgccatattcaaatagcctcaataaatccaggtattgtccatgtatatcacctgcaagatgaagcctggaacattagaatgatttaataagctgtgttaattaaatatagtgacagagaaaatgtgtaagctttttaacattgttattcttctactcatttccatatgagaatggtagaacccaaaacgacagctgaatgaactagtccaaaaacatacaagaagaaaaagttgcactctacacacaaaatcagaaataatccattttttggcctagtcttcgagcttccaacatgaccaacgcggaaaccttcatatcaatgaagaactatagcacaatatcccccgaagacaagatcatttggtcatccatatgcccagaaaccttgatctagttttctttacgaacccaatttggcaatttgtcaattgtcacgtcatcaaacccaaacatctagttttctcaaaagattcaccaaatttcaatccgatccaacaaaatttagatacccaattgccaattccactaatgttctttatccaagaccgtaatcatcaccaaatgatttaattcaatagactgtaattaaaggaaaaaataaaggcacgaatgagagagctaaccgcagattcgaataggagcatggagctcaagaagattgggctgagagaggaacacttggcgagcgttgacgcagagttgacgaatctctccctcggagagctgaacctgtttgcctcctcttccttctaatagcctccttagtatatcatccaatacccctctatccatcatgccctccattgtcatcatcatcatcttcttcttcttcttccttgaaaatcgctcaaaccagaatcataacaagcgcaagaatttctatgatgaagaaaaaaaaaaaagaaaa

SEQ ID NO: 186311 - DNA, 606 bp, Cannabis indica
aagtacacctactaccccaccaaaaaaaccgagtcaaagagtagaaatcaatctttcggaagtgttactgtgtcaatgatacataccaatatctagcatataaagatcattgtacagattttgggcatccgtaaatcccccgaaaacaaataatttcttgcctaaagcaacagtacaatggccagctcgaggggtcaataattgacctgtagtgttcagctccctccacaccagagtatctaatgaaatacaacacaaaaaataaataaatacataaaaagtagatgattaatagttgtatactcaggccacaacaatgacatcttctaatcaagtaacagcttaaaagtattttatggcaatcacataggtaagttacaataaccacgtacctgtatcgaggatatgaacatctgacaaataataatcatgcccatcttcaccaccaatcacaataacattgttcttccaagaagagcaactatggctatcgcgtggggatggtggagtgcctgatgttgtagcgcgtttccatacaaatgtctctacaaaattagaaaaacgtgttaattcagttaattaccccctgctttgctgtccacattg

SEQ ID NO: 186312 - DNA, 11855 bp, Cannabis indica
gtaagattttgttatgatatttacgaaataatagcaaatggatacttgtggaaaaaatgacacaaatatgtggaaggctaaaaacaaaacaatatcacaaagaccaaattgcaaaaagaaaattgatagaggaccaaaacaataatagttctgaaaaaaccccaaatatgatgatatgaattattagtctctttttctccatttatcgtcttctcctgctctccagctccatcatcgcctcctgtttctttctcaaattcacacgcaaaccctaaattctctctctgacgctgctctagttggctcttctgcccaacccaactcgccggttcatcgctttcaggtatcttactctttgttcttcatttcttatatgttgatcagaaaatgatattactgaactttagatccttgtaagtgaaaatgaaatcgttacctataggagaatgcagtcaattcttgatagaggtcattaatgataagataatctatttgttctcaaatattttattaaatcacaattctttggctgttgaaaagaggtatatgtttgcctctaacattatgaattatcttgcgtttcttgtttaggaatatatatatcatataaatatatagacacccatccttgtctgtatgttaaaacaatttagacaaaatccatgcaccctccatagctccgcccttggacactctttgtgggctaagattttgaatagtatggattgcttattttttaaccaaattcttaagctttgtttgttgcattttcactgaagtgtatatgtgtgctcactgctgtgtgataggattatgctatttccaaaggtgatatattagatgggatgattattgataacttctcatcatgtaagcaggttcatattgtttttgctccatcttgactttctagccagtgcttttcatcgaggagttattagttatgctagcatttcatgtaaatattggacggtgtgaagtttagttagctgatgaggatcacagctggattaaatctttttattgagttggggtactcacctcctacatgggcaagtttagttgcaggtggctttgttcttgtcactcttactctttcactttaccttttatttgagcacctttctgcgtacaagaatcctgaggtagatatacacacatcctcgataaacagctgcttagtttctctttttctgttcttttcttgcgtaagcactgattatcttgtttgatattttcctcaacactcaggaacaaaaattcttaattgctgtcatactcatggttccctgctattcagtagaatctgtaagttccgtacagacctccattgcactgcattagtataatattttaaatcctcgtatagaaattttttataattctcaagtagctgaatttatttgacaaggttactatttcttttttgtaccctggataaacatttgactgtattacttagcttttcctcattttaaagacattgtttttgctacgaactcacacacccccattgaatctatctttcaaaatatatcaccaaaattctgtttttttcaaatttatatatatattattcatttcaaatatattatattaatatatacacatcacataaaaaaaataaatgtttaaagctaaaacaattaataaaatatatttagcgtaatgaatagtattctataaatgtaaagtatgaacagtaaattttaaagaagtttcaaaatgaaagagtttaatttaaagcatctgatgtagtgcgtcttagttggttttttaaatattttaaagaatctctattaaatagaatatctaatgagagtgatctaggccttttttttttttaagatagagacaaagttaacctatcatagactgacctcctcccaaactttatttgggagcctcacatatggtggagaaaaaccgtggttacaaactatgttatatcattcaaccagaaagcataaataagactaaaaaaaataaataaacacaaacatgaatcaaaatttcaactgtctatgatttcaaatgtaagataagactccattctctgatcaaatcttgaaaaggtgtcccctcgaacccttttgacttaataaccatgtagcattatagcaatccagaatttaatcattccccattcagccccattttcaattccttcaaagatcctctcatttcattccaaccaaacacctcaaaataccgccaagattgatgttgtccacaactttgtggttcttcaatctccttccaatttacacataatcaattggctgcatgtttgggtcatacaccattcaatcccaaactcactcagccatctatccttgcctacaggatgttactaaaagaacactccaagaacaaatggggagaagattctccattctttcagcaacatacacaccaagtcggagatactaactgatagggtcttccattttgtaatgtctcatggaaccttatcaatcaatattagccaaccaaaaacttttattttggatggtaagcaacttttccacacttcttgggctcattagtcttccttagatacaaagttggaaaccaaacaactaaaagtagacctacaagagaaaattccacttgtgttttgtttccaaactctagaatcttcaagtaatacataaattggtttttgctctaaaatattcaatagtgacacaaagctgtttacttccctgtccattaaattcatcttgaattgaagattccaccatgcatttgaactagacatccctggtccttcaccaattgccttgtgcttttgttcttacccacagaaactcgagctaagttagggtatagttgctctagtgcaaactcccctgaccatgcatcctccaaaactcgatacgaacaccattcccaaccttgaaattaaccagattcaagaagatatcatacaatgatgcaatgcttttccaacggcctttgtttgttagcctttctcccttccttgtatcccggaaattataagctgccccatgtcatcttttgataactttgcgccataatacttttgataactcataggcacataataaaccataagattgacgtgaatcaacttaacagagagaaatataaagaaataaagtaaagcaagaaaagattaaagttaaataaaattaaaatcacaaagacaaaagaaccaaatatcaaccaatgaacagtacatacatagtcaaaataggtaacaaaaccaaaacattttcttcactcttttatatatgtcatggatagatacatttatatatatattataggtatttttcccttctggattaactagtataggtatgtatataactttccctcatttactatctcacttttatgctgctttgtagataggtaatggaatgttttataatttaccaaaatggtttgtaaaaagggttgttagtttgtaaactttgttacatgttttctgaagtgtctacatatgactatgtttcagtataatcagttcatttaggttcattttctgtattaaatatcacaaagtttcttaatttgcttttgtttgaaattactagactatacatgccacctagcttcttgatagttgattttatgttgtcgttgtttttaactttcttctaatgtcacttaattgacagtttgtatcattggtgcatccatcaattggtgttgactgtggaatacttcgagattgttacgaatcatttgccatgtattgctttggaagatatctcgtcgcgtgcttaggtatgtcgtatcatgatcttttaatgatatagaaaaacttatattttgaaatgtgatttcttttctgcagaatgcaagtaatactttttaggttttgggtttttgaggggtggatttttcagctcaagcaagagccacagtgggatgatttaaagattattatggcaatactagctgaatcctttgtttttttttttaaagcaatactaggtgaatcattgaatttttttgaaataccagaactggtagttataaagcaattatgtgttcaaacagtgattagaaattttcatatcttctatttactattgatatgtttgcagggtttaagataaaagtgattttaattttcagaagcacaaagacagcaactttccttttatactctagtctctagtttcaatgtaatgatgctgcactggtgactttacatggacatcattcaaaatttattatcctttattgttgtttctttgtcaatggtattttggatgtttaacttggattgctgccacttttagccagaaaagatttatgatgaaacctttctttttgattttttttccctcttttgtttttaaggtggggaggagaggactatagaatttatggaacgacaagggcgtgcaagttctaagactcctctattagaacacaatttggaaaagggaacagtaaagcatccttttccaatgaactattttctaaaaccatggaaacttggccaatggttttaccagattatcaaatttggaattgttcagtatgtatgtttgctatcactctgaaaattattatcacttttcttagtgtgttttccaactccccccttcatgcagaattgtagatttttatattttctttcattttgcagatgttaatcaagactctaagtgctgttttagctgtaattcttgaagccttcggtgtatattgtgaaggagaatttaaattgggctgtgggtaagatattttaacataaagaaaatctcagggatttgttaaattctacttcggtgagctaatttttctgatgtttttagtagattttgttttgcttaaaaaaatctcgggtattttatttgtcattggcagcaatttggaattgtcctatttatactattgtgattgggaaaaaaaaaactaaagataagcaatttctatttttctttcatgggagaagtctgtacaatcttgttagttgcacagttaaactagcagaaaaagaagtcatggcatctaacttgttatcagaaactaatggcttttgctctctatttactttgcaggtatccttatattgcggttgttctgaattttagtcagtcatgggcgttgtattgcctagttcaattctatactgttacaaaggatgaattatctcacataaaacctctgtacaagtttttgacttttaaatcaattgtgtttttgacctggtggcaaggtgtggcaatcgctgttctctatgcccttggtttgttcaaaagtccgatagctcaaggcttacaattaaagtcaagcgtccaagacttcattatttgtatagaggtaagtgttgtctttgtgtcagaaatatcctttattacaataaatagggaattgcttcctgtttctatatctaatgtattcccctccttccctttatttttttgatgcactccccttttctacaaaatggttttactcaacatatatgtgttcctctagtgcagatgtgcattgcttctatggttcacctttatgtgtttcctgcaaaaccatatgaggtaatgggagaaaggtttcccggaagtgttgcagttcttggagactacgcttctgttgacggtcctttagatcctgatgaggttagagacagtgaacgcccaacaaagcttcgacttccttcccctgatattcatggcaagagtggtatgtcgatcagagaaagtgttcgggatggtttttattggtggtggggaatatgtaagtttcttactgtattgctaactgtatattaaaagtgaaacttcaagtttcttttgtcatgctgggcattctggttcactatagccgggtacttgattctgagagctaaaataactatctgattgggtcttgccatttactttaacgttgaattacctgcttgtctccgttacagattgtgaatgatgtgaagttcacggtaactcaggcagtggagccagttgagaagggtatcacaaagttcaaccagaaattacataagatctctgaaaacattaagagacatgacaaggaaaaaagaagaacaaaggatgacagtttcattgcatcacctccagcacggagggtgattcgtggaatagatgatcccctgttgaatgggagcattagcgatagtggggttgttaggggaaagaagcatcgcaaaaaatcaggatacaccagtgcagaaagcggaggagagagcagtagtgatcaaagctacggtgggtatcagattagaggccgaagatggctcacaaaagactaattggaaggaaaactcgttgaatcagaaaatgaggattcaaatgccaggggcatgcctttaacatttggccatggtccagtgatttgctactcatgggcaagaagcagcttagcatgtttttaccaatgccggagttggcttcaccttggtgctgtggttcttgatctgaattcatctgctgtaatgatgatgatgcagtacattttttttgtaggtttctaaaattttctgtacagaacttccctgtaaattaggggcttgtttatagaaatatataattcttattgtgtgcttgagtgagaatgttcaaatacttgtatttaatcgttccaaaggacatacataagccaatgaactatttttggaattaagacgtcgaacaagttcttccccatgatctttcatgcttaaaagcgttataatactcttgattatcttatatagttagcaattgacatgtcatgttggcataattagacactgcgttaagcattattggacagtagcctatgatcaacaataccaaagctgggaaattttcagtagagaatctactaagagaaaacaacaatttgcaaacttcagattttgaggggtcttttctattatataactgccctgagctcggcagtttgcagtgcaaatttcctgtgctgggacaagataggaggggttctaactgcttgaattcttgattccaagctatgacagttgggttctgtgtgttgcttagcagcattaagtattgtttgaaggatttgaagagggtcaccatggcccacaaccaatactgtacacctgcaaaattcatcatctgttaatatgatggaaaaagctaagactttgcaactacaaacaataatcatgatgaaaaaaccaacagaaagggtatgatgacttcatgtttatgcagttaaaagatgcaaaaacatgaagagtgatttacccctgaaactgtgcctcaattgttgcaagagcccttgtgagtctagccacaacatcatcaacgctttctccaccttctggcctgttcaatgggtcattctcatcgagagcccatatctctgcatactgtttataataagattaaatgttaaatgatattaagaagaccacatgaaaagaaaatggtgaaaacttgatttgacttcatatctctgttaagaaaacttcaaatgaaaactaactagagttaaagatttcttttatattaccttgtcatgtgactttagttcaaatgaagggccaaagtaacgctccctaagatcttctataacctgtccaacaaaataaagtttattgactatgatgattttatcaagatgactaataaatattcttgaacttctaccctagtagtaatgcttcttatcagtaaaattctaactttttccaaaaggggtgaaatggcttaccttgcattggtcgccttcgaatggaatgccaagaacagatgctactagtttagcagtatgagttgttcttgaaaatggagagtaacaaatgcgaacgttttcgagtgggatgttattttccttcagttcctgcaaatgtagcaaaagtccactaaaagaattaaacttcattctacctaacagattataaaaccccatcagcagaagtatcaaaaatatgaatcctgatactaaaaataattattatgaaaatttttagtagcaaaataatcatatttggttgaacaaaccatcaaaaattatactatcagaccataaaacaacaactttgtgactataaatttatattatacgatcattatggtcacacattgtaacttcaatatggttatttattttactaaaaaaatacatattgttagtttggcaaatttcgcccgtgacactcattgctccccaaaaaaaccattaaaaaaaaaaaaaaaaaattctataatcagttttctcattccctaaccactagctaattaacttaagaagaacatcaaaacacaaacacttgcattgattgacagtagagtagagaccctttaaccaaagacagaacaagtttatgtagatctaaatgtaacttctaaacaatgttgtaaataatttcaaccccaatgaagttgccataaactaacaaaactgaattatatgttataatattttaaataaatagagcatataacacatgttattatattaaaaaaaatggacattataataattaaatctcgagcatagtaccaacaagtataccttttggaacaattgtccagccatttgtgcttggtttacaccttccgatgccaattcatattctgggcaaatcccattttcctgcaggtacgaacttcatcgttaaaacatctctatcaaaataccaaattccaacacacttgtctccacaaataaataattattaaaaaaaataccagagatgaaacgatgaggcctctctcgtttggaatgctcttgccatgcctcaaaacccagtatctgtttctcaaaaacgacgtcgtcgattccattccggttcagtgtcctcttcactcttaactaagctaaactcagatgcgcttccgaaatcttagaacggttttctccgctcttcttcagcaatagaaataatatgtatcaaatattcattcctcattggttgggtttcaacccacgtacgttttctgaccaatcatatttctcaaaagtttaccatagtcaattccgagtagtttttccatttttaattacacgtgtcgttacatgagtggataataatataatttgtaaagaaacctgccgtataggaatataatcctcatattattttcttacatctatgtcctgcacgaggttcgaccgttcgattcgacgttcagagggttctctcccgaaaatttgagagctttggaaaagcaagcttcgtcttcaattgaactagctgagatttcagatctccggaaatggccctcaatcttcgtcaaagacaaacaggtgagctttgaatctttctttgtgtcttttttttgtccctaacttgatttagatctcgctttggaatcaatttcagaacttaaatcaaaaaccctgtagttttttttattattgaactcatgtataaggactcaattatgaaatgctatggatttttagcggtacatgtttatgtgtatatatgttatgtattttgagtttgttttaaattggttatgaatttcgtgtgtttgagatattgaatttgatttgagaatttttgaattcagaatgtattattcgaatgttgaatatgaaccaacccgtgaacgcaacgggaacagctaacgaagaggtttacaagatcttgatctatgatagattttgccaaaatatcctttcaccattgattcatgttaaagatcttcgcaaacatggtgtcaccctttactttctcatagacaaagatcgaaaaccggtccttgatgttcctgctgtctacttcgttcaacccagtccggttaatatccagagaatcattgctgatgcctctaaatcactctatgatagtttccacttaaatttctcatcttcaattcctcgccagctactcgaggatctggcttctgggactctgaattcagattcaattgatcggatttcaaaggtgcacgatcaatatttggaatttgtaacactggaagataatttgttctcattggcacagaaatccagttatgtccagctgaacgatccatctgcaggcgatcgagagattgaggagatagttgagaagatagctggtgggttgttctgtgttttggccactcttggagtggtgccaatcataaggtgtccgcgtggaggtcctgcagagatggttgcatctgcattggatcagaggcttcgtgatcacttgttgtctaagaataatttatttactgaaggtgggaacttcgcgagctctttccagcgtccaattttgtgcatatttgatcggaattttgagttgtctgttgggatacagcatgattttaggtaccgtcctttagtgcatgatgtgcttggattgaagctaaataggttgactgtcccgggtgaaaagggtggaacaaagtcttttgagttggattcttcagatcttttttgggtagcaaatggatctctggagtttccagaagtggcagtggagattgagacccagctgaacaagtataagaaagatgttgatgatgtcaatcgaagaactggcggaactgatggagctgaatttgatgggactgacatgattggaaacactaaacatttgatgaatgctgtgaactcacttcctgaattgactgagaggaagcaggtaattgataagcacacaaacattgcaactgtgttgttgggtgagatcaaggagaggtctcttgattcttatgcaaaaaaggagaatgatatgattgtcagagggggaattgatcggcatgatcttctaggtgttcttagaggtaaagggactaagttggataaactgaggtttgccatcatgtatcttatttcttcagaaagcatgaatcaagcagaagtggaggctgtggaagctgcccttagggagtctgaagttgacacttgtgcatttcagtatgtaaagaagatcaaatcactgaatgtctcattggcatctgccaattctgctagcagaagcaacattgttgactgggccgagaaactatatgggcagtcaatcagtgctgtgacagcaggcgtgaagaatcttttgtcaaatgataggcagttggcgttgacaagaacagtggatgccttgatggaggggaagccaaatccagaagttgattcttaccttgtttttgatcctcgtgctccaaaatcaagttctggatctactagcagccatttgaaaggaccttttaaggaagctattgtattcatgattggtggtggtaattatgttgaatatgggagcctgcaagagctcgtgcagcgtcaacagcctgccaagcatgttatatacggaacaacagaattactgaccggagaggagtttgtggagcagctttcattgttgggtcaaaaaatgggattgggtggtgctcctgcttctgcttcaacacagtaagacaacccatgcttacataagaatcttaattacacaatctcatggtcagaggataagaaggttggccatctgaattcgaagatgcactggtgaacaaagtcagagatttttgacacaggttgtcattttacgatgcttggaagcttggcaaatgtgctttcttgttttgtaaggcctgtatgacgattctcagacaggactcactgtcaatgaggtttggaagaactgccatttgatttggtaatcttcactttttggattagttttgtattcataagtttctgtgcttaaaaatttggtcttccctgttctttgatttaattgaaagccttaccttataagtttatcgtccaaatctttagatgagtgtattgttgcaaattagtatgtgtgttaaacgaaccatattgttattgaaaatagttacaaccactaatatctcaagggtacaatttcttacaatttgttttaacttccctgcaactttgatgacagccactcatggatgctgacaatttctgcaaaaaaaaaaaaa

SEQ ID NO: 186313 - DNA, 993 bp, Cannabis indica
cttgcaggagagatgatcttctataaacaaatcaccccctttcactaaaagtacatctcttatccccttaccagaaacaaaggcattatcatataatcaaaaagagaatttttatggacaaccatgtctaaaatttcaagacataattagtaaagactacaaccaagtccttaactatgcaatacataaaaaattagcagacagttcactacagaccccattcattcaatttttcttcctttaacctcattggaataaaatattataaaaacccttaaaaaaattcttaattgacaaattcaaacaactatttagaacagttaagattcttcaaaaatggaattgttaactaaattacaaggcgaaccaaacttagaaatttagtgggataagaaaaagtaacgccttacacttgggatgtgacggaggtccacctccacctccaccgttactctccaagtcttgctttctccttttcctctttttatatttccgatacaaaatgtagaaaaagcacacagcaaccaacatactcatccctccaatccctataccgacgatcatcccaaccagcgtccccgtcgacaaacctccattccccggtggcgatgaaggtggtggtggtgtagacgaattaaacaaccccgttgccggagccggaatcaaatccggaggagaaagaactgtaggagggggtaacgtgactccaggggacactggtgggcttggtggcggcggaggtgacatagcagtagcgtttgcggtaggagaaatgacaggagacaacgaagacatcgtgggagttaatcggcggcgatgtcaacgaggtgagtcacttcgccgccggtgagttgagttgtacggaaagtaagggtggagatgttataaatcagttgaaaaagaaaataataaaaaataaaaattattagatttattttatttatttattttctaataaaagtaatgtggttagtaattgttgggtttggaaaa

SEQ ID NO: 186314 - DNA, 1904 bp, Cannabis indica
tttaaggggtattttcttatttgtctattttattctctctctcttctctctgatctgtgtaggtcgacgacattttgaaagtcgtcatggagatctcatcgttttgccattgctcgtggtttcgggtgggcagtcgacgatggttcttggttcgtcaagaatcatggttttgagtgggcgatcgaagaccgctttagggttgtggtcgatggcgcatcaaggttcattgtcgaagtggaaagaaaattgtgatctgatttgtatttttattttttgtttgggtttctaatatttagatgtgttcatgcccatttttgggtttttattttcattttagtgttcatacccattgttttaggtatttatgttcaattttttgtatggtatttattgttcatacccaatgttgatgaatattatgggttaaaattttaatttggtgtttgtattttagattttttatttgttgaatttcctctttcagtaaattatttttttgttgttgaatgtaaatatatataatgcaatttttggccaatatatatataatacctattttttgtagttttaattatttttttaatttaaaaaatatgatatagtgatactctttgagcgtggttgttatcagaaataaaaaatatataaaaaaaaacacgaacagtgactcgctgaaagtctatagtggtgtgcaatgaggaagtctaaatgttttagtgacatgtgccaaatgatcactaattattatttttcctggcacccacattagtgacacgcattgaagagtcactaatatttttagagactctcaaaatgggtcactaaaccccatatttgtagttattgtaaaaatgatgcaatatacagttacaattttctttttcgaaaaaaattttccattataagttcaatcatttgaacaataaatgaaagtcaagagagaaaatgtataatataattaataattaattcaaaggaatagatgatactaattcaaatcctactttatttatttttaaaataataatatggtaattttattgcctatacatactaattttaatgtacaggaaaaaaattaaagtattttttaggtttttttttgaaagcatgtatttttttattttaagtatttaaaaaaatatgggaagatgttggggtgcaaatcagatgcatttgaggccaattatgcaatcgaaatagagatttgtgcaaggatcattgtcattcagtttgctatgggtgttcataaaaattgataaactgaaactgaccatcaaactgaccagaccgtaaccgaatttttggttccacgtcatcaccaaatttggcagtcggtttcgatttcggtttttttgacatggcggtcggcttcggtttttgaaataaaaaaatggttaaaccaaaaaaatcgccaaaaacagcaataaaccgcccaaaactgtccaaaaccgccaataacagtccaaaactgccaaaaaccgtacgatcggttttatacggttataatttttaaacggtcagttacgactttcgtaaaattaaaatcgtaaccgacctgtcagttataaaattgtaaaaaccgaccgattttcacccctactcagtttgttggcaagaatcaattctcaaaccatgtgttttttccagatcgtaaagtgttaagtgatgccacagttagcagaatttggccaaatcgagaggctgcttgctggtgtgaggttctatttatattacttttttcacaaactattttttttttcaattggtaccctagacatctcaatggtgatgctaatgatttagcaatttgggctagactttctggttcttcagtttttccagttagcaccttttgttgctaacaacttctaaatttatttcagtgttgaataaaaatttac

SEQ ID NO: 186315 - DNA, 3854 bp, Cannabis indica
aataaaaaaaacataaaaatgaataaaaaagtataaaactccctactagaggtgatttccctaatactttgggcttatggatattttaatttgattacattattatggactttttttttgctagtgtaagaaaagattgaattcccatattttaagtttctcttttacagaaagcatgccttgaaagataagatcacttcttcttccgaagctagaagtgggggcgctggtcggagcaacagtcgaaccatcgattttagctagaaaaggagccaaagaaacaccaaggaatctgcctctgttgaaagcacaaccacgataagcttctgtcccttctacttcttgttatctctctctcagtttggcgccagagtacacattctgtgctccatgaagcaagacttgtacaacttctttcctccactccctgagttccttgccgacggcagaggctctcgcatcttttgccttttgcttcgcatggcagtttaccccaaccgccccttcgaggctcctacgaagttagattttttttcattggccaaaagttaattatttgaaataattgaaaaggagagcctttctctggaactttgggtaactttaagagcttgcgattcttgtctcttctagtttcatcaattgagggttttcgcacccgtttgtggtattcacttcttctctttgtattattatttctttgctattaaattagggatctcaatttgaataatgatggcatctaattgtattagtaaaaattgttctgaaactttattaatgcaatcataatatcaagtaatagaattagttacaaaactaactgtatttgacaataaaactaaaataactaacagttcaatataatcagctatatttaagactccccctcaagatggagagtatagattagtgacacacatcttggacaacaatgtatgaaactgataggggaagagggcctttgtcataatatctgcagtgttgtgtcgagagggaacgtaggagattttgattcgatttttgttgacttgttcatgaactatgtggcagtcgatgtcaacatgcttggtacgttcatggaagacatcattttcatatatgtggatggcaacttgattgtcacaataaagaactgttggttgagtttgggagatgccaaagtcagatagaatgttgtggagccaaagtatttcacaagtagtgttggcaatggaccggtacaaaattagcttttcccaacggtttataactgtcttttatactattttctaacagttcctaaaaccgttggctatgtgggtgtcataaaaatatagaactttaaatgacggcttataactattgggaaaagttactttaaatgacggtttacaactgtcaaaaaaagtcactttaaatgacggtttataactgttagaagacttccatcaggtagtaactaatggaaaaagtctctttaaatgacaatttataactgttgctaaaagtcactttaaataacagtttataactgttggaaaaggctttagtcgaattataaccaacaaaatacactactataaatgacagttataaaccgacgtacaatatgaggtaagagagaaattacaaatgttaatgctattctccccctacatttttagaatttagattttcgatttacaatgataaaaaaatataataacagtaacaatattcttacaaacaaattcatacatttgtcaagttagattatatatatataaatatatatatatatatatataaaaaatctttataagttaaaatatatatctcaaaaaagcagtcttctccttgctctattgattcttcttcagtgaggcctacagttgcaagaaacgaaatgctgcaaataaacagaacagagatactcatcatttgcaaagaaagtccagaatattttagcaaatctcaaacattggaataagaaaaggaacatcactacggaactttctaatatgataaataaaaaggttctcaagtaacaaagaccactacttaataataagttataatcaccaatctaacttaattttgtgcttcatataaagacaaataatttatcatctagtgtttcggtaccaaggcaagttaaatggttatatgtatatatagagagaaaaaattcagcaacacacaaagaatacaaaattccaattaagttcacataattaatttctattcaggattaatcatacatattttatatgcttatatgataaaattcagacaaaaatttcactatatatatacattgaaccatttgtaattttctattagttttcatttttgcaagcattaatgtactcaaatcccactgggattatagtaaatgaaaattaagcatattcaaatggatcttaaacataaatcttttaagctaacaatatctacattctatcttagccaccttaggtaggttcacacataacatatattattacctaaattagcgataataaaactcatgaataaaagggagattgaattgaacaagctcaatatgcaagcaaagaaacaagattaaagcaatgatttaggtgatccaaaatttataaaacgtttatacagagagtagagaacaacgtacttctcccagttgatgttttatctcttgtgtggtgttaattgtggtgtatctttataagcaatgacattgtaagtttcttgcatttaaaaaaaccaaattagaaaaccttgatcaatatagaatgaagcatgccaaaaaacaaagtataaacaatattgcttattgataactaagcagtattaactaaaactaaacaaagataatataaaaacctttaaaagaaattagtaggcaatattttcaagtgttagttcagatgaggcaatgcaaaaccactctgcccaaaatttgaatttctcaattaaacacaaatgtatcacgtactgattggattaacatcagctgtttttcaatttcactttcttagtaaccaaacactttagctacatgggagttgtactaacaaataatttttcttgtgcaaaatcataaaagaaaatacgaaaagaacgaagaagtgtgagacatgtaaagtcgagtccttatctaagtatttgaaactttgtttcactaatccctgcttcataaactactatgtaaatcccatttcagataatatctttggtattctaaacaaaacaaaatccagacagtaatttcaccttcatacatttttctttaaacctatatttagaaaaaaagtacaagatgaattaaggagatgtttcataaaattctacatttcaattaaaatttctcaagaaaacaggacccaaattaatttgtgcaataaaaatatctaataatcacatacaccaaaatcagatcagatctagaaaagatttattaagaaaaaaataaaccatggtacctgaggaacgcacggatggaagataaccggtgaagaagagacgaagtcggcggccggtgaagtccaagggaagactccgcgacaacgttaaggcgcgaaatgccgtgggctacgacttggggaatcttcgggctaccgtggtgtttggtgagtctcgtcacagggaaggattcagccacgagagtgagagaagagatgtcacttggggaattgatgtaatggtggtctgaaattttccattaacatcgttaaaaattttgaaattttctaatttgtggcggtctacaattttcatgagacgacagataggcggtttgaattctgaaattttcgagccaaataatttaaagccaagataattagttttgtataaaaattaaaatgcatctttttccaacagtttatcactcttgggaatactaagtattc

SEQ ID NO: 186316 - DNA, 1447 bp, Cannabis indica
  modified_base (29)..(29): a, c, t, g, unknown or other
aggtggagagttttccatcgtttgatggngttcccagggatatgtatcagaggatgtgttcatagtttctcagagcttctgagttttgatacttacgttggatggtccagcaatcctgcggtgacagatcaggtctctgccactatatcgggttggcctcactttccaccaactatttatacgccgcagaatacatcagactttattgaacagactgttgaggcactgcctgtcgctgaagttggaggaaacctcgacttaccaagaggttccttcaattatggtgacaaagctgtatttctgccagaagatactcagttggaggcgtcagcacattccaataacggcagtgatttagtagccacacaaaatactgatttcttagagaactgtgagatggatgtggagaattcaaccgtacccaggccagttagattgtcacttgatgaaaagatgctgaaagcactatcttttgtcaaagcgtcttctggtatgggaattttggcacaagtatgggttcctgtgagacgtggtgacgagttattgttgagcacttctgaccagccctacttgcttgataatatgctggtggggtaccgtgaagtgtcaaggaggtttacattttctgtagaagggaagcaaggttgtgttcttgggcttcctggtcgtgtttttcagtccaaaatccctgagtggacttcgaatgttgcttactacaagaagaatgagtatgtaagggtggagcatgcgtataatcatcaagtccgtggttgtattgccttgccagtttgtgaacctgatcttggagtgacatgctgtgctgtattggaaattgtcactacaaatgaaaaacccaatttcgatgctgagattgaaattgtctgtaatgccctccaggttggtctcttcccttaaatatgtttttttttgtctttttttgataagcacccttaattatgatagtcataactttatatctaataatagtaaagtttgttcctttgtttgttttctctgttctgttaaaataatactttataaatattagggatgccaattttgtcatagtacttgtccgtattttgtattgctcatgagagaatggatttacgatcaatttataaccttactttgttcgcttaacatctctgtttacgcttttacatttgtttgcctaataagaatcatgaacattagccaacatatgtatattgttattataattctattaaaaggaagaaattattatttttatatacacacgcttcatatatttatatatatatgaagggaatgttcaatattctctacactgcaactttgttggaattgttcatacactttcacacttgccttgagcaatcgtgtctttgtatgtatcttccattgcttggtcataggacattttctttagcagacagcattctatgcatttttacctgatgct

SEQ ID NO: 186317 - DNA, 3655 bp, Cannabis indica
acgatatcagccatctctagttgcttcttcaactttttcccatttgagcttgtaactttttccctaacctccatttttccttctctcaatctcttcttccttggctcggaacatagccaacgcagacctagaaagctcctcttctttatcctccttgctcgggctaacattccccgagttttttggtattatcatcaattgttgttgttgttgttgcggcctacttggtgttgtcattcttcttcttcttcgaaatctttcaaagaaagaaagaaaaaaataaaaagaagaaaaaaaattctcaatcttatattaattcttcttactttgttttagtagtagttagtactattttttttcctctttaaaattatgaataatgatagctatctttctcctgttgaagagtatgttacaataacaaaatgttggctttaaagatatgaaaaccaaaatatagaatattacactaagctaaggcttgaaattaccaaaatgcccttgttctcttttttcatcataaagtggattttaactttgttgaatgaagaccaactcattaaaaactcttccataaacctttccacctttactcaaacgcttgcttaatgagtacccatttaaaaataaatgtaggtttagttttgtatgtatagaaaattattataaattttaatactttataaatatattaaggtgtagttaatgtattaaatgcatagacaaatataagttaattacataattcctaatattctagttgactgcgtgtcaaaaaaacttcaaacatattttcgatactgtaaactatttataattttttaaaaatttacagggatatgttataagtataacaaatactaccatgaaaaaaatactccgacgtgtattttcagacactgagattgagaaaaaaaattataataagaggttgtaattagcaattctcattaaatatatgtcacataaacatattaaaataagtgattttatatctttcatattcatattatcacatatttttgtatatttgttgcatcttattatgtatttcatacattatactatttatttagctacattatatgatataaaaaaatgatgagactttttggttggatgtgagttaggtatatgggcaaactcaaccaacaactgcaattctcaaagctttaagtatgggaagccttgtattttattatatatacttatacaaaattatttttgtacaacatatatttgttgtaattattaaaataagtgaaaatttgttgaaaggtccaaaagggtattagaataattatttatttttatgtagaaaaaagtggttaagattgaagtgttttgatttggagtggacagtaagagcctacctatggaggaaatacttaataaagaagacagagtaggagagtttggctttatcacatatacattaattgttattccagcttgggtttataagacagaatcttcacttttaaaacttaaataaattgttttttatttgcattctacactatctataatatatcacatttaatattatatggtattttataatgtacatccttaaaaagggtacatcaatgcaccttttatttgtatcaatattcggaagaattttttagtttaaatattttcatagtcgtgtacgttatagttacttaaaacatcatataaaattttaagaaatttaaaatagtatataatatagaaaacaatgttcaaataatctgcttcacacacgtataaaataaaagaattacacgtacaacagactgttcaaactttattttcggcgtgttaaatttttttaaaggtctcaaaatttagtaatatatcttaaataactataatatacatgactacaaaaaaaaattaaactgaaaaattttctcatgtattgaaataaataagagtgtgtcggtacattcattttaaaaaggtgtattataatttttttcaatattatataaatatatttacacataaattcatacacatacactttacagcaatctcatgattctatttagagtttccaattttctaggatgacaacaattttttaagacaaatgatatttaattatttataattgcatatgaataaatgattttatagtagaccttttaaaaatgagtgtatcatatatattttatatttaggaccaatcctaacaaaatttatacaatcttgcattgtactaattattaaagatatcttatagttttttaataaatttagaataatctactattaaaatagttaaatttagatataatatctcatagtaaattaacacaaatttataaaaaatttacatagtgtcttgaatattgatacattatataattttcattttcaattataactatccaaatgtgaaaatataaataaaatgcattgaattacaagactaaatcttaccctattttaagagtacttttgagttcatatatttcacatttattctaactttccacactttttactctgtcaagattgaaatcccaatgtaaaacatagtaaaactatattaaatttcatgttaaaaaagaactagggaccaaaataaaactttttaactgtaaagagctacatatatatcactatataaatacataaaattaaacaaattttaaatagtgaataatactttccagtctgacatagggtcctcatctcatctatttatttatttattttatttttaaaataataataataataataatgaaatatgagcatataattgatacatctttccaccaaatatagaattatgaatttttcaacttttttttctcttcttttttggacatgtgggcagcataattatgtgcttttggacccactttgatattgcattcacagcaaaatagcttttgactcaaatctatcttctttcttagaatttttgttttttttttcttattctaatcttatatagattcatgcccaaaaaaatatcccaataattttcttgtttttattttcttatgttgtgagtattgctgaatcaaaaagcatctggtatacaatttggattgactttacagtgtactatttttttttttgttttaatgaaatattcttttgcaagttaagttacatacactatagtttcccatttggaatacaatattacaatatttgatgtggttgatgggccacaatagagcatgtgcaaaagggtccccatgattggattatgcttcaaactactcttcatgggcttcctatttaaatataaatttaaaaacttacaacccatacttgattgattcttttacttttaggattttataataaaaagttagctaattagattattttttaaattttgacatgtattaaattatattctccgaactttttaagttattaaaaattctttctgaactattgagatttgagattgttagatttaagagcttatgtccaattatgtttaattttactaacgtggtgattgtctatgtactaaatcgtactgcttgaactttaatatgtatcaaattgtgccccctgaactttcattcacgttaagtttctgttagtaaaattagataaaaaattttgaatctaacaatcttaattgttcagtgaaaatttttaactgcttgaaaaattcagagagcataatttg

SEQ ID NO: 186318 - DNA, 2303 bp, Cannabis indica
ataataaataaataatatttcaatttatgcttctaaattttatggctataaatgaagtaaaatattaaatgagtgatgggaatttttgcaggcttttcaatgagactcacatttacactgaaggttcagctaagttcatatatggctatggaagtgctgggaaatagagaattgtagagattttccttccaaaaaatcctaaaagaaaaaacatagaagagaaaagagaaaaagaaaagaaaaaaaaattactaagtattgtggtgactgttgagacaaaagtttgtctatttccttctaattactatatgtatttcccttttttatttattattttgtttcttcttttatttgtgtagctatataacttcaaagttatgaaaagaaaatggttgtgcatgaacctttgtagtgtgttgttcgtgttttaaaaatcacttaaaatatatacattgtctacatcaatataaaacatgtgtattccaaacgaatagtatatgtaattgggaattgttgaatgatagatagagatgaaaatttatatccgccatgggtaattgaggggacccgctcttaatgggggtggagatcctccgtcttggtggttaatggggcggtggtaggggacaatttcaatacccgaagtagggatgaggcgtgggcgagaataatactctctgtaccatatccgaccctgatataaatatgtatatatagtttcctttttattctttaacatatatttatcattgataattattattcataatcaaagttgaggagtgctaattacaactttctattacaactttttagtcaaccactacgtttgaaatcacatgccgaagtattttttttcatagcggtattcgttatacttatagtatcattcctgtaaattttaaaaaaattttaaaaaaaatattccgacatgtatttttggacatagaagttgattaagaaattgtaacaggagattgacaggatcaatctagtatattttttccactataggagtttgaattagggcacctttatgtagtaattaattgacaataatgtcatgttatttttcacaaatcattatcttattttcacaaaaaggaaaggacagttgtgtaaatgtgcccttaaaaccacaatttgtcacctcaattttttttttttccattttcttttcctataaataaaaaaatattttgttgatgttgttgtattgcaagcggcgcccattcttcagtttgagtttagtccccaccactgtctcttttctctttcttagtcctcactttgaaatcttttcagtgagtttcggaagagagagaaaaatatatatttattattatttttatagtgagagagagaaagagtccctaccaaagctcgaaactttagagtgagggtgggaaatatttgaaaggtagaaagtgtttcatggctttatgaatattgggatatgattggtattttgattaaaagtgtactttgaactaatttctttttaattttttgttagatatattttttttgtagcgattctcgggtctgtttctggtcagcagctttcgtgtttggatgagttgaaggtcaccacataccaatggtaactccaagcttatggctttcactttcgcaatccctttctctatatgttttgtctgtaaatgctgttgtaattgttgaacttcagttcgttcttatgaattttttgagcaaagttcaaatttttggctgtcttcctgtaaatttgaagaactgggtttttttttttttttttattttttttaattattatataattattgttcagggatatgttgaggggaattgaatgaaaatgaacttgagtttcggttgttcgtttacattatcttttgaaagaggcacctcaattttttttcaaaaaatttaaagaaaatcaaaccatgtcttataaagatgaggatcaacctagaaagtttaagtttaagtttaagttaatagaaaacaatggcttgagttttttttttttctcttctatgatactagtttttgggttctcattgcttaatgttgcagagaaccctttaacctgttacatttgcttagtaagtgttaacaattgtagttattgatctatttattaaacaatcattgggctttccctgttaataatttttgtttgggcatagttgttatgagttgacactttaaacagtaatcgtttttgtttgtactttggatgatagtctttgtctcaaatacgctatgtaatggatgttatggttggtacttgttcgaaacaaaaagtcactgttgttcct

SEQ ID NO: 186319 - DNA, 1815 bp, Cannabis indica
gtgaaataatcccttaaatatatatgtactcttaattgaggtattaccataaattaattgatagtattaagaaaattgggatatgttgagaactatccatttttattacacattaactacttaaatatacctacaaaataattataattcataaatattatctttaatatataattaaaatactaaatataatctcacgtaacttattaaaaataatattgtatttaattagaaaattctctaatttttacaattcatatgggctaaggttcttctatcggctcaaaaagaaaataaaaataatttttttagcaaaaaaaaaaaagagaaaaaaagaattgagtttgatttaaagattgtttataattttttttatatataatataaaaagatatatatgtttttatatttttgttattaagctaaattaaatatataattttaaatttttgctattacatcaaaattttatgatttaatatttttaaaatcaatattaacaattaaataagtataataatcattcggtaatgactattaagaagttttggttctgaatcaacttattattataggaacttagggtttcaagtatacctagaaagttgaataaccctaatgaattttccaccactacattgtccacttttttctttcttccttttttttcaaattaaatttattgtacgaccatatcctcctcaattgaaacaaaattaaagaagatgaaattattagtagatacaaaaccccagttgggaatttctcagacagattcacatgtacccgaacacaatttttccttttctttctttatttctctcatatatattttctcaagaaaatccaataaaaagatacaaatttatatgagctctatcgacatgatcattgccgatgcttggaagcatcttccaagaaccttttccatctttattgaaaaataggtgaaaataatagtagtttgctttccaccattttgacttctatataaatatatgtatacattaattatgtgtatatatattattatatatattattacattctgggcaacatagtccagctagcatttgactccatcctcaaaaagaaagaaaattgctactatagctctttatcaatcacctgaataatcataaatattcgctactagatgtcatgatatattttttcatcattactataggaatatgtatataaatatatatcaaattatatattctctggatttggaatatattcactgcagttggtccagggtccacaatttgctactcctctccacatggtaatcatagcaatccagcatatatgtgtgtgtatgacaatcatcttgatgtgcaacttaagttaattactattacttattaattaagcacatatatatgtgtaaagtgtaattaattatcaatgtattttttctgtttgatttattgctgtaattagatcaacagaaacgtattatatatctaaatttttgagcttatgatttttgagtttttcatctagtgtaaaacaagcatatatatatataatttacgtatctataattgtgtacaagagttcatggctcagtgcctataggaagctaatttacatgtataattttacatttagtgcatgttaaacacatacaaatatactcaatcaagaaaaaatttaatgaagagagaaagttattgttgagaatagctatagctctcagtaaaatatctgtgagatctatatagctcttaaattcaaacctgcagggcatctattgtacgtattatattagttacaacaactatgatgtatttatatatatatata

SEQ ID NO: 186320 - DNA, 1383 bp, Cannabis indica
attccagcttagaacattcataactccttgcgggcctggataccagaacccgcaccaaatgagttttttggaccctccaaaacagttgtgttgggattttgaacatttatcggcccattagcttccttcagaaaagtctttcttcttttattttctaaaatcaccaactcatcctcctcattaacttcctgttgaccgagactatcacatgaatataaatccatatttccatctttattagtttccatattcaccactacagactctggattgactcctcccattactcctaaattagcaatatgcttccctgttataaccccattcaatccctgattttcctccattgattgctccctgtcatcactgctttgtcccctgaaacttccatggccatgtgaactggagttgcccacgctgttcgacagcccatcacgaagccattttgcaccgatggtatgttgacgacgacgccgtggctcagccttcatctcaagatcatagttcttcttaatcaagtgatgtggtgtggtaaagtttacgtcacagaacttctccgagtgccccaaaattccacaaataaagcaaaaagtggaaaggtcttcatatttaaaaaatgcataacattcaagcccattcttcaactgtagctttttcttgcgttttaatggccgatcgacttggaccgaaactcttactctgaaataatccctccatagacccataaaattattttttatccgattcaacgaaagagccaacaaaatttcctaactgtctcaccacagtctcagatttaaacccagtcgttaagccatggatctgaactcagaaatccagcttgtttattaccaccattcttggatcatcaccttctttaagccttgtaaaaactagagggaccctatcaaaagtccaggggcttccttcaatcactcgctctacatcaaattcatgaaaaaactggaaaagataaagatttggatccaactctttcacacttaatcccctgcccggcctccaaagagatgccatcttgtgttgcattgccataaaatccagagatctatctgttaagaaccggccgactaaacaccagcgtgcatcgaactcaggcatctcttgatcaccattgtcaaacaatagaccttcatcttcatcatcctccatcgagatactggcgtaacctctcctcacctcttcagccataatagcacgtaatcacaacaaacaaaactctgaccgcaaataaacaaataagaacttttggtactacaataaaacataaaacaccatgtctagagaaataaaattatgattaaatgatttcaaaaatggacttaatcttgtacaggaaataaaattgtctacatagataaaatt

SEQ ID NO: 186321 - DNA, 1573 bp, Cannabis indica
  modified_base (53)..(53): a, c, t, g, unknown or other
ctctctctctctctctctctctctctctctctctctctctctctcttaaaacncacccttttttatttattatctaatcaattactttatttccttcttgttcttgttccctctcttgttcttgttaatcagctttgtcatattcccatatacttttcaatggactataaaagcacccaatgagtttggttcaacggtagctcaattgggttgagttcagctttgggtcatataggtctcagttttcttatttaggcctctctctctctctctcagtacaaaaaaacaaacaaacacacagacatatcatataacataatttatatggagaagcttaactttgttaaaaatggtgtgctaagattacctcctggctttcggttccacccaactgatgaagagcttgttgttcagtacttaaagagaaaggtcttctcttaccctttacctgcttcaatcatccctgaagttgatgtttgcaagtccgacccctgggatttaccaggttggttcttttgttttcttcttttctttcttctcttttaaaagaaaaagatcaaattttgataatgtattaagttttgagtgtctaataatggttaagaattttggtggggcttaggtgatttggagcaagagaggtacttcttcagcacaagagaagccaagtaccctaatgggaacagatcaaacagggcaacaggttctggttattggaaggcaactgggattgacaagcaaattttaacttctagaggtaaccatgttgtggggatgaagaagactctagttttttacagaggaaaacctccacaaggcactagaactgactggattatgcatgagtatcgccttgctaatactactaataatcctcaaaccaaagcaacaccagagaagagcttgcaccaggtgagcaaaccataatagaatatctcaacccagtttcaacattctgctttttcttacatgtatattgattttttttctttcttttttgttgatgttgtagagtcctgtggtagtagcaccaatggaaagttgggttctttgccggatatttttgaagaaaagaggaaataaaaatgaagatgagaacttgcaaactggtgtggaccatatagttgttcgaaaagttaaatctactactaagcctgtattttatgatttcatgacaaaggagaagaaaagggctgacttgaatctagccccaacatcttcatcttctggttctagtggagtgactcaagtgtcttctaatgaatcagaagagcatgaagaaagcagtagttgcaatagtttcccttattttagaagaaagcagcagcagcaggagtagaacaacaacaacaacaacaacaacaacaacaacaacaacaagttcaatgaaattatccaagattagcagcctcagtcatatgtaccagtaaaatctcaaatcaagtttctggattttctcaattagaaaataacccatctaaaggaaatccagactttgatctttcttaaaaatttcaggttctcttgtttgtgattgtcactttatcaatcaagtaagacaaaaaaaaaaaaa

SEQ ID NO: 186322 - DNA, 4989 bp, Cannabis indica
agtgtattcattgctccaaaactcatttatataacctaaaagcaccataattggccttaattttatctatacaacattatttacaataattggaaccattctttatcttttttcttaactttttttggcattacaaaaaaattttattttttttatagcccatttaacttgcttcacaatctcagctttttgttgtctatttgagttccaaatcaagtcatttctagccttccaaattgcataaaccagagcagcaacaaaggctattttaacacatttttgaaacatggatcccttagatttttgaatccatttcaacaatccatgtaaagattcagattgcacctgccattgtaaccaaacttttagtagcttcaagcattcaagagaagtctcacacttgaaaaataagtgatccacactctctttgtcattgctgcagaaaatacactcaggagaatctattattctgaaattgtaaagcctttcccgagtcttcaatctgttctgaacagcaagccaagtcaaaaaactatgcttaggagaattgagcctgctctagacttcattactccacacaactttgtcatgatcagagtcaaaccagcaacgtgctgattttgtatttagaaccagagaacacttctggttactttacctgttgaactctatcttttatttccaccattttcctccaataccagctgctggttgtgggagtacaaagctcccacaaccatgactggtgggagtacaaagctaccacttaacccacaagttgtcttttttgttagccacaacccacacgtgcttaaccattgctgcaatgttccatgtagcaatgttcataatgcctaggccaccaactttttttggagcacaaatcttctcctaagaaatgcttccagcacctgtcatcaagtctttaccagtccatagaaaatttctacagataggttcaatctcttttatgacttttttgggaagaatcatcatttgactccaataaatgtgtattgaaaaaaggatcgaattcacaagaaccaacctaccagcaaaagaaaggtttcttgtgccccaaacctaaattttagcagtaattttttgagcaaggttgttgcaatccgaagcattaattttcctagcacaaatgggaaccccaagatatttgaatggatctctatgtctagtaaaaccagacatatctagcaccatctgaatctctctatattccatacccgaacaatacaaggcagatttgtccttgttggtgttcaaaccagaagtcagagaaaagagtttgagaccttgcattaagaagctaatgctcttgaactcacctttgcaaaataataggacatcatttgcaaagctgagatgatttagtctcatttcagaacatctctcatgaaaagcaaactcctcctttttccccactttaatcaagattcgacttaggtattccatacctaaaacaaacaataaaggagacatggggtctccttgtcccaagcctcttttagcctcgaaaaagccatataaagatccattaaacaacaaggaatatctaggaattttcacacaagtcattaccaagctaatgaatttaattgggaatttcaaagcactcaacatttcttctaagaaatcctagtccaaggtatcataagccttttgtagatcaatcttgatcatgcaattaggcttagaaaccttcttaccataattcttaatcaagtcttgatatatcatgatgttatgtgctatatacctccctttgatgaatcctcactgatttagagccactagatcaagaagaatgtttttatgcctaggacaaattagcttagtagctactttatagagcacattacaacaagatatgggcctaaaatcactcacctcattagggcatttgattttaggaattaaggtaataactgtagagttaatttcctttaacaggttacctgaatgaaggaatgatgatatagcttcacaaacatccttgtcaatgagatcccaattatcttgaaagaagtaactcccaaatccatcaggcccaggactcttgattccaagaatactaaacactgtatttttaatttcagtttctgtaaattcttgcaagagagaagcagcttgtatatctgataatattggaccttcagaaatcactgacttcttcccatgatgcctcccttgcattttggttcctaataggcattcataatattccaaaaaagcttgagtaacctattttggatcatctattctttctccattatctgctgctatagatagaattctgttgcatgctcttctatttctaatactggcatggaacacttctgtatttacatcaccattcttgatccaatcaatcctggatttttgctacaagaaagataggtatgccttctgcaactctgcataattctcccttgcctcttgttctttctgttgaagctcaagatttagtggatctgcctgaataggctgctgatactcctctaattttactttagcccccctttcagcagcctgaatgtcattaaatccctgtttattgatctcttgaaggactggcttaagagctttcagttttgtcacaatctgatacattttggttcccctcacattcatattccaaactgattcaacctgctactgaaattgaggattgcttgaccacatcttgaagtacttaaaaggcttcctaccacttggaatggtaggatatactgctagtaatgcaggagtatgatcaaacaagccctcattaagaaaaattgcttcaacattaggatagtcatttaaccaattttgatttgccataaccctatcaattttagaatagattctatcctcccctttttgtttattattccatgtgaaaaaactaccaccgaacttaacatcttctatattacaagcaacagtacaatccttaaatggagaagggctatacctaactcgagcaccaattctttctcctctttctaaaatgtcattgaagtcacctaagaccacccatgggacatcagttttcaactgcactaattcttgccaaagtaggttcataccatctttattattaaatccataaataaaagaaacaaagaattgattccttttgtctatagaagcaacaaatagaaggataacttgacttgaacaagagataatattcagttcaaagctcaaaggattacaaacaataattatcttgccacctttatgccaagctatattagtagtaaagcaccaattactaaacattctcaagtataaggctccgagtttcgaagccttaacccgcgtctcaaggagaccaaccagtctaatattattcttagcaataaattgccttacttcattctgcttatttggactgttgattcctcggacgttccaattaagcactctatccattaagaagaggaggctctgccccctcctttgctggtcccttcgtgattcatcctctattgaaactcatttttttccatttcaacatctccttctagtgctttgaaggtattagatagctgagtttttgtgattggtgccttattctttggtctccaacctttagccactagtttaaactcaccaggcccctattgtgcatcaacatgatgtttgctcttgtccttcacaatccattcttgcttgttaccctcctttcttctacaatcatcagttgagtgtcccatacctttgtaatgcttgcatagaatgggtttccattcatagttcactgctattgatacctccttcccatgttcattattaaagtaaattaggtcagggaattcctgatgactatagacttcgattagaactctaggataggtcaacttatccctttcctttgtaactgcatccaccataataggattccctaactgtcccacaattttaaacaatgatttctacccccaatatttcaattctaggtcttctaattgaatccaaatgcgcacagttctaacatcttcctttttcaggttgagatttggatcccaagctttatcactggccttttattaaagaaaatataaccaccagataagatctcatctctttctttaacacttgtaaagcgaattaggaaaacaccatatgaaatcatacctattttgtccaccttatgcttccaaattcttctagcaaagccttccaaaatagaaaggggaggattagcacccagcacataacacacaattgccgatctccaataggaaacttcctcttcaatgtcatccattgtgatctgaactttctttgttttcttcgaactcgcaaacaatgtatccaaatttcgtttcactcatttagctctgagtaccaggggtaactttaattcctttaaagatagaactttggcattcttgattagcagcaagaaagaatccaaagttagcagctatctcatcttgttgcttcaacaatcgtagtgatgaatctggggataaaggctgttgaagattatcatgtatcaggggatccaaaaacactctatcttcatcatcttttgagaattctagggattccactcccagaatttcatccatcgacttcgttttcttcacctctgcagtagaattcggtccttttttcttaattttcttgcttgaaatcttcagttttcccacattcttagccctagtttttgccatggcaccaactcttaaagagctgacaagagcgagctcatcaatattaggaacacaaacccgagccttgtacagtagcatttcattatttgagattgaaaagtctttaggccgaccagccatcacctcatctcgaatcttaattagctcaggatcttccaactgcgcctttttgattctatcaagcaaatcagattggaatgtcaggctatgcaactttccaactacaaactcaattcccgcattaaccatctctgagggcaattgaggagctatcaaaacggtggtgaaaacttgcccgagacct

SEQ ID NO: 186323 - DNA, 1992 bp, Cannabis indica
gttccccgttgcatatctcaaaagggatcaatccagttagcaattacctgtcaaatccagtttcactaatccaggagagctgtattttccccaagctccaaaggtacctcaccggtgagtctgttgtgagccaaagaagaaactcaagtttctttcaaatggctttatctcagatcgggattttcaccactcaaactgttgttataagagctaactccacaaggctgctcattgtccctatgttctgtggatacaccttccaacttgtattgacatgtaaagaacctcgagcttctcgagtttgaaaatctctttcgggatcactcctccaatgaagtttctctgaagcctaagttcagtaagtgaactgcagtttccaagttcagatggtaaagagccattaatcatgttatcaaagagcaacaaactcttcaaatgctcgagttctccaatcgaatgaggaatccaacccgaaaggttattagctgagagtactaatgtattcagctgagagcaattagcaatgctctcagatattgtcccattaagcttgttttctgaaagaacaagctcctttaaacttctcagaccccataagctttccgggatttctccttctaaactgtttgaatcaagataaagaatttcgagttggaaaagatcactgaacatctctagtggaataactcctccaaacttgttatgagaggctacaaaagcagtgaggttataacacctgctcagagtgtttggtaatgatccagaaaatgaattctcatgaatccaaagatcagaaatttcacaagattgaggaaaatctggtaaagaaccagttaagttgtttgtgtttagataacaaaacttcaaatttggcaatgaaaagactccacttggtacctgtcctgtgaagtaattgttatgaaaaccaatgtactctagtttgatacagaagcttacctcagcaggtatatcaccagagagtgagttatatcccaaatcaagcttagctaatctcttattagattgaaaaagcttaattgggattgttccattaaggttgttatcattaagaagaagtgtcttgagttgaccacagttgtttccaagctgttcaggaatcccaccactgaaattgttaccacttagatcaagagagaccaaccctttatggagacagagataagtaatggaattgttcaacacaccagacaagattaagcctgagaaattcaaagccttgacttgaaattgaaaactcttgtttgtgtaacaagaaactccaaaccattgacagtgtgaagaagaagaagaagaagaagtagaattggagagtttccatggtaaaagatgttgagatttcttgggaaggctttcatagaattgtataaggaaatgggcaggtggagataatgaaaaagatgaaacaaagaagaagataaaagagaaagtaacaacattatatgaacttagcagaaacattggtacaaattgttcaattttctaacacttgttttctttcttatgggagttagtgaacagcaaaacaaaaatgataacaatgacaaaattgggttccattcaaatatgacagatcagtcattttctgaaccttttagctaagaagacagatagaatcatagaataaaatcaggctttgattcaaagaaaagcttccataatgggggccaggttgttaactgttaagtcactcaaaaacacttataaattgaataaggaaggtaagtgtggtgagtgagtgagtgagtgagtgagcttgtttgccaaaacattatgaaatataatgatgttgtttccaaaaacattaagccatttatgtcatcatagactttacttaatatgattgaatattatatcatggcagagagcaccaccaatggtcaaaatgaacactttagtaactgttaaagtcaacaataaaattacacttttgctttgaataaaaataacaataatggctttcataaaaaaaaa

SEQ ID NO: 186324 - DNA, 1842 bp, Cannabis indica
tagatacgatacaataactaagtaatatgcatatttacttatattaaaattattattacataattattaatttaaataataataatgaaaattaaacctaatacaatttaagtatatttttcaaacatataaatttaatttactgttaattatttataaaaaaaatatatctaactaatttaattaaataataaaataaacaaataattagttaaatattttaaacaaaactaatatttaataacgtgtaatgcataaaaaaattaattaataacgtgtaatacattaaaaaattaactaattaaattaaggggtaatgctaatttaaattaaaatttatatataaaaaaaattagggcctttttaatttttagagttctaaatatatatatttttgtatttttatgaaattctatataaaaatctttttaattttgttgaaaaataaaaaaaatcgttaaactgtttagagacataactaaatatatggatagagagagagatcagtttggtccatatatattaaactgtttttcagcacaataaccatgacttaattgcaaccttaatcaatattatatatatcattataacaacaaaaatcacgagaaaattataaaattataaaaaatttgtgtatatagaaattaaataaaaaatagaattaattgtattgtaatgcatagaattgaatggaatggagaatcctgtagagtcaaaaagtttccgccaatttggacactctgtgccatttgccatctaaatatcactaactacttagtgttactcaaattccaaccacttaaaatcagattctcccatcaaacccaaattaaaatatttatatctttgacaattcatataattatttatatatataaatgcttttgctccatattgagagagaaagagagtatattctttctttttggtgtttgcttatttattttcttccaaaaaaaaacataatgttattcacattactcacaaaaattattaatcacatatataaataaataaaaagaatataatagagcacgcggcgaagagaaaatgaattttgaggccataaaatcaccaatttatatttagtggatattggatagtgatgatcaagtgagtgaaggttaaataataaagatgcttttttttcttaaaattctaataatttaactagtaatagtatccacatttgacggaccaccttagcttcttacaaagtttctctttttttaaaaataaaaaatgaaaatattagaaaagaaagaagaagaataagaagaagaaaagagagaatattctgtgtaggccctttggtcggacataagtggggttaataatatttatagttaaagggcttatttgacaagtgcccaattaagcatggtgtcccatcatagtagtacattgaatttttttcaattgatttgattttttaaattatatatatatatataataaaaaaatggaattatttaatttatatgatcatgatgatcttagttccaaggtcatggttgttttactttttagtttacacttacacatagtttatcaatcaaactttatctcctccctagctagctcgatcgatcactcttttgatttatttacaccccaattcacaaccattttattaatttatttatttagatctttaattacaaacataacctaatttatttataataaatggtccataattgaataaaaaatagtttgaattttcatttattatttggtttcattattgcatgtgaatttaaattttattttattttttgttagtttttatttttattttattttgattatattttcaagttggtatttttaaggaag

SEQ ID NO: 186325 - DNA, 6684 bp, Cannabis indica
caaccatattaattgtggataaaggctcactttaccacagtatgagctataaaattacaagtattaccaatacttagaaaataaacaacctacaaaataaggagataaccttttacaaaaagaaaagtagttcccaatctcccatctagcctccttgttgttgagagtattgatcaccaccctagagtcgctctccacaataatgaacttgcaacctttaacatttgccatgtacagtgccaaacaacaagcagtcaccttgccacaaagaacataagaaaaatctaactttgtcgtgcttactcaagccacctcgccttcgtggtttctagctacagccacaatacacatgcattccattcatactttaagatgtttgagccaatcttgaggaggaggaggccattcatccaataagatcggaataggagcgagataagggaaactctataatttgcataagagtaatgaatagagacaatacaatgctttacattatccatattattattgtgtaccttatcattttggaccctccaaatagtgtcaacaacaattgaagtatacagaaaaacctcatctgcattaatgcctttggtttttaagttccaaatgaatttgacccagtaccacatgcaaatacctatacccgaaatagaaaaaataccacaagacgaggactgccacaaataaaaagtcaaattgcaagtgaggaaaaggtgcaacatagattgctcctcaaccccacatatagggcaccctgcaccatcaatacagattctcttatgaagaacagatcgaattgagagagcattagacaagatgctccaccaaagaatgttatggcgatccagaatcttgttatttcaaagtttgttctagagaaaaggtgcaacctcgcaagaaaaaaccctatcgcaaagcttgtaaaagataggctaatttgcgagagaatcgccattacttttctttgtccagacccatttatctttttcctaactagaaggctcaatttttgaatgtcctaatcattattacttgttaaaagatcagtcattttgctaaatttagaaaatagcagtccattagatttccgaaagaagttcttagtattcctaccatctgaagtccattaggttccaattaattttaacttggaacctcaatccttctcaccaaagtacatctttcaaattgtaaaaaaaataatgcactaatataataacaatatgctacaacaggactttttgttttaattgaatgatattccactttcgaaaaaaaaaaaccaacgctctgtagcgggactgaacgctgtactgatattcagcaaaggaaacaaaaagaaagaaagaaagaaacgctgtaccgacaaagcaaagagctctctcgttcgaaatgcgaagcttcaccaaactaaagtcatgcgccatggcagaaccttactcttcaaacctcaaaccgctcattcccacctcggaaacctcctcctcctcgcttcgctcaccaagactcttatcgtttccggaactcgttatctccccgaatcccattccattccgctatcggaatctctcctccaccaaatcctccgaagcaacgctctccaaccctccaacaagcttgaattcttcaaatggtgctccctctccgcaaattttaagcactcgcctctctcctattccatcattttccgcattctctgccgcactggctatctgcacgaggtcccggacttgctcgactctatgaagggagacggcgtcgttgtggattctgagaccttcaaagtcttactcgactcctttattcggtcgggtaatttcctttccgcgttgaaaatcttagacgtaatggaagaattaggagctagcttgaatacccaaatgtatgactctgttatcgtagctttagttaggaaaaatcaattgagtttggctttatctatgttctttaagcttctagacgatgaaacttatgtgcccagtttcattgcctgcaatgaattgctagttgctcttaaaaaagcggatatgagagtagaattcaaacagctttttgataaactcagagagaagaatgggtttgtgatggatatttgggggtacaatatatgtatacacgcgtttgggtgttggggtgatttgggtacttctttgaagcttttcaaagaaatgaaggcttcaatggatcctgatttatgcacttataatagtcttcttcatgttctttgctttgttgggaaggtgaaagatgcattagctgtttgggaggaattgaaattttctggtcatgaaccagatgaattcacttacagaattattatccaaggatgttccaaatcttatcgaatagatgatgctacgaagatctttagtgagatgcaacacaatgggtttaggcctgatactgttgtgtacaattccctcattgatgggttgtttaaagcgaggaaggttaacgatgcctgccagctgtttgagaaaatgactcaggagggagtgagaacctcttcttggacttataatattttgattgatgggttgtttaggaatggaagggcccaagctggttacgctctattttgtgacttgaagaagaagggccaatttgtagatggagttacttacagcattgttgttctgcagctttgcaaggaaggtttgcttgaggaagctcttgagttggttgaagaaatggaaagccgaggctttgtgttgatcttgttactataacctcactcttgattgagatttataagcagggtcggtgggattggacaaacaggctcatgaggcacattagagatggcaatttgttaccaaatgtgttaagatggaaaatggatatggaggctttgttgaaaaagccaccgaccaaaagaaaggattacacaccactgttttcatcagaaggtgaatttagcgagattatgaacattataaggtctgctgatgctaagatggaaccagagcttgttcaagatactgccaaagtcaaagatgaggagaacattcccaatgatgttgatcagtggtcatcctccccatatatggatcacttgactgatcaagtgttatcgaatgaccttttctctcaactattttcactatctaggggaaagcgagttcaatcaaaggaggctgcgccttttgatatcaatatggtcaatactttcttgtctatcttttttggccaagggaaatctcagtttagcttgcaagttgtttgagattttttactgatatgggtgtcaaccctgtaagctacacttataactctttaatgacttcatttgtcaagaaggggtattttgatgaagcgtgggacattctcaatgaaatgggggagaaggtttgtccagctgatatagcaacatacaatttgataatacaaggccttggaaagatgggaagagcagatctagctagtgctgttctggaaaagcttatagaacagggtggttatcttgatgtagttatgtataacacattgatcaatgcgctaggaaaggctggccggattgaagaagtaaacaaattctttgagcagatgagagctagtggaattagtccggatgttgtcacttacaacacactaattgaagttcacaccaaggcaggccgattgaaggaagcttataaattcttaaagatgatgttggatgcaggctgcattccgaaccatgtcacggacaccactttggattttctgggaagggaaatcgagaaacagaggctcgaaaaggcttcaatcatgcacaataaccatgattgaaactgcattttctttgtatctttataaattaattaggattgtatctttttaaattaggaactttactcaaatagttgaggaaagttgggaaagcagaaaaaatgtaggccatttagcttagatcagaaaacaaagtggctatcacatcaaggggatttgtttgaaggagagggaaataggagaagaaaatataaaagaaaaggggtgaccgtttcttacttttaatacacattccatttttttatgaaaagaaaaaccaaaatatttcatggcttaatttatgcttctactttcaactctcatgaaatgcatcatttttacaatattgatctttaaatctacgattcttttcttaatttatttgttccttttgttttatgtggaacaaaattagtccccatgcttgatatgggcgcttttgcactaaccaacattcaaatatatgatgcggttttcggatcttattgttattgctttgtagtgaacataagtacataacaatgatattttaaaatcatgaatttggatgcgatgtagtagaaaacaagtaataaagatactgttacaagtgtatgtatgtagtgatgagaagtaattaatgttttggataataatgttttaatgactaacactcactcatatagctacatcaacaacattcttggtaaagtatgattattctctactctgtcgcctcctatagctttcatctaaactaaaggtgtgtataccagacagaacatctaattcttaagcagcagggatctgcttctttcttctgctacctgttcattgaagaccaaaatcaaattagaggaaacaattgaagagaaaaatgaatgattaactttggttaaaacttaccggaagagctcttgctccagagtgcttggccgtctatagtggttaagtggtggtcatcgaggcgtttccaagttttgatggacttcacacctccccaaccaccctcttcaagtttttccagtgttgctacaaccaccctagccctccttgaccatccagccttcccataagcatggtatccgaatcctccagcgtagcaaaggtgaatatcagttaacttgccacaaaagtcattcaaatgatcatggcctgtgaaaactgccttaacatccccagctccaaccatggttgtgaagaagccagaattcacagatgcagagctaatgccttcctgtctcacccctgtgaagtttgatttgtcaaaactagcaaattccggtaatgggatatgaaagtatgcaagtcccggtgcaggtcctttctggggttgtggcttgcttacataagctttctgcaaagcaatgaattgattaaattcaatacagttcaactgatattagaagaaggttttcagtgaataaaacagtaaggcaagttaccttaagctttgaagaagtacgttcgaaccagaactgttgagaagccttgatccaaccatagccagggatggagggaactgtagagtaatctccactgtccaagaagtaaagattgagaacagatttattctcaaaactagagcctttgactccaccaacctcaacattatagttcccaaaaccatcaataaacttggcttctggagggttaacttgagacaaagtgttctttaacccaactatgtgtttcattaccccttctcttgaaagagtggattcctggtcatggtttcccaaaattgcagtccatgggatgttggaggctattgcaggggcaaatgcagcatttagagacttaacagcatcagtggcatcaaatccgaatatattatcccctgttacacaatataaatatagagaaaagagaatgagttaattgggcaagtgggtattaactaggcagagctaataatttcaagaaaaccaagcaagctacagacttttacagtcactaactgaacaacccacctacccaactagctattaattatcatccaaaagtgggttcccaattttcatagccagcaagcaagttttctcatctaaaaatctaactaacaactacaaaccctattaagaaattagtaaaggaaaaaaagaaaaagagaatattaccagtgaaaacaatgagattgggtttctcggcgagaatcatgcggtggatgaaggcggaggtgttgagatcagagcaacccttgacctggtttgggagcacatcaagacaaggacttgactttccatcggcaaagtgcatatcggccacttgcaatatcttaaacacaccattggacccaaatctgagcttcttttgctgatgggttttgttcgggtccgcagctaaagcaccggtcggaagcagagacaaggaaactattaacaacaccacaaacgttgtattaaggttgtaaccagacgctaacaacgttaagctgttgtcatctcttttttttcacacacacacactcctttgctttgccactacttaattactcagttcgtttgtttctttgcttatatcaacgatttttttacgtacttttctttgtgtttttttgtgaccaatcgaacaaaatgtcacggtctcatgagacacgttatttatagctgtctagttatatttcaatttcgtgtatttactacctctatttaattcgacaagaactagaaaaatattataaaacaattaattttatatgtatttgtatattaaaattatttagagcataattttgatactcttgtgaacattttgacagatcctctccatccactgattctgtatatgctcctccaaacttcattttagttcacgtgacgttacaagtctcgttcgaattttatgccaaataaaataaagaattaatttctttaaaaataaataataacggactttatttattaaaaaaatcatatttggatattaatttttttctaaattttcaaa

SEQ ID NO: 186326 - DNA, 1644 bp, Cannabis indica
aatattagatattttttattaaagttggacaaaatttcttacatttttaacgacctttaaaatttaaagagctatcatttagtacaaattaaaatttgtggagaaaaatcctaattatcctaacttttatgctcaagaaaaaaagacatgtaattaatttttgagaacataaactatttctctcatggcaaatattaaacctttacaaacaacgccacaaaatagtcaaaaatatttattttgacaacacaaaacagtcaaatttaatcaataacatacaaggaacaattccaactcacaaacatatattctaataaaaaagaaaaaaagaaaattaagaccttcattgttgccacgtcgtccttttccctacagtgacacgtcatcacatagcaatagcaaacccagcccatgtatattgttcggacgtgccactcatttctgaaacccagaatatataaagcccacccttcacaaaaccccttcatgtgaaaaaccaaatcactctctctctctctctctctaaactcctattttacgagaactcagccgacaattcaacaccaaacccaataaccgaaactcgaacccccaaaccccagactgaactcgaaaatatttatatttctgatatatatatatttatatattttatatgccgatggcggcaggtacagttgcctcccggaccgatcgagcaacaactactgtgccggccacgatggggcccgcaatgatgccaatgcaaacgccggggatgacggtcatgcctgacgccttcgctaaagaggctatgctggcatggtttcggggcgaattcgcggccgccaacgctattatcgacgcgctctgcggtcacctggcccagctaggcggaggatccgattatgaggcggtgttcgctgctgtgcatcgacggaggcttaattggattccggttcttcagatgcagaagtaccactcgattgctgatgtcgcggtggagctccgccgtgtctcggtgaagaagacggaggataatagctggacatcatgtgatcgcgtcattgatgagagtggggagaagaagaagagcgaggaggagaaggtagttgcggtgaatccgtgtttggaaggcgagaaaattaatgagaaagtggtagaaagtaatgaaaatggctttcatgatgatcgtgagattggtgaagaggacgattcgcccaatagcgagattactgatacaggtaagtaccatttgctatagggataataattgttttgagaattgttctttttttaatagtgaaatttgagtaagatcatttccgagactgaataatgctttcaaattttacgaattttctttcttggtttgatcaaataaatttacaaaagtcctccttccaaagtacttgaaattttcgatcctactgaaaaattactttcgtgaattaattagtccgatcaggaaaagaaagcagtactgttctttcagaatctgaagtgacttttgctgtttgtttcccgagaaacaatatattctctgtattataaaatttattttcctctgcttatgacgtgatttcatttatagtattttattcaatttttttatatttctctacagtttactatacccataaattggctttttcaaacttaagt

SEQ ID NO: 186327 - DNA, 4788 bp, Cannabis indica
ggcaagatggtgcaatagtggcaaacaatcctacaatctttgccgtgagagaagcacaacttttatggcctgatactagattgattgcctagttcaattgggtgcggttcagtaccacgaaggtctctctctctttctccaaaatatttaccttagatgaactgttgtattctttctactttgaagttctagttttttaatttatatattcttttgatattgcagacacggaaaggtggttggcgttatttggatactggacaagttttgattgaaagtgcatgctcagttgatcgggtagaggaagctttaagcacattactccctatgctccctgaaatacaatattttcgttttaatccaggtacttgttgatttaaagtgtgactgtagaatctcttttggttgaaagaatttggaatgttattcttctgtgtcatttacttaactttctcaactagtaaaagattctttaactctctcaactagtaaatgtttctttaaagccaaaactttccctctgcagttgatgaacgatgtgatatggagctagatgagactgatccagctgtctggatgaagttggaagctgcagttgatgaatatattcaaaacaattccctttcctttaagagtgcttgtgagaggctacttctacctttccaacacgaagataagttatctgagaattttaggtctcagtatctctccaaggcaaaggcttcaagtactggtatttaagtctctctatgggctttaccttaatggatactcattttattttagtctctagaacttattatttttatttttgttttctgctgtaataaaggcgaaaaaagcccatctttaggttggagacgtaacattctgcttgtagaggcttcacatagtccagattctgggcgagttttgcaccatgctcgtgcactagagtcattttgttcgcggaacgggatacgtttatcccttatgcaaggaatatcaggatttgtgaagacaatccctgcaacaacattcccaacaccatttgcatcacctatgtttactggaagcttcccttcaagcccacttttattcagtcccgatgttggaactcataggcttggtcgaattgatatggtcccacctttgagtttagatggtcaatccacaaaggctgcttcatcaccaccgaaatctcctgctgggccccgacaactttctttaccagtccgttcattgcatgagaaattacagaattctccacaagtcggcattatacatttatctcttcaaaatgacgcacatggctctatattaaggtcaacaaggttcttgtcttgtgaatttggcaggtattttagtttagttctaatttcttggttttctatttatgtagttggcagaatgatgtgtttgtggttgctgaacccggggagcttgctgataaattcctacaaagtgttaaaatgagtctgttgtcagtgatgcggagccgcagaaaagctggatcactacttgcaaatatttcaactgtttcagatttggttggaagtaaaccttacttccaaattggaggaattgtccaccgatatattggacgccagacacaagtagttacttgctctttattcttgctctttattctgtcattgattgggtttttatgaaattgtaattattttgatctttcttgtcgtatatgaaggttatggaggatgatcaggaaattggggcatacttgtttcggagaacagttccttctatgcacttaacacccgaggatgttcgctggatggtaggcttactgttcaagatttttcctatgttttgctgtttttttctctttgctttcaagtatgaagcacaatgaaattatatacaagtaatagcttcacaagagcacagttaagctgctatgaactttagattttaaaaagagaagctatttgaaggatctactcagtcaactagaatgcaagtactagaacaagataaaacactatgaatgacatttttttgttattggtggaaatagattgataatttccttaccagtgcatctatcttgtacactaggaaaacctccaaccccataaaaagtttaatttgatagatatgtatcatgtgtttgataattctaggttggagcttggagggacagaattataatttgcactgggatgtatgggctcactgcatctttgattaaggcttttctagactcgggtgccaaggctgttatatgctcttcagttgagcctcctgagacacaaccgctcacatggaatgaatctggagaattcagtaattatgaaaatgggaaatttgaaatcggtgaagaagagggtgaagatgaagagactgaacctgtcagccccatcagtgattgggaagacagtgatccagagaaaaatggtgaccgctgtaccggtatttgggatacagatgaggaagaaatgtcgcagtttgtatgccaactgtatgactcattgttccgggagggagccaatgtggacgttgcactacatcatgctcttgcttcacatcgcaaattgaggtattcatgtcatcttccaactatacagtaattttttagataataaatttcttataataggaaatgaaaattaacacaaaaccagagagacaaagagagaagagggagtgagtgagtgagtataggacaccgacagtgattattttattgagaaaaataagagagagcattcagttttgaggccttaccaaaccaaaaaaagaatagtgagagagaaagaaagttagtctactaaacattgtaacgttgaatattttaaatgagaagcatttttatttatgtgatttatttatattcccacgtttcatgttcacttttaactggtttgggtttgatttgaatttgatcacactaatattagctttaaagtgcctaatgacatgacataacatgattttgcttctgtctgcctagctggcacgaggacttgttctctatctatctatgcctttgttgtcttccattttcatgtgtagagtcggtgaccgcatctgaaaaacttcattttatagaattaagcaaatatttgtggcaagtttgttgtgatgataaaaggtgttttgaggccttaaacgtgtagaaccattaattaacatatttcataatttcaaataactttattttttgagaatataatttcaaataacttgaagaaaagcaaaattgtttttctctttacaaaaagaaaagaaaaacttactgttagaagtttaaaacagatgtggttctttacagcgggtaaactaaaaagtgataaagtaaaaacaacataagaaaggtaattagttgataatttgttgctttgtcattaatttttcgttgcttggttgaacttttagcaaaccaccctaataatgactattaggattgaccactgattgtaaatttgcaaacacactttattcccctgtatcctccaaagagtaaatttttttatatttttcaactgtggactcaaccagataactttcacatgtaacataatttcatccaattttgaatattggctggctccaaaaaaattcaagcagccacttttataattttaaataactggtggtcactcaatatcatacatttaattaatggctgtaatgctttttcccttcttctttgaatggattttattgatgttttgacgtttgagtgttaatgttaaagatgaaggtgccaatttcttttcaaaaatctcaaaaaggaagaaaaaaaaaatgaaggagcttttttctcttttctttttcttttttcctgtattactgttgcctgatgaaatcaaatttaatcttaggaccctcatgcattgaatgattgaaatcccagtagctgctcacataccaaccaagtatgacaacgtttgaaaaataaaatggaaaatgagaaagtaacaaggttgtcctgttccattgcctagaactttgattaatagtaaccatgaaccctaaatatgtcgagaaaagtggtgttcctcttccttcaaacttattccacaatggatccacaaaacctttaaacgtaatcactcaactcaaccaacctttatgttcttactttacctctcaactctcaagtcaaggcttaaggcacgacattggaaaacacttatttttgtctttttctatttatcattattaattttagaaaaataaaaaagaaaagaaaaactatgtttggaaaattgactgatgagcaaaaaaatgcttctggtgagtttcaaattcgtctatagtccatactataagaaacccattagctaccccaccaccatgatcgtgatcatgatcttgatcttgatcatgatccagtgtccaatgcgttaagtgtgccaaaagctcaatcaagttggggggggggggggggggggcggtatgatagtcaaaatagtcaaagttttgtccgcaaaatttgcatacttttattccaaaagacactagaatgaataatatgatagaccccatggtgtcacttcttacccaaaccaccaattatgcagaaactcatgttttgcactttaacaaaaaagcatcactaaaacattactcaaacactactattagagatttatagccttaaaaaaataaataaaaagaaaaataaactaaagaagaatgctttatgtccaaagcacacattgaacttgaaatcaccctcaagaaaagaaccttggaccaccactttcttctccttgaagcctcatacgtcatcttcaataataaaattaaaaaattaaaaaaaaaaattaagacaat

SEQ ID NO: 186328 - DNA, 3408 bp, Cannabis indica
atttagaagtttttctagctcaataatatggactcgtgtactagagctcattaacaatcgaatcacgtaaaatctttgtctctgcttctttgatttgcttcttcttaagcatatttatttataatcgatttccaaaaatctcagtaaacaggttgtgttgaggtcttaaatttactacaaaattgctaacccgaacacaaacgtgacacgaaaaatgtataaaaaaacgtacacaaacacaactcaaataaatatcatgtcgtgtcgaacccgcaaaatctcatgtcttgttggtgggttgtaagctaaattcttgtttttaatgtcatcgtgtcgtgtggagttcttaaatttattttacaagccgacacgaacgcgtacgacttgtgacatgataaatttatagaacatgaacatgatctgcataattttcgtgtcgtgtcaaatcaataaaatctcgagtgttgtttgtgtcatacttgtgggtcgtgacctgaattgccactcctaatatatataatacttttacaaagtgttatattattattagcaatgactatgccaacccaaaaatttaaagagggccaatacatatagaaaatagaaatatataatttcaattattttttttcatgtaatttcgaataaaatggggggccacaacaccctccgaccccttctagctcagtcattaattatcaaattaatttaatatcgagtttacttattttataaagagactgccacataaggatgtttggccacataagtagggtttgggtaaaatgaatgaaaatatagaaatagaaattaaatggaatcaaatttgaaaaacataaaaaaaaacttagtaaaaatgttaataaaattttctcatcttatactggaatagtcattcctttaattttaaaataaaataatcatttcattcaaaataattaaaaaattattttatataactctaaatatttattattatatattacctcaccatcaattgttattagttttatatttaacctatattagcggcgcaaattttattgatataactactctacactagctaatagctatagcattatatatatgatcatttctagcattatattatatatctttattaaagagttgaagttggtactagctagcctagccttggaattatgatctaaattatataatggtgttgatatatattatatatacaattaatatttgcggtggctatcaacttagagttctaagttagactatagtcttttcttttgtatgtacaatattattccatcattcttgatggttaattactcaagtttatagcatacttattcctcattttgttatgaaaaagattttgttcaatacaatttgcaaaaacaatgaaaatagttaattaattgttttaattttatttttaatgctgtaaaaatagttcattaataattttcaaaaacaatgaaatgactcttacaattataatgtacatacgtagtcatatatatataaaaaaaaatgaatgtaatttctttagatatctctctaaaatataatttagaatacttctgttgctatttttgagtttgtggaaagaaaaagagaccaacatttaaacaattggagtttaaaaaaccttttttctactattttacatatgatcttattaatttgtaatcaaacttcgctaaagaacattatttaatatcgttatcaaattattatgttacgaaatggtgtaaatatttaaaatcgtctcattattaaatattttaattaagttataataattgttatgaaaaattgttaactaaaatcatgcaataaaattagtgtgaaatctagctaatagcaaagtattatcacatattttttttatacaagagttattaatattaagaaatttgaagtcgaaggtagtataaattatagacttgactgtgtcaacacatatcataccccttgacttacacgtgttcccgacatgcgtattaacacgagaaatgttaaaaggtattagttgtgtctagcatcctcctacatgtcaatatcgttattggttcaactaagtattaaatttcatataatttaatataattaatagcttttagagagtattattggtcaattgcaaagtgatacgtcttgaaggtactagacaccattggtatctaataacaatattttgttaatactaatggcacacacaaaatttaatttaagtgggagtgtaatttttttcgtaagtgtcatattttaaaggtagaaatttgtgattatgtagtattaaatataattataaaaaaataacaattgacactaaaattgtaatttaactcaactacaaaaacattagtgtatttttcttagagtaaattgcatatatttaaaaggaaaaataacattcaggccgttggggactttaacccttgtccttgagataaagctaaattaacacaattaaccacaatatcaaagataatatattattataagtatattttaatatcgagtttcatataatttgacgtagaaaaaaaagctaacgaattacagagaaaatcacgtcacaattatattaagtgccaattagtaatgacacaagaagaaaatattatatgtatgtctcgtccaatttgaacggaactaggtataccaagacatgatagacttctcaaagtaagtcataaatggctaataataataaatatttctagagttatgtataacacttatatatattaaaaaagttggttggttggttcccaataacagaaattattaaaccctaatagtactatatataattaatggagttgatagatcactacataattcacattaccctacctcttctggccttgcagagtggccatgtcaccataccattatattataataaatatatatacatatatataccaattattaaatatcaaaattattaatcttcgatatttattctcaaccaatgctttatataactcgtgacttacgtgatcaaacacaatttataagatgatgagttttgatcgagcatttgttattataatataaaattggtatctaacatcatcatcaatcttcttcattgtacatttgactaataatgaatatcgtatattttattttaaattaaaacatattatagaatccaataataaattttacattcatatcattctccaaattatatatattattattaatttaaccactaactaattaatattaaggggttggatcttatttgatagctttcttctttttacattattttcttaatatatatttcaatataaaaactatcagataagtatacaatacacctttaaaaaggtgcttcggtagattctgtatttattttgatatatgagagagctgggctgatcttaaaatttagtgggctat

SEQ ID NO: 186329 - DNA, 1136 bp, Cannabis indica
actgtaaccgttgctcagccaaaaattgaacctaaacttttttccaagcgtagaataatgatgcggacaaagcaaacaatgaggaaagcttcaaagagagacccacactttaagccagcttacagtccttgccagctatagcataacacacctatagcattatcttttatgttgaggttcaacaacctttcttttcctaattttcttattgaagtatatggcaacctttagctggtaggcttgtaatctttgattagattggtcccattttttcaactaggtctaaggattcaacaaagagactatggttgataacctcgttgaatgttgcttttctattagatgacaattctagtttgacgaacaacattgcttcatacccatatgtcattgcaaagggactttgaccagtggtcatcctttaagtagttctattctatgcaaccaaagcacctcaagtaattctttaggctaatttccttttgctttctcgagacatttttaatgtgtgtctgagggtcttgttcattgctttgacctgttcatttgctagggggtaggctactacaatgaagcttttgacaatcccatgcttcgagggagtccatattggcaaataagtttttcaccacaaaatcttagacctttttggaggttattatagctaacgactcggcctccatccatgttgttaagtagtcgatcactacaactacatattgaactcaactttttccttttggaaaatttctgatcatattaactccctagatggaaaatgatgaaggacattgcatttgagttatctcatttggaggagctcggggtatttttggaaacttttggcactattgcactttttaacttgagcgagagaatcttccataattgtcagccaaaatactcttgcctaagtatctttgaagatacattttgctgcgagtgtgacttctacaaaaccttcatggtcttagtaaagaactatgcaacttcctccttattaacacaccttaggaggggtcgagaaaatccgcgtctatacatcactccgtctaggatttggtaccgtgtagcttttccttatcattttgcaggctttatttttatcatttgggagtgctcctgttttgaggtag

SEQ ID NO: 186330 - DNA, 3075 bp, Cannabis indica
ttttggcacttctctcatcaccaaaagatctgctgatagtgtttcttctcttcttgaggttgtcaagtccactggtgccaaacaaatactcttcaaccacttatatggtcagtattttctttcgttatatatttttcacagcataattaatcagcgtggaacttggaacttgtgtttatcatcaatctgttcagttttaataatctcgtatagatttgtttcatttggttagtgaatctccaaatcttgttttactttcttattgaataaccaaatatatcttgttatatagtatttgatgaaattgttcatggactccaatgttctttctttgattttgattaaatattaactgtttgaagatttgggtgtatggtatttcgcttaaattgaaaagggggcattctgtaaacactgcttaaagatgtttagctttttcattctacaatttttggaactaaaaagaaaaaccaggtgtgcccatttttaatgttttgtgaatgtgtttgttatttcagaccccttgtctcttgtcagagatcatcgagcaaaggaggttttgacttctcaaggcatagttgtgcgttcctttaatgctgatttgctgtatgaaccatgggaggttaatgatgatcaaggccgcccattcacaaccttcacatctttctgggagaggtgccttagcatgccatatgacccggaatctccacttctcccacctaagagaataatttcaggtttgaacattgattttatctttttatgttctttgcttacttctacaacagtttcaagtttatgttttcaggttgtgatccatattttcgatgttgttgaattttttaggtgatgtatcaaggtgccgtcctgatacactggtgtttgaagatgattcagagaaaggaagcaacgctctcctcgctcgagcttggtctcctggttggagcagtgctgataaggctctcacaatttcattaatggaccactcattgagtatgcaaaaaatcacagaaagctgatagtgctacaacttcacttctctctccccacttgcattttggggaggtaagtgtgagaaaagtgttccatcttgtaggatcaagcaagttttgtgggccaatgaaggaaacaaggctggtgaggagagtgtgaacttgttcctaaagtctattggtctaagagaatactcaagatacatgagttttaatcacccatacagtcatgaaaggccccttcttgggcatctaaagttctttccatgggttgtgaatgaggattatttcaaggcatggaggcaaggtagaactggatatccattggtggatgctggcatgagggagttgtgggccactggctggcttcatgatcgaattcgggtggtagtttcgagctttttgttaaagttttgcaacttccttggaggtggggaatgaagtatttctgggatacactcttggatgctgatctcgagagtgatgctcttggttggcaatatatatctggtactctccctgatggcagggaattcgaccgcatagataatccacaggtatggatattaaaaattccagagaagagttgaaacacaccatattcttttgagtttagatatatatactctctagagcaatgaattaaatatatgatttcatgtttatttgttgtatacagtttgaggggtacaaatttgatccacatggagagtatgtaaggaggtggcttcctgaactttcgagattgccaactgaatggattcaccatccctggaatgcaccagaatctgtactgcaagctgctggaattgaactgggattaaactaccctctccctattgttggaatagatgctgcaaaagccagattggaagaagcactatctgagatgtgggagcaagaagcagcttccagggctgcaatagagaatggaaccgaggaaggtcttggagattcctctgacaacaacgacggtgtgattgccttccctcaagacatacaaatggaggagaaccgtgaacctccaaggaacaatcctcctcctccaacaactcgacactatgaagatcagatggtcccaagcatgactacttctttgttcagggtcgacgaggaagaatcctctgtggattttcgtacttcagcagtagacagccgagctgaagtgccaacaaatgttgttgtgacacaggaacgaaggagtgaagtgttgaaccgtggacctgtgcagactatcactcagccacagtacaatccaactgcaatgcagtatgttgctgaggattccacagcagaatcttcaagtactactaggagagagcgagatggtggtgttgttcctgtttggtctccttcagctaccagttactcggagcagtttgttagtgaagaaaatggtattggcgcaagttcttcttatttgcagagacatcctcagtctcatcaaataataaactggaggaggctatctcaaaccgggtgtgaactattttctcttatctgaaaacaaaataaaaatgcgcattatgtggctgctttttgctggattagtctgattgaaaagtgattaatattctctcaactaataactttttttttcttttttttctttttccttatttgatatgtaaaaattaggtgaagagaaagaaaacatccatacttgggatagcaaaaaccgcaggtgaaaaatgcagtgttgactgtatctaataggcgacgcgacgtaagaggtggaagtttgctcgagatgggattaagcaacgcatcggacctgtttcttcttcttgttggctagtttggcctggaacggcagttgacctctaatccgtattatctccttagtgtaggaagcaccggggcaatccttttgtcccttgttgtatcatattatgtagctttgttgtatagtaaaacgttgttctcataagagagagtttaggtaagtaaaagatagaatgtgtagtcctagaataaactcaggcttgtgctttaatccccagatgttttatcgtgacgttttttatttaagtatccaggttttcttcattcgttttgcatctaatttattgtcgttacttgt

SEQ ID NO: 186331 - DNA, 5734 bp, Cannabis indica
tttatttcagttgtgcgagtttgaattttgttttttacttgaatttggggctgaaatgttgttgatgacaattaggaaataattcattacattgatgtttctaatgtttcttcttaaattcattatttttcttaaagaagaaagaaaagtggaaaaaaaaaagaaaaagaagaccattctgggtgatgaatgattataattttaataaaaattattagtgtaatccttaatgggcatgtggtagctaaattgggcagaaatgtatctaatagcttgatatcaaataacaggttgcagaaaaacgaattttagagctagaagctgcaagaaacctttcaagaatttggatacatgtggatatggatgctttttatgcagctgttgaaacattaagcaatccttcgttaaaagggaagcccatggctgttggcagtatgtctatgatatccacagctaattatgaggttggaattgcctagactggagtttgagggataattatgaagtcctttcctttgtgttgtttaaacccaaaagttatgcaatagggtagaaagaacttgacatgactgtgttctcaagatgtatatcaataattaaaaggtaattcttggctcgcattgtaggctcggaagtttggagttcgagcggcaatgcctggttttattgctcgtaaattatgcccagagttaatttttgctcctacggatttcaaaaagtataattattacagtgacttaacgagaaaaggttaggcttttggcttgctcttcttctaggttgcatttgaattgaagatatttgtactagcgaccgattcttatttcactttttcctatttttcgagttagttttccagacgtatgatcctaatttcatggctgctggtttagatgaagcctaccttgatgtaacggaggcctgcaaagaaaggggtattactggtgaagaagtattaaacctttacttttgcttctttcttctttacatccttttttttcttttccatatttttactcttaaattgtctttcttgtttcaaagattgccaaagaaatcagaaccaacatatatgaagagactggtcttacatgtagtgctggagttgcagcaaaccgtctacttgcaaaggttgacaagctaataagctatttatcgaacaattagtactaaatttatttaagaatttaggtagtagacttgttgatattacttatgctgcccaaaatatttgcaatcatgttgaatgaatattttgtcccctcccccgtccccaaaaataatataaaatctatactcttttagaatttaaaattttgttactttatgtcatatatggtcttgtgggaaaaaaaaagaaccagctctgttctgtaagagcaataatctactgcaaacttgcaaattgacaataatttggttaatataaagtctttagaagttgcagtatatagtatcatgtgagttgaagggttttcttgccatgtaaggagtctttttttccattaagggagaggaagaactaagatgaggactattaaatcaaagaagttgaggatcttcttggaaataatgcaaattttataaagtagttaattataaatgactcaagtgtactgacaaattactagcaattgaaaatgatctgaactgacacatttgtttttactccatcctgctctatttccctttcctttttttttgtggcaatgaatacttctctgaaaattaatgctaattgttaattgcactgctaatgatcttgtttgcataaaactttccctatgttttcactttgcagatgtttcttttgaggaaatttcatttgtgtttcccttgacataatgcatgctgaatttcttttcatcacattggtgtcaataggtttgctctgatataaacaaaccaaatgggcagtttgttttaccaaataaccgggtggctgtgatgacatttatatcttcacttcccatacgaaaggtatagtgtaatgcaaattgtaattcacaagcagcttattttacatgttgttttagtcatttgtgtagtttacatcctgataaagagacatcatagtgaactttaaacacagattggaggaattgggaaagtcactgaacacattttaagggatgctttaggaatcagtacatgtgaggagatgttgcaaaaaggaagttatatctgtgccctattttctcaatctacagcaggttttcaccattgtcattccttttttactatgtctttacttcactcactatgtggaccatgaccatagcccttaaacactgcagatttttttctctctgtgggacttgggcttggagggacagatactcctgaagtcaggttgcgaaaaagtattagcaatgagagaacattttctgccacaggggatgaaacattgctttatcgcaaattaggtgattattgttttatgtctttcattttcatagtggggaattttttgtcatatgattcacgactcatacaagacatggacttgtggctcctttttagtggtttcagtttcattctttatcatgtttccacaatgtataatctggttcaaacctcttgaggtataagaggtatctaaatagaacttagaaggttacagactgatacattagcatcattatcattgatcattgatatagttttcgtaggaatctttatttctgactttgaagctttaagcctgaaaatttggctatagtgcctgttatagacccttgtgtgcatggccaatggacttgagaaaataatagtctaactagtacattcctcgcattggattattattatatttaaaatacactatcagtttctttgacaactaaaattgtaagccttattgttacagaggaactttcagaaatgttatcagctgacatgcaaaaagaaggtctttgtgggagaacattgactctcaaattgaaaacggcagcctttgaggtatatgcactgatttttcagcaggttgctttgtatcttactgatgtgattgttatgctatgaatattgatactagtttttaatctacagcttcgaacaagagctgtatctttgcaaaaacacatttgctcaagtgaagatattttaaagcatgcatcaaagctgctgaaggctgaatttcctatttcattaaggctaataggtgggcatgtacattgtttacactttacatgcatataatcatttacacatgtcgtttagtttgtatgcatgcacagcggtgatgttgggatgctaaggaccttgccttttatataactttagttttttcttgttgacaggcttgaggatatctcatttaaatatagagagggatggtgctcttcttgatcctacccagaaaactctgactaacttctttgtatcaggagatacttccggcaaagatgtaaatggccaaagaccctttggccatgacacaagtaattacttagtgaatgatgatcattctgattcttttattggcgaacatgagacacatcatacttatagtgatgcggattgcagtcgttcatcaatacttgacaatgataacagtactctcagcagtatttcagctcaaatggacaataatttatcaagtgatgttactgcatacaaggtatgtaagttgataaaataattgttttggttgggactgaaattgctaatgttatgtagtatttctttacttgcgaggacagtgttatacatgatgtgaacaatatgctaaatgaataaggtcttggatgtgatgtttagaaatagcttttgtatatcggttccatcattcacgagctgtacgttgtatgacaactccagtacaggctaataagtttcattcaacatgaagaactatattggggatggagtgtagaaactttttaagcagtgtgttctctgcaggttgagggcaccaattgcccaaacagagtgactaatggagtaaacttcacggcagctgaggctgaggtagtatcttcaatgggtcaaagagagttatttctatgggtaaatgattacaagtgctcaatatgcgggatagaaatgccaccggattttgttgaggaaagacaagagcactgtgattttcatttagccgagaagcttcagaaagaggaatctggcactgggtttagaagttctactttgaggcacaggttattatcattattttaaatatttcagaatttaaaatgatatttgttttctctattatgcataattatactagataacttctttttgtagttcttgacctcagttggaaatggtaataactattatagctttccacataaatttccagcttaacaaattgatatgcagtagtcatgcatatatagtcagtcatctagctgcatttcactagttttttagtaatgtgtgctcggctgatctatttttcattttttcctaacggaatcctctcagagatgaacaaaagggtcaaagttcaagccagagtcaacgcaagaagcgcaagttgtcgccgaaagaaggcagacatataccgatagatgtgttctttgtgaagagcaatcagaacttttaaaagtatgttctttttatttctgcttgtcctgtacatagttctgttctttgtcacctattatgtgattgtaatactatagtgcattcatgtataatgtatttaaaaaaaaaaaaacaacgcattagaaccctcaataattttcttaattatgtttttcatgttcatctagtgccaagtgaataagagtacatttatttgcttaaaataaaaataagaatatttggctgtagctttatctcccgaactcaagaacagtagaaaaatcaattatgattattagatgtgggaaattccggttatgcatctatgctatcgtagtagattttggccattagagcatctttaatgaagatgcaaataatacaaatacaaaatatagttcactttatcaaaattctacttcaatgatgtgttaaattgtgatgtaaatatctcacataaatttggatcacaatattacatgatgcaaaatttgcatcataataaatgctatgcttttatatttatcattatattatttttaatattttattattaaagtttaattaggatgctaatttgtattaaatgactttttttaattattattattattttattattgaattttatatttatttttgtattattattattattttatattgttaataaattattagatgagcattaaatgagatattaaattttgcatcatgatttataattatgcattggagcataatagtaaaagttgatgcaaaaatgtcacaaaatcatattttttgctaaatatagatcaatttttgtatttccggttagagatgatcttatattattagaaaaatataaaatatcaatggaagaataaaaatatgagattaagataattacaactctatgcaaaaaatttaaaggactaaaatgaattaaataaagtgttacaaatctaaaagctcaaaatacaaataaagagaataggaaaaagtagaagactgagttataactcaaaatattaacatacaaataactattatcctcgaacaatgacattgataaaatttttgctcacgaatcactttttttttttggtaaataatttcccttaaatattggaagtaattgtaaacttgtttgtcccttcaattgtatttcctttatttttgtaaataattttttttgatgaaatagtgaccagag

SEQ ID NO: 186332 - DNA, 1453 bp, Cannabis indica
cataaaataaaaatcaagagcattaccgtatgaaagagtcaccatcagcagaaatatcagtctcattgcgaccagggacagaatagtaaatcccctcgctgcctccatgaacaacgaaggcatttcctttggcggcgaatttgacagcggcgtagtcgtggaccgaagcttcgacacaaacgaagctcaaaacaacgagtagagccaaaacggacgacattgttgaaaagcgaagcacaggaaaccctattattgtacggaagattatggatctgaaacgatgagaagagattgagaggagtgtggtttgagaatgtgagatcttctataatctaatagaacttgcatattactactcttacttaacttcttactaatactaactagtcttattatgagctcaaggacaaaagagttggaaagaagagggagaggacaaggaggaggcagaggaattatcagctgcatcgcgtgacgtgtcgctactttaatcagagccgtttgttttgttgtaaatgatcataatgatgaagtgattaaatatacgaagtcaatgttgtcggtgttacaataacttgacgttaaaagagctgcactgtaaagaaagatagtaaagccaggccagctgctatcttcccttaattaattgttattattaattgtttattggaaaaaaatagagaaaaaaaagattatgtggtcaattagtcagtcgtgcatgttactttctacatatattcttactgatcaaacttaaattatgttaaaatgcttcttaatagaccaaaatgcttccaataatttcatctcttttttttttcttttaattttatttccctctcaatatttattttccaaaaaatcaaggtggagaaacaatgcatggcactatggcagtaaattgtaaattgagtaaatgaatataatactatcattacagagtttaccctatgattatttacagctttactaaaaaattaccaacaaagacaatttaatgcttgtttgcccaactcaccaaattagtaaatacaactgaaattaatatgcagtttgcagaagatgggggaacacatgagttggttggtcagaatttggaaatttataattgacattactaattaaaactactaatgaaaatatctgaaaaacgtacgtttataaacaaggccaaaactcaaaataggctgaaagagaagaaaagattcaatgactgaaatccatggataaatttaggaatgaatgtattgattcagaccaatattacacaaaagaaatttgaagaatggttcaacattgaagttataatttgaaaagtatttcacctctaacaactacagatcttcctaccaagcaaaagtagttaaagaagaaaaagaagaagacatggaaaagaaacacggccgctataatatttgcggacagaaatgtgaaccaactactcgagggtcat

SEQ ID NO: 186333 - DNA, 2844 bp, Cannabis indica
ataaatttgattatgtatttttcaaactatctcacaattgattgatacttgattagagaaaaaattcattatcgttgattcgatgaaggtcagtcgtccagaagaagtcattattgttagagtgagtgcccaaacaaaagcctcccaagcagttcttcctcacggtacatatttttaaactataaaaacataaaatctctaatggtgttgggcattcccatcccatgatgtgatatagcatcttcaaacaggccaagatcctatatgtgttagggatgagctgaagaggtgcaagtctaagataattacaaaaatccttgaaatactaatttaagggaaggatggccccaacgcttatatgtttgattctccaagtgcctattattgaagaaccacttgtgctgcaaccctccccttgttcttccattaaacgagttggggaaaagtagctgaacttgcctagttcaaccaaatgactccaacagcccttcttgttcttaatatcgtaggactttaaaaagggacccacgttggtaacaagtgacctaaccctaaactcaatcagttgagcctcgaattgaacagtaaggttttggggtaacttagacttacgttcttttggagacatgatctcaaaattaaattgacatggggaaaagcaacaataattttaggtaaaaataatagcctcactacaggatacacatgtaaactaaggagttttagccatgccgcatctcgcaagaaacagtgttttccattaacaatctcatcaataaaatgtctagagcgaatagaagtatcctctcaataaagtttttcgttaaacaacctaactttctcatcattagtttctaaaattattttcgaatgttcaggtcgtggccttaagggtaaagctagtaatttagatttttccattcaaataaaatatggaaattccaattttgaaccagaaatagacattcttttcttaaggaaaagaagatgtttataagggattctaaaattttggaaaataattaaattcagggaaaagaatttttaaaatttgaactacctaatcactttagaacaaaattcatacatgaaatttaaaaagaaacaatggaaaataaaaagaaaaagaatggaaaacaaaggcttaccagcttatgagtttctctgatagcgttgacagttactcatgggaaatctccggtaccaggggtttgggttttcacgggagcgtagttgagaaaaaatggtgttgattacaccaagaaaataagtcaaagacaaactgcgcatgcaagaaccttttgaataaaatgtggggggtttctctctagttttgtgtttcgaatgaagaagacaatggtaacaaccctatattgaaagatggagaaccattgatcaggtttcaaatttagatcaagcggccggggttcaatcttgataatacaaaaggtcagttgaaaagcacattagttgaaacaacgcacaattttatgatgaaataaactttctcaagagggtgaaaccgccaaagaaagtactcatttaaatgacacgtgtgtagcttctgtaaataaaccctttcagttccagattgagttttttagggggtaattgttatgctatatttcgagccataaatactaacatgacacgtggataattggacattaaaattagagaaaaatcattgtgtaataaatgagttgtctcgaagagataataaataacgagcaatatcagtcttgcattatgcattggcgatgagacagcaagataaacaatgtatggtgatatgataaagatagaagtaatatcgggtgtaacaaatcgaaactgtatcactaaaaagggtagataacgagttctttaagagcttgcaactcattgacctacacactcgtgagtatggaaataaaaaaagtgcaacttatcttagaatctctaaagactagtccaaaagttgtcgtgaaagtctatagcgaggataaatatcttaactagcgtctcgcagaatatgaccaactatttctgaacactgttacgagcaatagttggaatgtgttacctcgacaataaaagactatttcctgacaaaatcaaaaatcggttattaaacggttattttattttattcatatattgtaaatatgaaacctagggattatccacgttttatgagcagttacctagataagatcaaaagggaaataactggcatccctaaaaaacctataaatagggacagaatctaaagggaaagggatggattattttgaaaaggaaagaccttataagattgagtgaatattcatagtaattttcttgtaatctaaacatattaccagaaataatctaaacatattactcaaaaataatgactcgtggagtatgtagattttaactacaaaatcacgtaaaagttcttagtgtctaatatatatttattaattataaatagttagttgttaatttataaggcttcatttattgtcaacaaaaatctgagttaacagtttgaaatcattaattttaagaaataataaaataagtatatattaatttgcttttggtactactaatatatgtaaaatttatattctatttcatgtttattcattctctttatagaatgatatttaaatattctaaatgtacaataaatttgttatatattaaaatatgtgtacaattcacattctatcctatagtcaaatatatttttacctttattataaatgtgtttgttctacaggtatgtatgtgaccattttatttttttacacataaaatatttattccatgcactttgattatgtgtgtattttattttaattttaatttctt

SEQ ID NO: 186334 - DNA, 5962 bp, Cannabis indica
gagctgacacgaatggaacccggaagcctgacgcctctatagccagcaaaggccaccttaggtaagtttccagtgcattttatgatatgaataggttagatatattcccggttgcacacttaaactacacattgtaatgtgtaattaatcttaactatagaaatcttagtatgaaccacgtcatatttaattgtacttttgagattacttacaaatcatagtgtgtaagtgtacatattaggagtaatcatactctaattatgcatttttgcttattgcaagaatttaaattaaatttggttgtgtttcttctcggttcttgcagttgtaattaatttttcacttgttctaattatccaatttccaagatgctatttgctacattagacaagcttgtgcatattctgtgaaaaaaaatgtaaaatttgtttccacatggaatgattttaaggtgtgttttgaaatggatcttggctatcttcatatgtgaaacgtgttgttgtgcacagaaggaaacaaataagaagtctcctgatctgtctctttttaagaaaacataccaggacaccagttaaatcaatttaaccttgaaccctgttgtattgatgtgaactcgatagttcttactacttatgagttttatgtttgcaattaatctattttgagcataagatgcaattttctttgcaaaacataatgtctatttactgatgttttattcctcccaaatttaacttggcagtgtatccgatttgcttgattacattaatccaaatcatgatgggaaaggcagggatgtggttgccaggaggaaaaacaactttaaggtacaatattatttttaatattttatttttccttttctattttattttaagtgtgggcaagtgtttaatcatattgccaaaatgtctatccatggcaccacacctaaatgtaataaatgcaagaaccgtattaaggatcctctaattttaaaaggagaccaacctggcactttattgctgccaaggtaagaaaggtaaccttttctcaatgagggtcaaaatttttaatactaaaaaaggctttgggagtaggctttctaattatgttcatgccattgattcattcttgtttttgcatctgcatcctctgctttgtctcaagttaatgcttttcatctacaatttatttatacttatttcaaatttcccttccagttgaaaggaaagtcttaccaaactgtcagcacagcaagttctgatgagtctccgaaagaaacaccaaaagagacttcagatgaagagacacctattattgaaccactaattgacccagatgtcagccaggagaccacgtctgcacctgttgagcctcagctatctgtttcagaggaggctactgtcgaaaagccaaatgtttccaccgaggcatcttctgatgatcttgctgaaggagaaggatggcaatcagttcaaaggcctagatcagctaactcatatgggcgacgtcttaagcagaggcgggcaactattggcaaagttcttacttaccagaagaaatatgtggacaatgagattgagtatcctgtagcaaagaataatgttcagaatagtaggtattaccttttaaagaaaaggacaatgtctcatggaggttatacagatcagcatactgtcaatccctcccagggtactaggtatggtcggagaatagtgaaggctgtagcctacagggtcaagtcaatgccttcatcaactaaaccagctacaccagacacgtctagaaatagtggctcgggtttgggttcgccagtagaacctgaccgaaatgcttcactaaatgagaccaatagcctgaaaaatcctatagtcagtcttggaaaatctccttcatacaaggaagtagctttggctccaccaggtagtattgcaaagatgcaagttgggatgccccaaaatgttcaagaaaaccttgaacgtgatgttgaaaaacatgaagaggaaacaaacgaaaccattagaaatgttgatccaatagttacaggtgtagaaaatatacttgaagagaagaatgataattcttcacatcgtttaccagaggaaacaaaagttgttataacagaagatcagactcattcaactaattcaatcgatgaaaactcttctttgagagtgtttgagagcctggatggacttcgacgcagcagcgttaaagttcgtgaagtggtggaagatagtgttctcattgatgggttgcaaacttcttttgctgtgccagaagtgggactgtgtgagaagaacccgtccagcagttttgaactccaggttaattcaaacccaactttccagcaacagaggagttgagggacaaatcttctgctgtaaattcagttgatacacgcacactttacaaataagaagttgtcagcatctgcagctcctttcaacccttcaccaggcattgcacgtgctgctcctgtttccatgaacattactcttcctgttggtcctggtggtgttccaactattgctccctggccagtaaacatgaatcttcacccagggcctgtcatatcccctgtgaatccaatgtgctcctctcctcatcatccattcccatctcctccaacaaccccaaacatgatgcagccattgccctttatgtaccctccttttactcaaccacaaagcagtaccttcccggtaacaagcagtgcgtttcatcccaaccatttcccatggcaatgcaatatgaacctgaatgtaccagaatttgttactggtccagtttggcatcctgtggagttctctgttccgacacctgttgttgagccaattactgatcctgtattggagccaagagtacagcctggtgattctgctccaatgttgccagtagacattgacaatatggtggaggttaagagagaagtgaatcttcaagcatcagaggcagtgggtaacatgaatgtagttgggtctgagaatgtaaaggaaaatggtcttcaaaagctggtaggacctgaaaatgctgaaaatgaaccaaataacatcagtaatggaaaacctggaagcagtgatgtaagcaagatggatggtgaaaaaaccttcagtattttgattagagggaaaagaaaccgtaagcagactctaagaatgcctgttagtttactcagtcgaccatatggctcacagtccttcaaagttatatacaatagagtagtcagagggagtgatcctcccaagtcaaccagcttttctccaactgaagaatgcacagccagtgctacgtagcccctttgccattcttgccatcctggtataacagtctatgaaagaagagagaaattaaaaccttttatcatatgcataacagggacagcacaggaccggatcttctttggctttcatattcaaaacgtctaaactttgttcttgcaaaaattcaggttagtgtctaattcaacattgttgggagtttttattactgtagtgcaatctttttcccgtttagttgtatttccatcattccatggtcaatttaagaacaatagcacctataaatttgctagcgaatgcatctaaaaaatcatgctgactgatcaaaggggtttcaactgattcgcagattcacaaatggaaaattcacttttggacttccacgagccttcttgaggttacaattttggctttcattgaataataggaaaatttgctattttggaccacaacatttaatacttgaattagttttctttctttcttttccctcttttcatagcagtgacttttcgtaatattattttgtatacgacctcaaattttgcctttttagtttttgttttttgtggtttggacaggcaaacgatattttatcgatcaagtttgccaatatcttatctgctttattttctttttgaattgttggcaatgcaaaataagctgttaccgatgagacccatatgtgtaccttctgtacaattacaaactcctggatacaatatttgatgttgcatctatacgatacaggaatacaaacaaaagtgcaaaatgagatatttcaatcacctttctcatttcaaatcttagcaatagtttaatcactctatctcaactgtttcttagtttcattgggttgtaactgatatgaatgcaaaacgacgaagattatatttatctttgcattttattagtaatctttgttagttggcatggataaatattgatcctgatgtcgaagatgacgagactcttattattgttgaaggactattattgacgaggggcttataattaaagatggtcatgttatcggagaaattttaattgtaaaaagatgttatttaaaatgatgatcaacaaataaaagttattcaaagtactttctctaaggaaatttcagtggcaaaaaaagtcaacatagtaaccaatataaaaaatcagatgaaagggttttgtttcctctctccatatattgaatcactaatttcttgggtaattgaagatcctataatttggtggcctggaacttcttgtggtatttgagcttgaacatgttgggttgggtaccaactagcacgagccaatatgagtaccactgtgtggtgatgagataaaaggcgctttcgtaggcttctttctcttgtcaaattttgctaataaccaatattctagtgttacgattaatattcctaattttcttttaatcaagtcaagttaatgcttaaacaaaaaagattttatttcatttatttagataaagtctctggttcattgccttagacaaacgtaataaatacattcacataattaaaggcaggtacctgacatttttgacataatttagcataattcgataataaacaaaaagcaacaaattgatcatttacaaacagctagtaataatgacaatcacctaatggcctatgcctactatatatgatctccaacaagggaaacaaacaagcaaaaagaacattccaatttaacagacaccccttctcactatagtttccattccctttatatatacatggcagtgtgaagaccagtataaaatttcattcaccatttgacacttgtctaattcatcaaaaaagggctttatttaggcaatctaaagatatgttcttcaccacttttctcatcaaactcaacaacccatttgctctttttaccacttttcttaacacaaccacctcttttaccaatcccaaaagaagaagcataattattattaccacagccactacaacttcctgatctcttcctactaatctcatccatattattagtggtcccaatcatggtaacttccatgccttttccaatagggtgcttcacagatctcacagcaactttgtcctccaacattcccctgacacggccttccaaacctttcctttcacttgccaagttattagccacaatcactgatcttcgagggttcacatctagctgattcagcagccttgtgtagtcctcgttcttacaatcaacaagtgagaaatcaatgttttcgtagcttgacaagagctcataagggtcaccagttttgaactctacaacgtgccttaaacccgattctttgatgactttcttagactcggccagaactggctctggtagaatgcacactagtcttcctcctgtttgtcttgctgcggctgctaaggctagtgtcgatggtgaagccgttgatgtcacttccactatcagtttggctctcattccggctgccaaggccgacacaaattcgttacttccaagctcttgtgtcttccatgactcgactcgtctcttgtgatcattacactgtacatacacaacgaaattgttcaatttttattagataagtaccaacaaaatcaagagagaattctacattctaagtctaggctgtgtaaacatgacatatcactactgcaatttaataatataatgagatccaagattcattaaccatatagggtgttgca

SEQ ID NO: 186335 - DNA, 4135 bp, Cannabis indica
acacatgcatatacacttgttagtattctcacacactacaacccaaaagaaaaaaaaaaaaaaaaaagagtggattagactaagtcaatggagtggccttagatcaagatatgcttatctgggtattgtggtagttggcaaatacattaatgggggacccacgattttcgttcttcacattgtggcgcacgttagcatgtacttcgttaacgtgcgcggttttctaacacctttggttttaggttctgtattccatggatggagtggggtgagtgtgagatagagaaatgtttgattaatgattatgaaacgttgtcgtattgatgttggtttgttttgttttgtttaggtgggaaatttcatacactatctgtcaacttttctggctggactggtggttggttttgtctcagcatggcggctagctctgctgagtgtggcggtgattcccggcattgcctttgccggaggattgtatgcctatacgctcaccggtttaacctccaaaagtcgacagtcttacgccaacgccggagttatcgccgagcaagtgagtctcaactttggttttaccaaaacacaatctttcatttggtgtcgttttgttttgctgtgttttgttacttttgatattcggtttttcgaaattttgtgcagtaatttatctgtgtgtgaaatgatgagttttgacatgtgaaaccaaccacgcatgaaatgaaagttgtttttgttttgttccactaaactagcctctcttcctttcaatctttttgtttttttattttttggttaaggaatataatataagataatatagaaagaagaaaacttcacaagtgtacgaatggtttactgtttgggaaaatgacaatgatgattgtggtttaagcaaaacgactatttccttagttggatttggactcttttggcctaccctgaaagaattcaaatagtttaacttgacaactttcattctcttgttggtgatatcccatgtgccctgttagccaagttagttgtttttgtaccctattagaaataatctcacattgctaatgcttgaaaaaatagtaccatatataaaatgaatgagctacttctccagttgccaagttataattggacggttttcttattttgtttaggctattgcacaagtacggacagtctactcatatgtcggcgaaaccaaggccctcaattcctattccgacgccattcaaaatacattgaagctcggttacaaggctggaatggctaaaggtttgggattaggatgtacctatggtatcgcttgcatgtcatgggcccttgttttctggtatgcgggcgtgttcatcagaaatggccagagtgatggaggaaaagctttcactgcaatattctctgctattgttggtggcatgtaagaattcaagcttaggtttttatacatttgcattttcggtttgataaactgtcgattagcttactataataaatctaacaggagcttgggtcagtcattctcgaacctcggggcattcagcaaaggtaaaacagctggatacaagttgatggagattatcaaccaaaagccaaccataactcaagatacattagatggaaaatgcttggatgaggttaatggcaatatagaattcaaggaagtgtctttcagctacccatcaaggccagatgttttcatttttcgaaacttttcgatcttcttccctgctgggaagactgttgctgttgttggtggaagtggatcaggaaagagtactgtcgtgtctctcatcgaaagattctacgatcctaatcagggtaatgaagaaattaatcaattatgctgttgtggataaatcataaatgatggtggtacttattttaacttgttgtattgatgttttgtgttgggtgagcaggacaggttttgctggataatgtagacataaaaacgttgcaattgaaatggttacgcgatcagattgggctggtgaaccaagagcctgcactatttgcaaccaccattttggaaaatatactctatggaaagcctgatgcaacaatggctgaagttgaagctgcaacttgtgcagcaaatgctcatagtttcattactttgcttcctaatggttacaacactcaggcaagtattcgatataaaccttaaaacagttgtatcgttgtaggagtgaatgttaatcctgtgtactttttatttcgaaaaccaggtgggagagcgaggggtccaactctctggtggccaaaaacagagaatcgccatagcaagagctatgttgaaagatcccaaaatccttctcctcgatgaagcaaccagcgcgcttgatgcagggtcagagagcattgtccaagaggctctagacaggctcatgatcggaagaacaaccgtagttgttgctcatagattatccaccataagaaatgtcgatagtattgctgttatacaacaaggacttgttgtcgagacaggaacacatgaagaactaatctctaaagccggtgcctacgcttccttaattcgattccaagaaatggttagaaacaaggatttttcgaacccttctacacgtagatcacgatcatcaagactaagccattcgctgtccacaaaatcattgagtcttcgatcaggcagcttacgaaacctcagctactcatacagcactggtgctgatgggcgtatagagatgatttcaaatgctgagacagaacggaaaaaccctgctcctcaaggctatttcttccgccttctcacactaaatgcccccgaatggccttactccattatgggagccgtaggctctgtgttatcgggtttcattggcccaactttcgccattgtaatgagcaacatgattgaggttttctactacacaaattccgcctccatggagagaaagacaaaggaatatgtgttcatctatatcggtgcagggctttatgctgtggttgcatacttgatacaacattacttcttcagcattatgggagaaaatctcactacaagagttagaaggatgatgcttgcaggtataaaatattacacaaattgccaatttttgttctgataataacatatctcttatgattttgattttggttttttttttgttttagccatattgagaaatgaagttgggtggtttgatgaagaggaacataactcaagccttgtagcagctcgtttggctacagatgctgctgatgtgaaatcagccattgctgaaagaatatctgtaatacttcaaaacatgacatcactcctcacatctttcattgtcgctttcatagttgaatggagagtctctcttctcattctagctacatttccacttcttgtccttgccaactttgcccaggtaagctcactaccattatttctttttcattttctctctttttaatgtatggatgagtctattacacacaacaaagccttggtgcttttgaaaaatacaaactttattttctttatattatattattggttaaatgagctgaccaaaatgtccagcaaaggcatatggactagtgtcagttactcatatacataatatatatatgtatgtatatttcccctacgtgtgtcagttgttgcatctgcctttatagtctacttctttggaatctaaccctcaccacatctttagcattagtaaaacgacaaaagctctcaatcaaacgtggcaaatgtacttttgctctgcacgtgctttcttccggttcaagtgcattaaactcttcgagaatagccacttccaatattatattacattactataatcttttcttaaatcacagcaaagaaaaaaagaagaatattgaaagattcgatgaccctctccactcatcaacttccataagtctccaatgtctttctttatttttctttttcctttttgtgggcacttgttcttgttgattatacctcgagtttactacccttttcatgattttttcttaaataatcagattcagtcaaactagagtctatctgggtgggtttaacctcctcttcttctagttatggcccaatcacagttcattttagttctgtgttaacattggtattcaacaccttacgaatagacaacgatattctataatagttaccaaactatattatatg

SEQ ID NO: 186336 - DNA, 3281 bp, Cannabis indica
aagtaacaagaaaattatatcaaaacaacaacaaagtaacataagaaataatatacaaataacaaaaaaccaacaataaaataataagaatacaacataaaaatataccaaaagaccatgttttatgtaataaaatctaaaaaatcgtaaaaatattaaaaattccgtacaaactgtatttttgtaattcttttgttatttttgttgtttttttttttttttgaaattattcctaaagaaatcaacaagttggtgagaatttttattataattagtgattgtttgaagaaagaatacattaagtcttataagaagagtgagagaatggagaattgtttttttaatggaataatcaactttattaaccaacaacttcgactatcaaataaggtagcaaatcagttggaacatactccaaactgaaatgacgatcagatataacatagcagcttttgcgaaattatgagccactatattaacagatcatttaacgaaagaaacagaaacactcttaagacctgctaacaaatttttacaatcatgataccaaataaagataccatagacaaggggctatgcaaggcttgaacaacacacaagcaatcagtttccaccttcatctgttgtacatttaaaacctttacccaattaagagcttccctaactccgatagctttggctagggtgggttccactttaccatgggagaaaatggtacaaccttcaatcagtatacatttggcatctcttgcaactaggcccaaatcgtaactatgacctccctcaaacaaagctgcattcacattaatcttgatactgttttcttttggtaaggtccaatgctcttttccatcacccaactgaagctcaacttgtgatgcatccatatcagatttttgagccttcttccaattatcaagataagttttagcaaatacaataatgttctgaaattttacctccttcacgttccaaataagatcgttccttgcactctaaattgcccaacagatagttgccaaggtaaatttcagatcaatatttaaactttgaaacactgcattgcaccagtcgaaaaaagatgcactagctgttacttttgtgccaatccctactcaattttagcatgttttaatcactctacaagtgaccaaacaatgtaggatggtctcctcatgttctcggcaaacagggcaaaaaatcgagacatcaacacgtttagatcacagttgagttagcgttggcagatagttcaatctagcgcaccaaaccaaattagagacttttggtggtaattgtaagctccaaagcttgttccaaaatgtagaaacctcgtcatcgaaccatttactttttttttttttggagcagcggataagcactcttaacggagtacaaacctgaagtttctttgcaccagaacaagtgatccatagttgctgaaatttgtaagggaatgttgagtattagtcgctagcctcttgctgtgaacaagtcggctataagctcactgtcccaacacgaaccatccattaatatcacgttcgaaacagatgcattgactaaattagctggagggatagattcgatcaagggatttccatcatcaagcaggcatgactcctccaaaactggaatagatacgctattaccaacacactaacgagctccacttttcactaggtcctgagattcaagaatactacgccaaacaaaactcggattggaaccaatctgggctgataagaaagtaccatttggatagtatcttgctttgaaaagttttgacactaaggaatctggctctgttaagagtctccatccctgtttccctagaagagcaaggttgaaatcgtgtaggtcgcaaaaccccatgtcgccaccctttttgtgtttacatagtttgtcccaagacatccaataatccccttacgatcacccttagactgccaccagaacattgtcattagcttctcaatatctctacctatatccaaaggaagtactagaaacacactcatgacatagctaggcagcacttggaccacaaatttcataagaacctcctttccagcacgcaaaagaaacttactttcccaacttagaaggtgcttacgaactttagtcttgaggtaacccaacaccgttgttttattgcgattcatagtgctagctaggcagccctaagtaaaagctatccccgatcgcgacactcaaccttaggagggaacaaaggtggctaaaaactagtgactccgtactggtactgaaaaagatcgaggacttagtaaagtttacttgttgccctgaagccatctcaaatttttgaagcagctcttgaattttaattgcctcttcaaccgtggccttgcaatagagataattgtcgtctgccaagagcatgtgagaaacacgaggtgccccgttggccgcttcgcaaccatgaattcatccattattctcatacttacaaagaattactgaaaggccttccgcacaaaagttgaaaagataaggtgaaaggagatcgttttatctaatacctcgagttggagtaagagggcccaaaacatatctcccatggataatcatatatttagttgaggaaacacaactcatgataagactaatccatctttccatgaaccccaacttctgaagaatagtttctaagaaagttaatacgatcatacccagaaaatggagaatgttaatgcaagtgttcaagactaattcaaagagattatgagctcaatatatgtttactctcattgattgtttgaattgtaaagtttagagatattgcggcaaagtcgagatcgtaagatactgactcaaaatttttaatatatttataaagtttaaatttgggtataattattattttgtgtgaagaggagctgtgttggtgaccaattcatagtatcctaatgcttttgaactctaaatatgtagaatttttgtgtgtaagtgtgagagaaaaagagtgggttttgaagtgacgagtgaaagggaatgtgaagtgtatagagtgtgagagtaagcttgaagagttatgaacatatgacgttttggaatttaggtgtgagatttagtcaaatttgaatttataaacaaaatagattattgtaaaagtaatttttttgattttttattatataatatgctgcccttgaggtttgcttattaattttttccaggaagaaatgccaaaaaggcattttaaaatattaccacaaaagtgtcgtatcactataaatgtattttaatattaattttta

SEQ ID NO: 186337 - DNA, 4073 bp, Cannabis indica
gatcgaagtagagctaaaaaaaaagagcaactaaaaatctaaaaaaacttatccaagaaccaaaacagtcaaaaaaaaaaaagtcacttgtgattcaggaatagtaagccaaaaaataaaaagtgtcacaaaaaaaatactgatccaaaaagtagagcaaaagagccacttatgatcaaggatattgagccaaaaaaaaagctgcttatgatcgtgttgtccaagatggtaagcatataaattagccatcatcttgagaggatgttagagagtcacattgctaatgtgtagaaagataatagaatatataagagaaatggactactcctcctattgccaattggtttcagatggaagctcattcagcttatcccaaattctaaaaatttctaaatttagatcttgataaaacaagttcgagcctcttaaaatcgcttgtgttcatctttatgcttttatgttcttgtactgtttgattaattatttttgttcaatctgtgtagtgttgtgttttgtttgtgtgtgtgaagattggttcgagaataaagttgaccaccattgtcaatatgtccgagtgtggctaatgaggggaaaaaaattatatgaaaattttcaaaaccatatattcttacacaagaaggcatggagcaagaaatctaattaaagagcaaataagaagaataaaataaaagtgggcgatatacataattttttgatgaagatgatcaatcaatatatcaatcccatatcataacaacagcaataactccaaccccagaaagcacagagagaaacttgaagaaaggagtgtcaaaataattaggggattctggtctaaagcctttggcaataagatggtttatggcaacatagacaaaaactccacaagccaaccccatggagatggcatatgtccaatctgcggcagctccttcagtggtggcatcaatggcaatgcctatgcctactccgatgggactcgaaatggcgaatgcaaaggagtaagccaccgtcagcagtagtggcctctttggtagcatcttcagcagtgctatgcccatggctacggctgcaaatattttgtgtagtgatattgtccacaaattcctccatgcatctcccttagtatctggcccacaccaaataatttatataagatcatgaaggagggaaatcttacattaaggactaagtaaagtcaatctcatcaacttaaatgataataatgcaaaagtagtagttgtcgtatgaaaaagaaaaggaccaatttgtatgaataaacaaaacttttttatttatttataatttttgacagccaaccaagaagtagggacaaactaatgaatgacaatcaggccatttggggtgatgtaacacattacatatagtattattgacacttggaaagagataagctcaaatcaattatattggttgagaaacgatcctatagagtagttacttagaaggttattaatctatttgaaaaatctacaaatatatatatttagttgatcgggatttaagttattttacaattatcacttgactagtccatacataaaagaacaaaactaatcagcaatcttggttttcacttttcaattaaatagacatatatcaaatgactatacaattaagaataaataattaaatatgattacttaattacctgcaattccaacggcaataccctcaaaaacagagtgaaaacagagagcaaggatgagaagtatggtgtctcctaacgacgtcgttttcaggaaagcagtgttgacttcttccaagtcaacatgatcatgatcatccttattaacagcagcttgctccggagtcctccttcgtccttcttcaatttctactttagcttctctctgattagactttgtaacaaaatgaatgatactatctccaaacatggtcaaaagataaccagccgaagccaacatgaacgcaaaagggtacgttttcggggtgaggtctccaaacgtttcatttgaatcgctcaagaaatgcattagggatgtccctaggaaaaccccacctgcaaattgtgttcccaacagaagaaagctctcattccaccggaaaaagtaaggcgatacaccacctgcaaaggtggtcaccagaagaattatcaagcaccatattttcaccaagaccaaccccttggagtgcaagttatgagcgtgatcaccagcagcgtcatcatcatcgtctccaccaccaccatgaccgttgactatgaatacttgaagcaacagaatcagtgaaatgaatagagatgttgacttgagagtgctcatggtggaaggagtgggaaccattgatgatgattaatgtgttatgaggtcttcttgtgattatcgatagtttatttatgtggtttaaattagttaagtctgttagttgattgagggtacaatcttccatttcctctttgcagtacaagtttgacttttcacaagtttagtatgtgtactgcacaaaccagtttagagaagaaaaagcttattaatcagcttacgttgctttcaatacaaaatatatttgtttagcagataaacatccgtgtgtgcatatattatataatcaattgaaaaggactattagccaatacagttaaatgtttgcctaaattagtgttataaataaattaaaattaatgataaatagaatatcctgtgttctaaaatgcctgaagcaatatggctggcaagcggcaaaccaaactctccaatcaatcaacacatcgaattacacgatcagaaagattctcattttttcaatccacaattattaaaacaaatatagtaacaattacgagaagaccatattaacttgaggctatacacatttacacacaggacacgtataacttgattcagtggttatacaaatgacaattggatagataataaaaatgatcattaaaccatatctaacccatcagactcgctctccctgctgctttcgtcccatcctgaccccactctgtatttacacacagggcacgtgccttgttgacgtaaccaagggtcaatgcaactggtatggaactgcacaagataaagattactactatttaaaacaaacccaactcaaaattaatcaaggtttttaatataaggacaagtaagattattgctataaacgcaggtaaaaatctgccgttcattttttaattgatttttttgacgcagtcgcataagatataattgcagtaaaatagtctatttaactagctgaaactagtaaaatcgaatttattgtttctaatataacgaatgcagatagtagatactcatttctataatttgtcattaaactactatgtgtacaactgtgcatatattctctggagtcatattgtcccacattagtagtgttaaatcaaacaatatgcaacaaaagaaaatgattcgagaagaaattttgccacacaaaaacttttcaagaattatagttctgggaggaaaaataaagctatttttcgtccttatttaatatgaaaaacaatgtagataaatgtgggatgaacctgatgcaaacacggcaagctgcgaatgagctcccctctgctgacttgctccaagcaaatgctacatgtcaattcattttctgaagccttcaatttcccatcttcctttcgggtgtcctgctattcagtttacaagagcagtgtatgaagtagtaaaagaaaaaaggggaaagacacagtaatgagtatgtgtgatagtttcgctacaccatctactccaaacaaagaggccaaaggttcaaaatattaaagagtgctgaatcaaggtttcaactaaatatctcatgtagactgtattttatgttgtgtctgcaaaaggacaagtaggagggtgcacaagttgaatcaatcaattggtaggagattaggacaagtttaggttagtttatttagtcatgcaacagtctacaattattatgccaagccacatttgacaataagtatcatgtgttttgtacgagctagagctactgctggggtacatgttatatgtgggactcttcattttcgttttcttttttcttttcttttt

SEQ ID NO: 186338 - DNA, 4993 bp, Cannabis indica
tgccttgtagcaattccttagaacaaaaaataaaaaaaaactgttaccaattttacatgaaacttccgagccacgaatagagaatattcttttcatccttttggtttttagtaaaggaacagtgtctaaggtggttattgttaaaggttcaaaaacttcaactttcacaatttaagctaaatttcaaagaattaaacaaggttttttctcccctaactatgatcatgatagagttctgttctctaatttttatttatttgtagcgaaaatttctaaaccaaataaattgttgcaactatccctttagttacatttcgtacaattttaaaaaataattagcccatgtgatcatgagttaccaatataattacaatacaagaatttatttaacttaaaactacggaaaattcacattaaataacttaaagaaaatattcacaacaatttttataattcaaaacaaatttttgtaaaataaataaataaaaaaacaaaactcgacaaaaatcataatttagagacaaatcttacttatttaatttcaggaacatccgatgagatcaagagagattggactgaactgaattcataattcatgactaaagcatgcaattttttctttttaaaataataataagtaattctacatcaaaattcaagtacaacaccagccaacaacctcaaatcagcgaacaaaatatgaaagaagcaaaaaaatgaaaagaaaaaagtaacggcaaaaatgcatggctgaatctgcccggagaggcaaaaatattgcactcttcactgagtcaggactaaaattacaaatacaaaacatcaaaaacttgccagggcaagtaccattattccaaaatgatgagaactagaaaagaaatgaagcaacaaaaacttctgtagtcttattaggatgctgacattcatttcagcattgcacacaaaatttggagggcctctccttgattcatgtcacaaggacttaaatccacaagtgttctcttcgatactcgcgaacaatgacaggcacgctagttggtggcacctgacagaacaaagtgaaaagagaaattatcatttgtgtcgataagacataagtgctaaatctagttgccaaataggtctatgcaaacattaaacattgtcagtgtgggtgaacaaaagatatgccagtatgaaactgtgtctattcaagagtgaacaccagagtcttgacaacatttcctcgtccagagtctaacagatgaatagaaaatactcaaattttcaacaatctttaccatgccatagtctgtgatgatcattgatatgtaatctgaaggtgtggcatcatatctgccaatcaaaatttaacagggccaattagccaacagtataaaaacaaacatttgcgacactgcattactagaatcatcaatacttacatcagattcagatgttgtaatttttcactctttgcacagtcgtccagaccaatggtttcctctctaccaggaaccttggagatggcatctggatcacctgcaagaatcggaacagataaaactaagcccctcaaacacagcagaatgagaagcccatttgagatcaactattggtagaaatgcataccgagctcattagagcatatagaatcaagctgaaccctttcgtgaaatttatacgcctcgcaacacactaaaacaggtacacgaaatgcatgagcaaccatagcaacgcatgcagtcccgactctggagtatactgttccattacataatactgatgatgcacccaggaaaacacgagtaacttcatgcatgatatatgatacagcatttatattagtgtaagtgcagttaagacccttttccaccaacctacgaagtaagagttggccttctagttttggacgagagtccactactacaactctgaactgtctcccaagctcatgagcatgttgtagtatcatttcaactgcagacgaggagccatatgtgagaagaatgtcaccatctctgattttggtaacagcatgtttgacgatcaccttatcagccagaatgattttctcacttatgaaacgatcaatatctgactgaagtaatgtttttgcttctgactcagagagggtaagaggtaatttggcgataaggcttttaagaaacctaattgcatttcccatgctgatggacaagggcctgcactcaataagaaatgatacataactacttatttttgcggtcaaatcccgattaagattcttttcaggaggtgtggaatagtctttgattgcctcttgaaatgcttccagcattgcaatacatcgagcattgccaccagaaatatctcctgatagatattgcaacccaacctggcaccaaaacggaaggctgccttagaccaatgtaataataaaatttcataatgaatgatcgcaaagataagacctaataacaaagaatcttaacttcatctagcagaaaggcaataccaccaactacctcatatcatagacaatttatattcattatttaagaatgcatcattaagtgcaaggaatgacatttgtatacataccttgtatacagcaggatgcacggggtcaagttggaagaactttgattcaagatcaggaagctgagttccatgttcatattgaggcaaatgcctgaacaactcaactctgttagtagcctcagtttggtttaccattgcacgtctttttgccttttcgacccggctcttgtcatcatactgcatgcgtggttgaggcacatctttcttcctatccttttctagctgacgatcaccaaccttcttctcagtggctgcaactgaaacattgtcattcttttgtgaaggggcctttgtggctttagctggtttcacattcaccgccgaagcagcagcaggtgtcttacccccatcagctaatgatgaaaagaaaacacaagctattcaatgacttgtaaaatgattcaatcaaatactaaataaactttaaaaagcgtgatgaataagcacaaatgtcagttgcacctttagcagcagcttttgcagctcgttgggcctcttgaatggcacgcctttcagcttttgtgcttttctcttttgctggctttgaattcagaggtctgtcattttgcaaaccacctgatgctcctccaactttttctgcatttattggttcatgaattgtgttattttaaactcttacaaacacaagactcccctatgtttgtgaacaataagaaattctcatcttattcacaagattcttacaggcatatagactctctgaagcacaaacatggtatccaatttccctatattttactaacaggaagaagaacacacagtcatctctgggttttccctgctaattgcaaactaaatgttacatcaaagtctcctatgctctcatacctatttctacaaatctccataatcattcaagaaaagtaaaagacttgacaactccatggtcagtctatgaattgccctctcaataactaaaaccagtaatcaataaacaatccatttcttacaaccccataaatttgtcctcttttctagctttttcatacttatgaactaataataagaaaaaggaagcatgaacatttcttgtatctaaagaaatttatcatcatatcgctatattttaccctttgatttgacaattttagtatccaaaggaaagaaaaaatggcttgagtaggctgaaaagtagggaaacccagtagagactatttccaccaaaagcttctcacactttatttaccaaacaccctaaacctaataattcaaagcaacacaatccccaaaaagaaattcagtaaatttaattaaagaaatcatttaaaaaaaaaaaagcataggagaggaataccaggtggtaacttgtcgacggtggacactgttgtcaactcactcgccgggacgctactcgacctaagtgccgccagatcgaatcctccacttggtaagaagaagcagcagacgccctaactgagctacccctgacagctcggccaggcgacgaaatgacgtcgtcggagaactcgccgtagctcaatccaaccctaccggcgaaagaagaagacgccgtcggagacatagtagaggggaagaaatccgacgggttatagctgctgccagcggcgatggattctcggcggagaggggaagtgggatttgggactaacggaaccgtacggttgtcactagtgtgacgcggcggagggatcatgaccggagaaagtgagttaccggagggggagatttcggctactggaggagaagaaggggaagataaaatgggttcggactgactggaattggttctgtcgggtggggcgaaaaaccctacttggcgaatctttggatcgatcacagtacgcggagcccggcgagaatccattagtagaaaatgggttgggtatttgaaaagatttaatacactttttaggggtcggaaggaatgaggactgttagtccctcctccattcgagaatcgaaactccctttctaagaaactgattggctgggaagaaaattctaaagttccattacggattttcccggaatattttagctggagagagaaagtacaaaacttaaagaaccagactctggatttttttttttttttaaaaaaaaaaagattattctattattttttttgtttttatttttgagaaactaattagattaatcaatctttactggccaaaactaagatcaaatcctcaatctcagcttctatgtacaaatactaatttagtgataaagaagaaagagtactgaaattattaatattattattatttacctaataataattttcaaacaaaacaaataaaggatttttttaatttaaatggttatagttataaatctcagacttttatgaacataatactaaactaatggatggagaagaagagaattccatctagtatatattatacaaagtgtatactgtagatatttaataaattttgtg

SEQ ID NO: 186339 - DNA, 4392 bp, Cannabis indica
ccaaagaactgtggcaagagttaaggctacttcatctatgtgaggaatatcaaacagaaagatctcaagttaaaaagtatattgaatttaagatggtagaggatagatctatcttggaacaagttcatgaaattaatagaatagctgattcaattgttgctgctggtatgactgttgaggagaaatttcatgttagcgtgatcatctccaagcttccgccatcttggaaggacatcagtgtgaagctgatgtgtgaggagtatctgcctttttggatgttgatgaatcgtttgggtgttgaagaagatttacgaaaccagcacaagcgaaaatcgcccactccggcaggctacggtctacctgaaagaaatgtacaaatgatgagacacccaaaaccatacaatttacatccaaagaagcgaaatttggagaaagataacaaattttgtcacaattgcggtaaaaaggggcatcttttacaaaattgctacaataagacatggaggcgtgacaaggagttcattgagaagaaaaacgagaataatggatctttgtctgccaatacagaggtcaacatggttaatgggacagcaactacctaattatctataagactaagttatgtttttctttactgtgaagtagaggcaaaatgctatttcaattagtgcctctgccttactgattattgatttgcccttgtgcagaatttctaactcattttttacctcgttatgattctttcaaactgtctcaacaactcagtctctctctctctctctcacacactttaagtccctaaaatccaggttactaatggacgggtattagcaattcatgcatatacattactaataacctattttcttgtatatcttaaatgggatctttatcaggtgttgtgagttggggatgttgagaaccttgcttctgatgaataggaagttgaaaatgatgacttcaatgctactggggctcctcttcttccacactctcttctaagagcctctggttagttcttataacttactcagccagttgcggttatgaaactcctgccttcggagctgaaacacaacgaaaatccaattttctttaagccatttgcaactaatgcaaaggtggatgctcttgcaaggcttctgaaaaaacgagtgcattggattggaataaaccagatcacaacgtgatatctcatgtgtaggagcgattgtactgatggaagaagaacgccttgcgcaatggaagaagactaacaacgtttggtgatgctttaatcactaaaatattgtacttagttgcaattgtccttagttaattatctaaaatgtctataattaaccgttcattgaataatatacatctcttcttgtaatatatagggagtgtattgaataatgaaagaaattgtagggagtgcaaaattcatggaatacatctcttcttgtagtgagtgccacattcataaaatgcatgtgaattgacataaaatgtaatgttactaatgtatgttaatgttttcccaaccgttccaaaaaagaaacagaattccaagatgaaacaggccagtttttcaataatcacaaggtaagatgtggttggttgccactatactctagccaattcagcgtttgagcttgttcgcagatctttcattggtcaatacaacaggtcagatcacatttactttagaaaaacactactcaatcgaaagttattatctcaaaaaaaaaaatgatccaatcaaatcattcttgtcattgaaaaatgaatctttgcgttgataatatagagtgctgatatggatttgtcaaagcaacaaatctttctcaaagaaaatcctgtgctaacaaatctatgtcaaagaaaatccactttttctgggaaacaaaagataattagaattacattgcttagttcgaaatgttgtgtcacaaaatcatgcttgccctttaaagttggctcgtgtataattcattaactcttgtattcttctcatatcagcagcaacatttgctctttcccatttcatctttctgattctatcttcacattcaatgtattctgccggcacattagtttttccagatgctaaaggaaacttcacctctacatcctgactgtattacaaagtaacaaaacaaactcagatgcatctcacaataatgtctatccataagttgaatcaagaaagaaactaataagaaattgaaaaccattagaagttcacagtagacattaagctgtagaaaattgtgttatactcaccaacttccgagggcgaatgcacctgacttttttatcattccaccatctaaagacaaggctccatcagttatgcatgagaaagcctgtaacatctcggctctagttttgtagatttggaggcgagataagagactgtagaagagtgtctccctgagaccttgtccattgcttgtgacaaaagaaaggtttctactgtccaaactgagtaagttcactgcatagtcaataaacccatctgggcacttcccatttggtaattttggtttctggatagcaagtttcttctgtggatcatcagcgacaaattcaccagcatattgcctaaaacggaaaaaaaaatcatttttcttttccaaagacaagaatacaatataagaaaagtataacactaagtactcaccccaaatcttcaaggcaatgacaagaaaacgaccaattattttcattcccacagctgatgcagccacatgtagaccagtcgtcgagttgtttatattgccttcctcatcatacttctccaaagccttaacaccttcataagttctacaaacaatagctaacatggtctccaatcctaaatactctgacataagcctagctcataataacaaagaaacaagcccattagtaatctcctttcaagtagtgataaaagcttacttgcacaatgcgcagaatttattttatattgccaattgtgactctgctgatgttcattttttaaactgaatggaagaaagaagagaacggtgaaaaatgctaacctactaagattatcatcttcaactctggcaagagtagcaacaacacctaagacatccttggtaaatcccaaatctaaaccttgagtcgcatgatgagaattaagccagtacaatacaccagctgcagagttttctagctttagaattttttcccttgtttcctcttcagtgtgagatgaaccagctccatttgttccagctccatttgacgaatgatactttccgaggctaactgaatacaagtttggctcagaagaattgaacagttacatagtcttgtaggattataaagacaaaaaacactaacttccaggaatactattggtattggcaatattcaaaataaaaagttgctgaaaaatgatattagtacaaaggtttcataattgggcaaattcataccttgcaaatcaagaatagtctcatctaactgatttgcctgagttgtgagaaatttgagattgtcctcatgtcgcttatttatactttccatgctgcagaaactatccagagcaaactgatgaaaggagcaaatgaatgaacattttgtttaactagaaatcaaaactcaaaagaaagagtaccaaattctatatgaaaatctgaaatgtgaaaccaaagttgctatgtctttgcttaaataacatgtaacagcagactttggcaattgataagcatttgaatgcatatattcatattcaatcctcgtcacagatttcacttttttttagctgttgatagagaataaattgaatcaatagagctttgaaaagtcagctcaaggccattaaatttgttttataaaggttctccaagtgctaaactggtttgaaataataattaaaaaaaatcagtgaacacgagcaccattaaatttgtttgaaaaaggttcatcaagtgcaaaagggtcattaaatttgtcataaaaaagttcctctagtgctaaagtgagaagaatctccacacttttcaagtagtatctgctgcaactgagtttaataatcattcattaaagcttcacttcccacctctactactactagacccgtcaatagggacaaccttaatagcagcaataaatatccccataggagcaatactactttcccaataccaacaggaacattcttgtatcaaattttgatcccatgtaacaattatttcttaatcacacaatcaagtactagtgtctcacttcaaaaacaaagtcatccatttggtgaatgcatgcatatgtttcaatttcagaaccatatcatacataccactttggtgcagatcctatgccatgccatatttcagcgacgaaaatttaaaaaagaaataaaggaaggaactttactagcaaaaatacacaaaa

SEQ ID NO: 186340 - DNA, 3045 bp, Cannabis indica
tttttttttttttgtatgttgttgtgttttcatttcatggttgagatagcgtgaatttaactgaatgtgtctttatttgttggttttgatatgttttatgatgggttttgggttttgaatgtaggatgttaaaggcgtcctggttttagatttgttttctggttaaagatagttatgtcaatgaacaataataacccacctaagaaccttggggcctcttcctcgccctttggtaatgctggtatggttccctcatccatgggacaaaatcccaactttccccaatcacaaggtcaacctcaaatcccagctggctttcaaggacaatatcagttatcccaatcacaagcacaggctatagcccatgcacagtcaaaagctcaggcccatgcccaagctcaggttcaagcagctcatgctcaattccaagctcagttgcaagctcagggtctatcccttaaccagaaccaagggattgtgaacatgggctcttcttcacctaacctttcgacgccaggtagtttaggtatgaaaagaatgcctcagaaacctcctgtacgccctcctggtttttcgcctccaaacatgatggcgcctatgagaacaatggaactcacgcctgcagctcgtagaaagaagcagaagcttcccgagaagcagttacaagataaagtagcagccattctgcccgaatctgctctgtatactcagcttcttgagttcgagagtcgtgttgatgctgctcttaccagaaagaaagttgacatccaagaggctcttaaaaccccgccttgcattcaaaaaacccttcgcatttacgtgttcaacacttttgcaaatcagatccgtaccataccaaaaaagcctaatgcagagcctccaacttggtctctaaagatagttgggcggatcttggaagatggaatagatcctgatcagcctggtgctgttcagaaaacaaaccccttgtacccgaagttctcagctttcttcaaaagagtaactatttcgcttgaccagagactttaccctgacaatcacatcatagtatgggaaaatgctcgagcgccagcccctcacgaaggatttgaggtgaagagaaagggggataaagaatttagtgcgaatatacggttggaaatgaactacattcctgagaagtttaagctatcacaacctttagtggaagttctcggtgttgaagttgatacccgcccaagaataattgctgctatttggcagtatgtgaaggcaagaaagttgcagaacccacatgacccttcatattttaattgcgatccgcctcttcagaaagtttttggggaagagaagatgaaatttactatggtttctcagaaggtctctcagcatttgttccctccacaaccaattcatttggagcataagataaaactttcaggaaatagtcctgtgggaagtgcttgttatgatgtgttggttgatgttcctttcccaattcagagagaattgtctgttcttttggccaactcagaaaagagcaaggaaatcgacgcctgtgatgaagccatatgtggagcaattagaaaaatcctcgagcaccgcaggaggcgggcttttttcctgggtttagtcagtcaccggtggaatttatcaacgctttaatagaatcccaaagcaaggatctgaagcttgtagctggagaaggaagtcgaagtgctgaaaaggagcgtcggtcagatttcttcaaccagccatggtaagcctatttattgtctatcattgcatatcaaaaccctttattttccttatgtatactctgtcacacattgtaaaactgaaatattagcacttcttgtttgtggtgacaatgcttgctcacccctattaaatgccattcatctgccataattttattatcatagttatttatttctaaccttattccatcagcattcattgagattgccaactgaatcttagttttgacaatttgatctgagtctattaaatagtcaaatatctgagctgctgtactgtaacatctgaatgtgcatatttcagtgtagaaaagaaatcatgatatgtataacgagtctttttttttttcgtttctaataccagggttgaagatgctgttatccgttacttgaatcgcaagccaattaccggaagtgatgctcctggaagcgcatgaaatgggattcttgagctcagtctcagtttcagcctcagccaaagatggcttagtagcaattagcatcatcaatgcaattttttgtgtaggaatggagaaatgtaatgaagatatattgcttctgagttgggtatgatttatgtacaaatagagtataatagtgtttttaatgtatgcttgatttgtaatttagtttgcttcagacccatattctgtgtatttcaattaagttatggctttgataaattctattggattatcaatcaatcaaccacgcaagtctttcctattcccatctttcttcatttgttgcaatgttggtactactttagggccttcagattcaaataaatgttttctgtttttaatgttattttacgaaatgattttggctttatttagataatttttaggaagataacattcttgtcttgacaactatacatatattttgtcaactatagttgcttagttgatactaggtatagatatagttggattattggtgttcataattggtggacagttctcaggtggacacgtttgttttttgcatcctcaatttatggtgttgaaaacatattttgaaatagttaattacacttctgttcaacaataaaacacgtgttcaattaattggattggacattctaaacatggatgcggaacagggaacactgtttaactaatatttagattttagctatattttcttgttccatgttgattgcttattttttgttttattttgattgttaagtcttaaaaagagaaaagttaatatatacaactacaagagatgtttcctgattcctaggaaatgtacctccaaattcattccccctttttttaaaaaaaaaaaaaactat

SEQ ID NO: 186341 - DNA, 5356 bp, Cannabis indica
tcttttaattagtttaaagtgtctatttaaatgccaacttttgataatgtgatcaaagatctattgtcgaatgattaaacctacatgcttactggtgttgtttgatgtagtttacaaaaagttagttaagtataaaataaagggaaaatgtgttggggattttttgaatgatatttcatattatcattcatatatgtaacacaatatttacattagtgtaaatatttagatcaatattagtagaaaagtaatacctggctttgaatcaagtagaacaataccaattgacgttgaagatttagatatggtggccgctggtaaaaaaatgtgtaagaggtcagtgcagaaaaaataacaatgtatgtgcacactagaggtgataatcatgtttttattaccataataaaatatcttagaattgaaattataattaccttctattgatattgagacatatattcaaaaagtaagtgtttaattaattaaaagaatataaaataatataaaattaagtgttgtaccgacccaaaaaaaatagcagtaaaaccaataaaagcagaatatatatgaacaacataataaccaactaaaagtcaacctcaataagactccctagtatgagatctatgtgtattttgacggataggaatgcccaacattatagtagtgtaataagcattattgatgtgttttagcatttagcattagtaaataatgattagtcctcacatgatgatcacatcacacgtgtagcaacaactaataactattcacgctaacacaaacgcgtaaaatataatcaaagcaagggaaataaaaattaatgatcaccaccacacactcaactctcgagtaataagaatgggaacacatcaatatatataccattctccatattaaatcagaaaacaatcggcgagaacacatccaaaataaatttaaacatacgaaattgcattaagaccttgtccttgttagagattttataacaatggaagaaaattaagatttattacaactctattgtaaaataatacaaggactaaaataacagattgattaaatatatgttacaatacatatatatacactatatatattacacatatatatatgaaaagtaagaagagaaaattacaacacatgttgttgagaattgctaattcccctgctgcactgaattcagtgtctctgcatcacaggaaatcattgcctctccaaggttgttggaatataatccacctatgattttccttttgctgcttttcacaattctgttagagagaatattctctttgtatcatataatgacacttgtcaatatttgtaaggcctattgtaatcttccactgctatataatgaaattcactcctcagactcgattgagctgagttttcccaaattgtcattctcttcattttctcacttggtatcagagccaagaaggccgccgccatgtcgactgacaattctcagactcccccttcacctcaggtgaaccagaacccaaccagagttcaaaactcgaatggtacaggagctactgttattaacagcagtgccactttcaccccaaacttcactcaaccttttaatactctcaaccagcctttctctctgaaattagaccgaaacaattacaccttatggaaaactatggtgtcgaccatcatccgtggtcataggcttgatggattcatcaatggttccaggatctgtccaaccgagtacatttcaaccactacagaggccactggtgcagatggacaacctgttgtcgaagtaaccatgaacccagattttgagcagtggatagtcagcgaccaacttctcatgggatggatctatagctccatgacagaatcagtagcaacagaagtcatgggctgtagcacctctgctgcactttggagagcccttgaaaacttgtttggagctcactcacgggcaaagatggatgaaaccagaactttgattcaaaccactcgaaaaggtaacactcctatgacttaatatctaaggcaaaagaaaatgtggtctgatagtttagcactagctggagatccatatccagaagctcatttagtctcgaatgtcacatctggtttggatgcaaggtatttagccattgttgttcaaatagaggctagatctaatatcacatggcaggaagtgcaggatatgttgcttagttttgacagtaagctctctaggctctctgtgacagaaggaaacaacaaagagggaaacaatggtactgcaacatcctcaatgaatcccactgcaaatcttgctgcagcaagtatgggaaacaaaccgtatactccagatcgtggcaggggcaactacaacaatttttctaatgctcggggaggttcatcctcaagcaacaacagcagaggtggaaacacatcagctagaggaagaggcatgtcaaataactctaagcctacttgccaagtttgtggcaagtatggccatagtgcagcccactgctataatcgatacaatgaagcttatatgggccaagaacctggagctcaatcaaaccaacaagctggaggtcatgccgcattcattgctacgcccgaagttgttgataatgacatgtggtatgctgatagcggagctagcaaccatgtgacctctgcttcatccaatctgaatcaaaaatctgattatggtggtaaggaaaaacttacaataggtcatggtaatcaaattgatatatctcacattggttcaagtctattgcacacagaaaataataatactcttgagctaaatgacctgctgcatgttcctagtattgccaaaaatttaattagtgtgtctaaattgacagctgataataatgtgtttgttgaatttcattcaaatgtttgttttgtgaaggacaaagcaacaaggaaagtgctgctccaagggatgcttaaggaaggattgtatcagctaaaactaccattatcaaatacaagttctaacccttctcatgtgacaagtaatacaaatcagtttccaatgtttactggtgtctcggtcctacaaaggaaatctgtagctaagtctgttagtgatgaatgttttatttccctaagtgatgtttggcatagaagactaggacacccttcaattaaggttttaaaccatgtactagcttcccataatgtaaaagcacctgtcaatgaaagagttgttcatttttgtgatgcatgtcaatatggtaaatcccatgctttaccttttaaactatcatcaagtagagcctcaaaagttcttgaagttattcacactgatctttggggccctgctcccattatgtctaacacaaattaccaatactacattcactttcttgatgattttagtaggtacacatggatttacccacttaaacacaaatttgatgctcttgaagcttttattcagtttaaacaccttaaaacctgtgttgaaaaacaatttgaagaatcaattaagtgcttaaggtcagatggaggtggagaataccaagctctatctgatcttgtcattgaacatggaattgattttcaacactcttgtcctcatcattcagctcaaaatggtagagccgaaagaaaacataggcacatagttgaaatgggactaactcttctagctcaaggtagtatgcctctaaaattttgggtagatgcatttcaaacagcagtctatctaatcaatagacttcctactcctgtgttgaaccacaaatctccctatgaaacattgtttagaaagaaaccagattattcctttcttaaagtgttcgggtcagcctgttttccttgtgttcgaccttatcaatcacacaagtttcagtatcactcacttaaatgtgtcaacctaggatatagtgatcatcacaaaggatacaagtgtctaagttcaacgggaagagtctatatcacaaggaatgtcatttttaatgaaaaagaatttccatttaagaaaggttttctaaacaattactgccctgagaaacaagttgttgttcaaacatcacaatggtcccaactgcctaaccttcattttcaaaatattgtccaaagcaggcacaacaacacagctgatacaatgcctactgctacaccagtagcatctcatggagcagcacccgatcctcatttggaagaggtcagtgaacatattatttcaactgacgaacacattaattttgataatgagaatgttgcagatgctactgctgattcatctcaggataacaatcaagaacatgcatcacagccagttcaatctcaccctatgataatacgtgcaaaggctggaattttcaagccaaaagtgtatgttggggaggccaaattcaactctgctgaagaagaaccgaggagtattgaagaggcattgaaatcaaaagtctggaaccaagccatgaacaaagaaatgacagccttgaaaaataagaaaacttatactctggtgccttactcctctcactacaacttagttggtaacaaatgggtttacagaattaaaagaaatgctgatggaacaacaaattgctacaaagcgagacttgtagcaaaaggctatcatcaaagacctgggattgattttggggaaactttcagtccagttatcaagtcctcaaccattcgaatcatactcacaatagccgtaagcaaggggtgggaagtcaagcaacttgacatcaacaacgcctttttgaatggtactctagaagaggatgtctacatgcttcagccgcctgggtttgaagacagcagcaagcccaattatgtatgtaaactcaacaagtctctctacggactgaaacaggcaaccaagagcctggtttgagaagctcaaaaagacccttctcggatggaattttgcaaactcagtggctgacacttccttgttctttcgcatgacagacaaagccataatctttgtcttaatttacgtggacgacatcattataacagggaaatgatgccaccaaattaagacagtttatcagtgatttaaacacacattttgctctcaaggatatgggaacacttcattttttcttgggaatagaagtctttcgagacgatactgggatgtatctaacacagaggaaatatattactgatctcttcacaagtatgatatgctgaacctgaaaccgtgtcctacaccaatcgatctctggaaagcctctctcaaaaactgatggtgaacttctgcagaatcccacagcctacagaagtataattggggcactgcaatacctgtgccatactagacccgatattgcctttgccgtcaacagctcagccagttctcaaactccgaacaccagccactggagcagtgccaaac

SEQ ID NO: 186342 - DNA, 5211 bp, Cannabis indica
ataagatcatcacattcacattgtagcctaaagtagtatttcattattttaacattttatgtgtatatataaaattatcatacattcaataataataataatataaaataaaattatcatattatacaataataataaatcaaatcaagaccaaatttgtgtaaaaacatcgaccaaagatttttttcatttattttgaacaagattactcctttcaatcttattgattcatcagtagattttttttataattgttgtatgtaaactttggtaaaattgggcttcaattccatcaataattaaaatagtataaccacattaaaagagaaacaaaataaatataaaaatcaaaaaagggttataaataaatcaaacaaaagatttttatcattaaaacaaaggcgtgaggtgtgcttcttttctcctgatcgcgaaggtaaagaagactcatcaaaagtttgaatcaacaccacagaacgatgtgcgagacaatcgcatactcaaccagcggttcaagaaaaggtgaatcaagaggatcacaaacaaaattcacagatgctctcgatgggaatttttcccaaccaaggaggtgcaagagtacctcgattctaagagcttttactccagttaaagaatgtcgagaatgatcaggacataaattttagaaacgtgcccaacagatgtggtttgatctctcctcgtaggcgaaatatgtgggtgttaaactctatttttctccacacttctcatgaaggatggccatgtatttgctaagctcgaccttgaggaaatttatattgaatctaaatattcaaagactactatgttgtgtatggttttaggagaaaattccctattaaaaattttcaaggggtttgcaagaaaggtatggggtaatctgggtttggagaaagtagtcagaatgaacaatgacattttactggtaaatttctaggatgaagcctcccgtgattttgttttggatgtaggggttgtgcagttcgataataaagcgataacgacagtgaatcaaaaataaagcgatgaaataagataaattaaagaaagcaaaaacattaaaataaagtgaacaccaaattttaaagaggtccagccccgtaagtatggtaatagcctactccccttgtagttgtattgacttgagagagaatgaacgacgtactgttcttcctctcgaaagctcttacaattgatctctgagtaactttctttcttagatcactcttttctctcttgaatgtatttttaaagcaattttctcgatcctcttgaggttaggcttctatttatatggacttaatacatgaagaatgattttctttttacttataatgagtaaaataagaaactatattaattctataattacaatgcaagaaatagaaaattaaaatgtgttgcatttattctctgactcaatcccgtaattatagtgattgtcttcgtgtctggaaaaaatgagattgatctctagaatcgctatctttcatgcttcactcaacataagcatgtatgcatcttggacgaacatcttctcaaccatcttgctcggatgtctgaatgtcacagaagctgagtagtcagtcatgggatactttcctcagtccaggtatcgaaaatatgggacacgtttcatccattcctattgccatgtcatggtgcaaaaatttaagataacatttgcccctaaatctgagcagaaccttccttgtcgcacatggacttcactcagcctggagtcttgtccggatgggtgacgcgtgtccttgatgtccgacgatgatccgatgtgactctgactgtgggtctcttcaataatcgtccatttaatgctaattgacagttgtacctcgaattaaggttcgatacttgtgtgtgcttgacggttacactccctgtaatgagtgcgtaacgtatacttttagggagaaattaaaaataaattgaattttgaaataattaattcttttttcatactacttataaatatgatcaaagacccctggtaatccttttagcctttttaactcgtaaacaccagagcaaaagatctctagccaaatttcttcccaaatcctttgaggaattcataggaaaacttctgacaattctatctgagtaaagcaagaaagcttcaaatcagtgaataagttcttcatttctttcttttacacatttgcaatgaaatgcatgtataatttctgaattttttgctatgaatctcgcttgttcttaaactgttctaggttaacgatagaatacctaagtttaggacttaaaaatctcatttatgcttaaccataacatttgattatctgactgcgctttgaatttgacctaacaacgtacatttccattcatccataagattttagtgaaaatcggattttaatttgaagttttgaacttttgggattaaaaaatctatttctaggtgaaactttcgcttttgatttctcaatcgaaactagtcggtatatacaatctgtttttcattcgtcacttcgaccaactctcactctcttgtcccctaccttttgtggatgaaccctggtgagttttggggatgcaaacatcatatcgaccaggatttgcttcaactcctacatgaggatcatcctcgtctctgtgctagcccatcctcgtctagtgacgatctttcaaattctaacttcgaagattggaaagtaagtagcaaacatacgatcgtttcatctgggacctcaagaaagattggaggcattaccttcttgctaattagacgtatagagttcatccaaatgtggttggtactttgctcgagggctgcccaagccctgctgctgcgggaaaacatgttgctgattttaatgtgaccattgtcaggcacacttctgataaaactctgcctaaacgtaggatgatggcgcgaactaaatagtctgttaggaaatcttcattaaccgacctacttccccttagccactttagctagggcaaaacaaacccgtcctgccattgacgatcgaggaagatattgttagggacattgaagtccaagaagtggaggactagggcaaggtccatcatgctactccttctggtgccgaaggcgataaggatgaagggatagctcaggtgctgccattcggtggttacaatgatgaaggagaaccagtatctgaagcaagtgatgtcatggaggccggtcaggactacgttgttgaggagtatactgagtctcgtcctttgagaaggaaaggtccaatggaagattgatggatttctccaccatccgtggtgaccatgaagaaattggctaatctgttcaagcacagtctcttggggaatgtcgaatgctttcttccctctcccagccaactggctactaaccctggagagggttattgtgcttggtcgggagctcataccaaactaggtgcaatgctgcccttacttccatacttcaaaaagatagccaattattaccacatcaatccaacccaatttactccagagggcctcaagtatctgtctgtcatgtttatgatatacgcctcataaggatggggtgagccatcccctcatgacaccaactggctgttcgatttgaagtcaagtcccatgcagaacaggtcggggtacttatacttctctcaaatcgaggagtcgtggttgacgggcaccacagaccccgaggtgacgaagataggaggctttgtagatgagtattacttaatcaaggggatggacaccaattaaaccagtttctagtagatttcgtcctattaccgccccctccccattcacactggaacttaggaagagggctcaaaaaattctccaactctctcatgatgaacgaaacatctctctcctggctactaacgccaactttgttaagtacaagctttattcggctgattttgtaccaaaggctgaggaagcaacaagagaggttgtacacggataggaggctccaagcaagaagaagaagaagaagaaaagaaaggctcccccaaatagccaaatactcgtcgagcgatccatccggatcagagatggccctaaaagggttgctcgattgtctaccccagtggctggaaagggaaaagtcgttatggtggagcaggaccagaaggattcttcaaacgatgatgccccttctttacttgttcgggaatttgctcctacctacgtgtatggtactttaacttgctttgaaacttatttgcatttacttggatcatacttgtttgaccttcttattttattcatgtgcagctatgtcacagaagatgttgcatggtttgataaaagaggtcgggcgatggctccgaccaaacatctccatctaaacggtcaaatgtggatgaagttctgccaaaggacatggtcccaagcactctcaaggagaagagttcagctgtttctactattgaggattctgaggaagcaatgtcggaggattccataagaacgctgtagtcattagtcaatattgatcaatcatcacttcagtaaaatgaagtcaaaattatctcctgtacaaaagtcaatattttgatcttgttcctatgtgtgtgttataaacacaatgagtaattataaaaatatgaataaggtaatgaaaagttaagcacacaagacaaaatatatcatatttaacatttgtatatttctatccaaaaaagaaatctgtgttgtgtatgtttgaaatagtcaaaataatattccatatgatgtgatcacgcaagggtgtcttaaaacataagctaaagccataccctactcaccgacaccctttaaacaaacaaacatttacatatacatccgtttgttttattttggaaactagtacttaccacattttcaataacatatactttatacaaactaggttccttataatttttgctcaatttattatgacgtatgcattattattgtggtttcttgattcttttattccattaaatagtcctttaaatatttaattataatattattataaaataatcattcagttaaattttagcatacgtcactaataaaatattgatgtgatttattattagtctactatcatattaacgctaaatatttacatcagtattatgattgtcaaatgtgacacaaaacttaatagaaaagattattttacaagactagaaataattcgagaattattaacaaaaacccaaaataact

SEQ ID NO: 186343 - DNA, 1380 bp, Cannabis indica
caaaaagctcatcacacaaaacaagtaacacatgtacagttacagaccgaaccgaatgctttgaaagttaaagcttcttttagtttacgatcatgcaataacattggtacctccaatgagagacctggcaatttcacgctctgctgcaatctgaagtggtatttgaaacttgaatgtggggtcttcatagtttcctcttttctctaatggagttgaattagtctgtataccataactaattacagaagcatttagttcagaaaaatgcaaggctcccggggtcatcataggattagaaaacagccactcatctacttcagctgttgattcaaatgacataacctgcagaagcaaatgaaggttgtattatgtgacaaggaagctcagtactctttctagtacatgagatttttgtttttttcaagtaattatactaactttagtagaaggaattggccttccgggattgttctccatgatggagccaacgattctttgaattctggcgcttccattaccgctccagatgaagtcgaagcaaccattgttgatataaaacttatcctcacatggtgggattgaaggagcaaccaaagtctgaggatccatgagagtcctgtgagaggtggagtaagagaagcgagcatcgatagctttctgagtcacaaagatgaggaagataaagaagaatgaagcaaaaagctgaaagaatgttgcctttctgttcctccatgaaagcaaaatgttcttccagaacaaggccttgtattgttggaaaaacaagccaaatccactcctcagcttcatggctaataataataaaaatctcaaaaccactttttagctagaatgattgaaaatagaaaggttaaagtgttgtgatatcattgatatgcatcatgtgaagtattatgaaatcatgaaagtactcaaaatgtagtgtgatatttagtacaaaatagagtttgaaggataatgtaatgttcacgttaatttatatatacatgtaaatataatattagagtttggtgcgtataagattaggtgacataagagacgttacttactaaagagatagagttactagctgtgttctattaatacttgtggccgaacaagatgcttttttttacattgttatagacagtgaaaagaaaaatcagcattcaactgtaccgaggagatagtgtattggattgggatatataccaaaaacttatacggctccttttataacataaacacatgtttgtagttttttttttatttttttttatgttgaagcgttttttgtcaactaatttaagaaggttgtaacgagcagagatgaacttaagacttttatcaatgtagtgataaattttatatagtagttcacag

SEQ ID NO: 186344 - DNA, 3474 bp, Cannabis indica
aaagttcttttcttcttcttttttctttttttccaagttcagttcttctgaattatttgaactgaaatattttgttatccagcttcatttaatctcttcttccgggagacgtatcaagaaaagaaatttagatgaatctgcgggccctgcatctaggaactccaaggccaagaaaccaaaaactagtcgtaaaatttcaaagaagaagtcctctaaatctaaaacattgaggccccagcgagttgcagcgcgcaatgctcaaaatatgttttctcaaattactgaaacttcttctgatgatgaagaagtagaagaagaagaagaagaagaagaagaagaagaagaagaagaagaatttgaatcagataatgatttgtcagatggaaatttgatgctagaagatgtaaacatgcagagcaatgaatctgtttttgaacttttcagaatatgcatcatgctagagaggaagaaccatcctcacttgaatcagaagaaaagaccaagccatccaaattttctgaatctcagtcaaatgttcagaagaagccaagattgctcttgaagttttcacttaaaaagcaagtcgttagggaagacacaaaatccacatgtgacagacaagctgactcagtacctccacaaaattccgttgtagatcctgcctcaacttcaacagatgtagttgatctggagctgtctcaagaccaaatcagaaatgaatccacaattatggggcaacctgagagagctgagttttatttggaggattctgcagagaatgaaattaaatggggagaggtcaagacgcgcacatccagacattcaaaatcagaagattttgattcatccacccgattagatgacaatgctgatgatatagaagaaataaatgctttgaacgagcaggttaaacctgagtcatcttttatgagagagcatgcactagaatgtggtgttgctgcagcctcttttaatgggaagctcaacaagggaaatgaaggcccatcatcgtctgataaatgcagagatgacccttcggaaacaaaggaagctccccacttgaagcactattgtgaatttaaagaaagtgcccccgtcagctcaatgaagataaaaatcaagacgaagaaaaggatattaactgatcctagaagcccatcaactttaaaatttgttacagttaaggatgaactgactggtccaagagatgactttatgtctaaaactcctagcatggagcaggatactgaagtaggaccagctagaggtactcgcagatcatgttcttcactgttacataagtctaggtctggtttagaacgttttgatagtaatttggaagaaactacttcaagcaccaattacctccgtgattcaatgattgatttcccagaagcaggtactgatgtatcgcgtagaacaagatcctttaccatgaaagcaacttctcgggaaacaaacacaatgagtagtagctttaagtcaagaggaaatcatcatgcagcagggacattaaaaggtgcagaagagtactactcaaaaatgaatgatacattccataaaaaatcaaggtcctctaggattcctcagggcacttctaataattgtgacagaaattcgtcagccaaaaggatttcaagccaacctgtcggcaagctatcatggctaacattgtcagagtatgaagaaggttatcgttatattcctcagcttggcgatgaagttgtatatctgagacaggtgattccacatcgaatgaataaattttggtttgtctcctattatctttttcttcttgatctatgttttcattaatagttttttatgatttgattttatattatatagggtcatgaacaatatgctgagtcagctatgcgtgaaggtcctcctagtgttcttaagagtaagctgagagcagttgaaatttgtaaggttgatatccttgaatatgcacgggatttaggttctggggaaagctgctgcaaaatcagacttaaatttataggtccttcttcaaatgtatgtgacaactcactccagttgacacttcctgagctgagagatttgcccgattttgttgttgagaaatcattgtatgatgctgcgattaaaagaaactggagcattggagatagatgcgatgtttggtggaaagatgcgaatggagaaggtggtaggtggtgggatggaaaaattacttcatctcaggccaagtcagaggagtttcctgatagcccttggttaagatatgaagttcgttacaaggaggattctggggaagagacagagcattgtccttgggaactacacgatgagaacatattgtgggagcgtccgcatatcgactctgaaacccgagacaagctactgcatattatttcaaaactagagcagtcggtatgattctcattaatacttacttgtctggatgctgcagttttgtcttagggatccaagtgattgttttactgcttctcttgcaggatgctggcatcatccagcagctcaaccaagttgttcgaaagtcagatttctgcaacaggtacattcttcaaatttcaacaactttctttctagagcgtaatcaccttgtttaaagtctaagaatgcaagacacgcatttaaagcccatttattactccagtctgttgaattttttctgctgtggtaccttttcataggataagttacaaatattagctgtagtaatttgagaatgctgttatatatttggatttatggatattttgtagggttgcggttccattttgcccggaactgatcaagtcaaggttaaggaacaattactataggagcttggaagcagtgaagaaagacatgagtgtgatttttgagaatgccaaggattactttaagcaaaaagaattattgaacaagattgtacacttgtcagaacgatttacaaggaaactgtcaatattgtgtcgagacaatgcagtaaattctgtataggtttgcattttccattaggtttaagcaactcctaattcacaaacagacataaatctaaaatatcctggttttaatgggaagggaagggaagggaagggaagggaatgtctgaggcagtgaaaatgatttgacttcttgtacctgatacctaatcatgtatagaagcattctttcaaagcataacaaccattgagtcaatatagagaatattacagagaagattggattacagataaaaactttttttttatatatttatataaattatatagataagatatatagaaaatgaaactacaaatacaaggcagttagcaggtaccctaaataagattaccaagcccatatcagtatgataatattggttcttaactaagattattgtctgtgtttgtgagtgtatttttttgttcctgtctcagttaaatagtaacacagaaacgagtttctgtgaattgcttattctcattaacaaactttcaagatagcatgtaggga

SEQ ID NO: 186345 - DNA, 2136 bp, Cannabis indica
ctcttcaccactcctggggctcttcagtacctcagtggagtcattctctttgaggagaccctttaccaaagcacagctgctggtatgtgttctccctagattttacatctttaagatctgatggaatatctttgtttttatcttttgtttgtgtgtttgcatcatgtatttttatgatcttattaagagaatggtacggattataagcttggttgaatcgagtcctgtcattgttataagtaattgggtagatttgatagcccttttgattgttattctgaacaaagcttttggtaacaatcatctcatgtatgttatttgatttagatgtttgtatatggtagtttgagctaacattcttgatctgtaattataattttcaggtaagccatttgttgaggttatgaaggaaggtggagtcctccctggtattaaagttgacaagggtacagtcgagctcgctggaacaaatggtgagaccaccactcagggacttgatggtcttgctcagcgttgccagaagtactacgaagctggtgctaggttcgctaagtggcgtgctgtgctcaagattggacccaacgagccatctcagttggccatcaatgaaaacgccaatggtttggcacgatatgccatcatctgccaagagaacggccttgtccccattgttgagccagagatcctcgttgatggatcacacgacatcaacaagtgtgctgatgttaccgagcgtgttcttgctgcctgctacaaggccttgaacgaccaccatgtcctcctcgagggaactcttttgaagcctaacatggtcacccctggatcagattccccaaaggttgcccccgaggtgatcgctgagtacacagttcgtgccctccagcgtaccatgccaccagcagttccagctgttgtgtttctatctggtggacagagtgaagagcaggccactgttaatctcaatgccatgaacaagcttaagggaaagaagccatggtcgctatcattctctttcggtagggctcttcagcagagtaccctcaaagcttggtctggaaaagaggaaaatcttgctaaggctcaagctgcattccttacaaggtgcaaggccaactctgaagctactttgggaacttacaagggtagtgagagccttgatgatggagcatccgagagcctccatgtcaagaactacacttactgataaagcttttagggattatctttcatgtctttcttttcaagattaaaatgtctttgttttgcatgaactatgattactaaggctgttaaaatccttggtggttcatttttaatttgattaaagctattacagcatttttctggggaagtttttagctttcgtaagacgttcacttattttactttgggaatttccgagtacaagagtcaatttggctctataatgcatcgagaatatgttcaataagtaataatccttttgtccattttgttgatctgtcattttcactcttcatgtccttttttctctttagggatttatttttcatgtctttcttttagcttgtgtttggtgagaatggaaaagtgggaggatggaaaggacaggagggaaatgagtgggaggagaggtcaaatactcttgtttggcaagatcgatcattggatggaaaggaaaagtgagagaaaataaatccactcaaatttacacttttaaatccatagtactctcaattcttatttgtgcaaaattacaaaattgccttttaaaaaattatcaaaaattaatttgaaaataatttagtaattgtataaataaaataatgatctatcattccatttctctatctaaattggaatacttctttcttctccctctatattttctatcttctcttaactcttcatcatctttattctcttttcaccataccaaatatattgttaagtttgaacacatcaaactacatgatagcataataatttacctataaatcttacacataatatacttagaatttgttaggttttctttgtaatattaaggtacccttttggtgtttgttgattgtattttttcggagcattctgtcgcatttgatttgcgttgtattgctccagtcaattgaaatgatgatattcaaatatatatat

SEQ ID NO: 186346 - DNA, 791 bp, Cannabis indica
ttattaaggctttatttgttatcttaattggggttttaaatcattttttaaactaagtagtgatgacaaggtggggaaggacctttggctttttgtaggcattacttgggcaataattctacattattgattaaaagaaacttataataaaaagggtatttggaattatattgaataatgatgagtcttttttgttcttgcctcattttccatgttaatttaagattgaaattaattgactattatacatgtccatccatctgtaaccgagtaatgaatgaaagttggttatagcatttgactaattactaattattgctatcttttctgcttaataaatcatggagggaggaggctatattgagttttttgttgttttctttttcttttttaatgaaatcaatgaaaaagtcaaacttgtttgcaaggcaattcgtagccatcataaaagaagtcaaaagaaatgaaattttgttcattttatgcctgactattacctcagtacataggccatcaaaaagtaatcaatagagttaaaaacaaacttaagaagaaaaaaagtagtttacttgaatgaatccttggattttggatgaccacaaatggattagttaaaaaataagctttagctaagggggccaaaaaaaaaactaaacataacaatacatatgacataaatctatgcataataatgcatataatttcctctaaaaaaaaataaataactattctgagtggctatttaaatattggcacttcttgaaaaaaaaaaacaaagtagaattgaaagg

SEQ ID NO: 186347 - DNA, 4260 bp, Cannabis indica
gcgcgaattccaccagctatttttgtccaaataaactcaaagccttcttgctgatgcggatacatggtatctttgataccaggaatgaaatcccaaactgtatcagcatgttcagggaagccattgccagagagtgaaccacaattataatcttgctccccgagtttatcaaagacagagctgtttttgaagccaaggtctctaaattcagattgtccccatggatttctttcctgaattgcagagacaatataattgagtcagaaaatctaaaaattcaatctaatgctagtaagttcattagcacatataataaaagaggtagttggcctaaaatgtaaaaaccaagtctatgccataactaattcaagttacaaagctgaaaaatttaacaaaaccatttattcagatccatgattgttatgaggtctttctttaaacttcaatctttgactggtttagagatacatacatatatatacactatcatctaaaatgtttatttcagcacatactataaatttgcaacaatcatcctcccttaaaagaagtattatcaagttaaatccccaacatttatataccaaaatgagaaaataattatctagtatcacttcatatatctaaaaatactacacatgatgatgtaaaacaacatgatgaagagctacatagaaaacagatccagcaacatacgtcttatccaacaaatcacagtgacaactatattatggctaccaagtaatatatatataaacattaactcatataacgtccaactggaagatcattgttgagattagttctcactttaacaggaaacacaagcacatagagcaaggtttaacaaaaaaaatttacatatacatttgtacaaaattaaacatttgaacaatgaatctacccttaatgataagatcactcaatatacatacatgaccaacaagaataccataaacagtcctactagacttacaaaaggtggcataatatgctggatctccacttggacgtgcaaacagcgagagcatacgtatccaatttgctcatcataaatcagctgatgtctgccgtgattacaaagggattccacatccctttcactcgaaagaacatcttcatcttcatcttcaacctgaacatcaaactatcgaagttcagaaaacacttaatttgaagaaaaaacacccctctttttggacaaactcaataaaactagataacagagagagggcaagaatttgagaacaagcgaaattgagaatgaatgcttttgaagtctagtttatttttcagagacagccataaatatcaaggtgtacaagtttcccataaatgcagcagtacatataattcaaattttcaagaatagtagaatggtaagttttcaagtacttaaaatcggtatcttcacattaagtgttattatgccatttcaatagatctctacaaacaactataagtttgctactaatcctaaaagttttcatagatggagaatgactgccattcattgttgtaggtgaatgaatagtgggtcatttgaggttgtcacataagattgatgagagacatgttggtatggaaaatgttaggagtaaggaaaacatgactaatcataaattaggccagaagagtggaggtttcaaattcaaactcaaactcaaactcaaacttgtttctgttgtatggtctcaaaaaaggaaaacatgcacaacccaaaaaatgttgaatctgaataatctggtggttttgagaataggctttcataactctatcaaagtcaactaactcctttgcttcaatagacatgaacaaaattactaaactaatcaaataagaaaattcttgttcttatgatgaaattcagtaaaaacaaaagaacgtaccatatcatcaacaggcaatgaaccaatctcaccagcagctacagccaggttcatttcatcccaaagtttctccaactcaagctcctcagctgacttctctacttgcttagtctcctctccaaagaagaacttcctacaaatcctttcttcatttagcctcagattatcattttcttgagtcttaatctcattaggatcttgtaaagccgttccttctgtaatggagtccaaaagaatcctagccacgtcaagcttcacatcgagcttcttttctctagtcttgtcagattttaatctcttcctcaccaccttctctatctggtcagtaaacagttcatcagtaaaaagttctggttcttgatttccttcttcaagttcaaattcaagttcaccagcaccaacaccaccatcatcattatcctggtcaatgcaaaaaggttgacttgcagttccatctccatccttgactattacacgatttgattttgagtgtgaaaccaacctagctcttttagcttgagaaaatctcttatgagcaggttcacccacattcccctcatcatctacacccccattaacccaaatctctggacttggccctttctcttttctcccactgaattcaccaccaccaaaccgatcactactttccctcacacctgtaaactcaccatatcttttcctaaaaaacccaccatttgttttccctgacccactctttctccaaacaccagaacacgattctccaccctcaccgttcatctcaaaatccctccttttacgacaatgccgctcttctctatcctcataaatgtcgtacgagcagtccgaactgtcctcactatcatcatcatcgtgatcaaactcctcagatgaaagcaaaaactcactgtcactgctacatttatcttcatcaatgttgttcattaagtcctcatcttcatcgtcttcatcaatgcataaagggttatctctagttccattcatccccatagaattattagcctgagactgagactgagactgagaaccaacctttctcgattcaaatccaaatcccaagttattctcttcatcaactaagacagccacagaatcattaccaaaatcttcattctcaactttaatctgtacttcagtgggcgtcgtttcccttctcctcggctttgacaagcttctgaagaactcttctgttttcgaccttgttcttctacaaacgggattagagtaatccatattcgaccaagattaaaactttctgccaatcgatcaaaacccagaaaaaaaaaccaaaatcagcgtaacaaaagagtaacagaacataaaaatccaaattgacaagagacagaagagagcaaagccaacccaatgagagtatatgaaaaaaagagggttctttgatgtttttgaaaggaaggttttgcagaagacgacaatggcggaggagagaagcgcgcgcgaagtttgtgcatgcgtagatatactggagaaaagggaagagagagtatatgggggaaatatgggaatcatatggtctgtcgtttagttttccttttatatgaaaaaaaccattacaacagtcaaaacaagaaatcgaaagtcactgcctaataataatagaattataagaattgattttaatttattatatttaatttattctaccaaaagtaataggacttttttttattattgaaaaaataaataaaaaaaaaaaaaatggtatcactcttacttttacctcatgcctaattggtcttttttttaaaaaaaaaaattaagtgagtttctcctcgacctcaacccatatcaagtatactctattattattggagttagtagagtatctacatatttgctatccaatattttatctatatacaagtttggaatttctgtatttttaataatgcttatttagcatcttgtaatttaaaatcatacctatttgatactctaaatttaaatttttttaataaaattttatcaatacaaaccgtttaaaattttattaattttaaatttaaatttaattatttgataacatataactgagatttgtttggttaaattaaaactgtattgattaaattttactttaggtactaaatatgtacaatttaaaaatatgagataccaattaagtattattgaaaatacagggtaccaaatatgtttttcatgaaaacacaatgcactaaatgaatgtattcccgagttagtatcataaatgaactacttttcctattgttaattaattttatgcacattttttcatgatgagccatatatcattagtgtaaatgaagtgggaatggagttgacactttctattttgtataattagaatattgaataataaataatgtat

SEQ ID NO: 186348 - DNA, 6330 bp, Cannabis indica
aaaaaaaaaccccaaaaaaattataagttatttttcaatctttaactaaaaaaaaaacaaaaatgggtattcattaattgggtctttagtctttacctgatttgatcttttccaacgattcataaagagctcgtttatgtttcttcttaaaccactacaaaaaaaaatacccattaatttaaataattaaatgtttaatttaaaaaacaatttcaaagtgagattaatatatataattgggtattaccttgccaatgagatggattatgtgctcaataataatggaaacaaataccaaaacaagacaaactacggccacagcccatgttggtgtttgttctaaagatcttcctccgctagccaccgccatcttcttttaatttaatttaattttctctctaagaaaatatatatatagtgatcataaatataaataggccacttgggaataattgattatatatatatttatgagttattgtaataagttagaatgaaaagtttgatgggtgtaaattctgttttgaaattgggatggagatgtggttgaaaaaatttgagactgattgtgaatagtgatatagagagagagagacaagagagacagagagtggatattaattatatgtatatatatacacacaatgtatgtatgtacgtatgaatatgaaattaagttggaaatgaggtgttataaaatatacatatatatatacataagatatatgttgtatacggtccattgggaggaaccattgagaaatggacgactttgacttccaattagctgattacgcgtcgtagagagagattgagatggaatatttgacttccataatatatatatgtatatattgtaagggtgattctaccatgcactcccttaaaagagatgtactgatacatccttgacttgtttcggcatccaagaaaaagtttgtagtcttaatttttttttcatattcatgtacgttataattatttaagataacctacaaaattttgagaaattccgaataatttacaaaatagaaaataatgttcaaacagtctattttacacgcgtataaaataaaatagtcacgcgtgcaatacactgtttgaacgtaattttcggcgtgttaaacttttccaaatttcttaaaattttgtaggatgtcttaaagaactataacatacatgaccataagaaaaaatgtgactaaaaaattatttcgggtgctaaaacagatgagggtgcatcaatgtatccattttaagggggtgcattgtagaatttccctatattgtattagtgtaaatatgtatcgggtcttatataatttaagaaaataattttttaaagaatattgcgaaagtgttagagcatctccaatagaagtcgcccatgaagtttttgctacatatgcaagttatcatttttaataaaattttattaatactattgtttatatttagtaagagggcattacttatttttttttcaaaaaaaattactttatggtattattttataatatttaataaaatttaattatttaaataggtaaaattatcgtagataatttttaaaattattatttattggagtaatttttgtataaaatgttatcaaattttatgtaaataagaaataaaataaaataaatatttgaaaataatatgtgcacttttaataactataagtgctctcctattatgtttgtaaaaaaaagttcaatcaaaggttttatttgacctactagaaaaacaattggaatttgatgatgatggttttaataagagataacaacctttggatcaattagtcttccaattaagtcaaccacttgcttatatacttccaccaccaaattctacccttcacttttaatattcctttcctgataaaagtacttttttttggatctgaatatccttcctaataattacttaacggcttttggctctagctaaaaatgttataataatatgagtaaatattattaggtaagtctacaatattttttttaaaacgatgttttggtagatttttatctgttttactatctaggtagtgtttagtctatttttttaatcgtatacatcgtaattatttagtactatacttgtataattttaaaaaaattcaaacaacttaaaatactaaaaataagatttacatatttcattactcgcacgactatttatcttatacacgtattaggtaactgcttaaattttattttcgacattgattatgtatatttaattttttataattttttataatttttaactttacttataaattttatagaatgaggatataatattatatttctttatctaagtaatattatcaatattattattatagtaaaaaaaaaatcacataataaatttgttttatgttgttaaaaaaaattatgttttatgtattttttataaatatattacttagagaaaagtctctaataatatacataatgaaagagaaaggcactaactccctcaaaatagttgagaggctattttgtaaattacttgttggaggactaaaaattttgacacttgataaaatcttcttgacttgttcttctaactaggcttgaattggcggccattgtactatatgggagacagtttacttctataagacttgtgctcattggatgtacatcatgtacatatgaatttctggtttattattttgtctttatagtttaatttgcttaccttttcccctcatttttattttttcaaatttgggggttttgattgttttaggttagtctatgaatacaacttcttcccaaaaaggtctctccaattaagcaccttctagcatgcacatcactttctctaagagtattctcttcatatgtttagccataccattttgttgtggtgtatatcttactgtattatgccttgtaatacctcgctcaacacaatattgattgaatttttttgaacagagttcaaggccattgttagtcctcaacttcttgattttgtaccctatttaattctcaatcagtttcttctagttcataaacgtctcaagaaaatggtttttgtttttcaacaagaacacccaaacctttcgtgtaaaaccatcaactatgatgggaaagtatcttgtatctccgagtgtttcaactccccacaagtttgagttgggatgttcgcggtgcgggtggtgcggattgtaacttttttttcaaactaaaccacctgatgttaatctataaaggtgtcatatgaaaggagcattcagaatcgagtatccaatcaccacctgagtcagtgcttgacacaataagtactccagcagactcataaccatcctagaaaacatgtgcctctgctatttccttctccactttggctaatttcttttgtaacagagtacactcatccctgaaatgggcttccttcttgcagtaatagcaagtcttcccagttgtgtttttatttttggtttttgattggtgattggcgttcttcccatgtatgttcttgtttcctttatgttctttcttttcatatcttcccttaacataaagcccttcatcgttgatgtcagctccatcctctgatctcttcttaatatcctttgagttaagtacaatcttaacttcatccatagtataggtctctttgccataaagaatggtgtccacaaaatgttcatgtaccattggtaatgaattgagcaaagttattgcttgatctttcttccaacttcactccaatatggttcaaatcaaaaacaatcctatagtcatctaagtgctttctaagttccttcgagctatccaatactcagggtgtagagcctcttcttcagatacaacttgttatccaaagacttcttgaagtagattgaagccaacttcctccacaagcctagatcagtttcttcattggatatatacctctctcaatacctcatctccaaggctcaaaagaattgcactgtgagcctttatttttgtgtctctcttgatcttctcatccttcaatccatcaagcaatttcttatcaattgcttatgcaattccttgatgcaccaacaatgctttcatctggattctccaaagactgaaatcgttggagccattgaatttgtcacctcaaactttgctaaagacatcttggttgagtccttgataagcggataacaaattcttaaattttggattaggctctggtaccaattgttgtgattcaatcataataattcatgaataaaaccaaataaaaactcaactcactatcttgctcttgcctgccaccaccgtcagtcaccaaccgccattcccacgcacgggcttttgaggaggtaagttttgtatagtatattgtgtttatttgtttcttatgtgcaattttttcaaagtgctcaccctaattactctctccctgtctctttaattctcttctcttctcttagtctcggctccctcctccatgcttagagtctcgggaagcttctcgtctcctcctctctagtgaaaatatatctatatacatagtatataatatataatacactaatatcattataatacaacctttattttactacatatactaatattttaaatagacaatgtgtatacactatcaattatcactactatttaattaattattaaaaaataatattttgaggaatatttattttttcaaactaatttgaaattaaaataaatattatttgattttcttatttgtttatgtatttatcatttttgaaactaaaagtatctgaactgactaaggttattttagaattaaatttggtaatttaaaattgacctatttaatttaaaatagttttaaattataaattaaaagatttttaatttaaattttataattgtgatgagaaatttatttataatttgaggcttttattatatatagattaatcacaattattaaaatggttaattaattatagaaattgataaaataaacacattaatctaaaatattgagtggaagaaggagtacatgtcaatgtaaattacggtctccattagtggtcaacaccgaaagagtatagactggcctcgagataattttattttgattctcctaaggaaggtatttgtatatactattgttcaaggttgatctctttactatgataggaggaagtgatgtattttggtgggataacgaccctaaggcggcgttgctaagttaagtaatggaatctaaaataatgagttacacttacaaaatgcaactaagcttctaagtggttagttgttaacttgaccaaatagcagcactttatattttgaaaataaaatatgagatatttaagtttcaaaattataaagatgaaatctgtctcataggctcaatgaaattgactcgataccgaccctaagacgacgatcaattgtcaaagagttttattgtggaatataacttaaataatattttatgtgttttacttgtatgcgctcatgcatacgtacctactgtcattccaaaatgatatttataattcaagtataatcattctgttatctatatttatttcagtcgtgtctactgtaatatcttgagattagtgaaaagattagcaactctaattaaattaattaagaataaatgagtaattatattattatataaataattatgtgaaattatttgagatttatcacatataagactccatttattagttaagggtatttcgtaattttgctcgagaagggaaaatcgtaattatgttctatatggtactaatgaactatattattatatagtatgatgcacatataaccttattattataggtgatttttgacaagttgatacggtataatcacagtcatgtatgttcaaggtctaaaatttataagttatatgcttagaacaataacatgaaatgtgtatttaattatatcgtatgatacatatatataagaaatactagttggaactttacggtatcaaatactatcaaaaatagcatactaacggctattaatacaatttaataatatcacgtttcatacattttaatttaataagtttataaaaagagctcattcatatatatatatatatatatatatttgtaacttataagatacctaatatgtataggaatgctctcatatttatttatgtcttttaattaagttccatagattgatgtggtttcagtccaacctacccacttgatctttaattccagttcattaacggttttctatgtatgaactaaattttcaattggaaaattttgtcatttactttatttcattttctacatcacttgacttaatatgaattattattaattacttattt

SEQ ID NO: 186349 - DNA, 3861 bp, Cannabis indica
tcaattctttgggttgtgggaattcgaagtctgtagttaatgcaattgattattctgctcactgtttttctctgcagatgtagtttgttagagaatgagcttaaaataaccatttggtctgtattgaactttttgctgctgttgccagcagaggcctggcctgtacaccaagtaagtttttctagctcttttcagttcaagcaattttctgagtttgtgatgtttgtgttaatagtggggtcctattgcattgcatccaattaaaaatgttgaatatgaaaagattgtgctcaaagttgttggtccaaacttcactgttttgaatacaaaactttttgaagtttattagattctctaacatttgtgttttaaatccatttggtatgtgtatctagactcctagagggaatgaaattttaggattgaacaattaatttgtcaaaagaaatgatagtacacaatgtcagtagtgtaattaaacagcttatgatacaactaaattttctttgatagctcatgcaatgaggtgatctgagatgctaaggccgaaatggccgagaattttttgacccctgtgattgagagtttggtgcacctgctaaccaatgaagtacaatcgtttaagggggttagaagaaaagttgaatgtctaaagagagagctagagatcatccagtgtctcctcaaagatgcagatgcaaaatcggatagaggagagttgagtgatgctgtgaaaacatgggtgaaacaactgcgggaggaggctgatcatacagaagatgtcatcgacgaatacaggcgttatgtggctcaaagcactggtgacaagcgtggatttgttggctttctcaggaaagtaggcctccaaatcaaagccttgaagtcacgttatccaatagcttctcaaattcgcggcattaatgaatctctaagaagaatcaaggatgaaggacgagcatatggcttgagtcagtccctcggtttacagaggtcgagtagagaaaacacatacatggaggagcatgactcgcggttaggttccctgtttattgtggaagatgatgagtatgtggatgttccttccattcaagaggaattgagaaggagtttggttgaaggggggtcaagtcgtacagttacttcgatggtaggccaaggaggaatcgggaaaactactcttgtcaagaaggtttttgatgaggtgaaacacaattttgattgtcatgcttggattgatgtatctcaatcttatgatgtaaaaatactagtaaagagcatgatacagcaaatgtttgaaattgatgtttgttctagtacctctacaagagaacaccacacaatccaagggctaattactcctctcaggcaatacttgcaggcaaaaagttatttagttgtctttgatgatgtttggaatgctaacttttgggaagttataaaacatgctttgcctagtaataacaaaggcaatagaatcattatcacaacgcgtaattctacaatagctgcggcctgtaaggaatccccattcgatactgtccaaaagctggaaacttggtctcaagaaatggcttggaagttattctgcaaaaaggcatttcgatacgagtttgagagtcgttgccctgaggagttagagagcttatctcataaaattgttagtaaatgccaaggcttaccacttactattgggactgtggctggtttgttgtcaagaacaagaaaagttcaatttgaatggcaaagagctcttgataatcttgattttgagttccaaacaaatcctgaacttacaagaattacgaaaattctctctcttagctatcatgatttgccttaccatctcaaatcctgcttattgtatttcggcatttttcctgaagattacaaaattagttgtgacagaatgtatgagttatggattgctgagggtttagttaaggcttatggtaacaagacacaaaaggatgtggctaaagagtacttgaatgagctcattgaaagaaacttggtagtgtttgaaatttactatggcgcattaccatattgtcgagcccatgatttgattcgtgaattcatttattcaagagcagacgatttatgcttttgtagagttcttgatggaaagaacttatttggaggaaaaagcaggtgcttatcaatccgaggcagcatgaaaaatgtttcagaaacaatgaaagagtacaccagtgttcgttctgtgtttcttttcaatttcaatgatgatttgatcaggaacatgtcttccttagttactttgcttcaaacttgtaagcttttgaaggtgttggattttgaaggcgctcatcttgattatctcccagaggagattggatatttgtttcacttgaggtacttgaatttgaaacataccaagataaaagtgattcctaagtgcattggtaagctgcataatctacagagtttgaatcttatgtttaccttagtgcagaggcttccgaaaactattggcaaacttcataaccttcaaaatttgaatctcaagctcaccttagtgcaggagctaccattggaaataaataagctccaaaatcttcgacacattagtagcttttttaaggacaggactagcagcaacactagtagtgcccatggcaccaaccttggggtgaaaattcaagaaggttttggctatttggagaacttagagacactagaatatgtgaatgtgcatccttctggtgtggtttccttcattaacgatctagagaagttgatgaagttgaaggcgctcggtcttttgaaactgacaacagaaacttcaagggctatttgtgctgctaatgctaagaacttgaaccaccttgagcatttgtacttagcaacaactaatgaagattacatcttggatgtggagccactttcggaatctcccccacttcagctgcagaggctcaacttaataggccaactaaaggagctccctcgttggatttcagagctctggaatttacaggcattgttcttatccttctcaaagttgacagaggatccactgaagtacttgaaacacttgcctaatctcacgagtcttcgactacgcaaatcatatgaaggagaccaactacactttgaagagggtggttttcaaaagctcaaggatctaactttgttgaatttgaaagaactaaagctggtgaagatggatagagggacattgtctcaacttaaaacactcaacattggttcttgcagattaatggaggagattccagccggaatcgaacacttgagaaacctcaaagaacttaaaatccgggacatggcaagggaatttgtggttcggattcagccaaatgggggtctagattatcccaaaattcaacatataccaatggttcatacattttaaattaggtgaggtgaagttgtgtttatgttaaattgtcttgaattttctactagacataaccgtatgctgacaaattatatgttttcatgacaggtggttttgttatgaaaagagcttcagaatatttatatcaatttgtgtcttgtatatatatatgataatgaaattccaagctactttgagctctgttttccctctttttttatagttgggaaaacttgatgtattactatggactttaaaagtagctgcaatgtatcaattatagtatgtatactacgtttactttgttatttgcattctttgcaatgagggcttacttctaggagggcaagagcaatgacttgtttgaggtagtaacatttttttgtttttctttttcaagaaaaaaaattattgaagtttttttttagtgaataggcatatatacgaacagatgtagtttccacaattttttttaatttttt

SEQ ID NO: 186350 - DNA, 3607 bp, Cannabis indica
gtcaactaatgatgcatttggtgaccggaaagcagaaaaatgagagctagtcgacaaggctttgtaaactttttacttgggtgagacagcccttttttgttgtttaaagttttcatgatgatttcttaataatcaatttttaggcatctatttgtcacgggaaattttgagcctcatcctattagtttcataacagtataaatgaatgcaattaatgataaacaagttaagaattttaccaaaacttagctcgattttccgctggaacataatacatggtttcagctaacacgccacattctccacctgaatccgtcttgtcatagaatgaacccgaattcggccaatcacgttcgtggttaccactagatttaacaaactagaaaaatcagtattcattcataattttgattatttcaaaatacacatgaatatcatacatgcatatatgatttcacactaaccttgcaaccatataaggtacagttgatgcaatgggctccacttgtgatgtgaattgatcccactgggaaaggtatccatttgcatatgttatatctccaatatgaaaaactatgtctatgtttggcaagtccctgatcaattggtctgtagtgttaagtgaacctggttgatagttactatactcgtttgaaccatcacgctctgcctgaaatattcaaacatcataagtttaattttctcaagtccttgtatgtgaatgcaatttatgattggaacactggtatactgtgccagtcatgtacaggttgttgtagcttgatttgggttgtattccagtctattagctgagttagttgctagattatgtggttagtagagagattaatagagggttaattaaatgagattaggtaagttaagattgacaagaattatggagtaacacctattcttataaatgactcaatatttttacatttaatctattgtgggacaatattgttcaatattcttctcaagattgtagctatttttttatcaccaatcttgaaacatgaccatttactcactttgttcggatctcaagtgtccttttgcactatgcgaatcgcgaatctcatgcaacgtactttttttttggctaactatttggataggtgtagatcaagtgaccactaggaatatagttttgatactacgggttctattttaaaactaattggtaataaatggaataatttatgttcttataaatagctcaatatttttacacttaatacacgtggaacaatattgtctaataaaaataggtgaaagtcaaaaaaaatggttaatcctaaggctttcaataaagtcttctattctacaacgatttcaagaagagcataacaaaaacagatgagagaaggagataaaaattgtaggtcttaacccttggagcaaggtacattaagcaatcataacaaaaacacggctcaggaatcagtacatgaaagctcaaatgataaataagtttgaatttcttaattacctttcccatgtccccaaacattataacacgctgtaatgaatcctgcccagggtatggcgatgacttgaaggagtacattttgctccaaatatacataccgttagataaaaggtgacccatcttgtatgtgtacctgagtgaccatcattacaaacattgcatgttaatactttataacatgtaacaaacgaataagaactatctcttcttatacatacactttattaggccacaaatcttttaggaaacttgtgtgtatgaaaccaggatcacgccatccaactgttcttgcaggtgaacctgaataccaatgtaaatcttattaagcataatgcctacttactacataataaaccatcaaatgcagacaaatggaatgtgttaaactggaaattggtacgggaaaaaagaaggttaaaacgaaagtttgtagtattccgaaataagaaataaacaaggatttgcaattagcttttctgagttagcaaagtaaacagtaattaatggataaaagagttgataaaccaatacagtagaatctataatattgaatcctaccacacatgctgtgtcgaccaaatgtcaatgttccagctggggatctcacttgattttctcccttcagtccccactcaacaaatggaactgtctcatctatgttgtagccacttgtccaggtaactgtcatctgcacaacatatttaaaagttgtaaagatttcagctagtaacttttctgccttcgaatataattctttaaaaggcaactctgatcgtgtccaactgtgaatactagctaggcttatcctcagtcaaataatctctcttgcctaaagtggatgttctcctaaaacatatttatttgaatttgattgaaatgaagttttagaaacaaaagaaggtaacattattgaaggtgtataaggaaattattctctcagcgcatgtcaagtagagatggatcctctctatttcaaaatcagaagtcataatttgataccaattacaggttacagtggaaattgactcttcacccttttacatgctacttcaggattaaacatacagaacttggaacaataaaagagaaaatccaaatcagacaagcaatgtctgatttcaagctcagaacattaaacaatacttcttattgtacatgaaaacagcctgccaagaagcctcagttaaatgaaaaacttacttcatcccaagattttccctgagcaagacgtggatagagcggtgcttttggattgacaaatgatataaaatttgaaactgccacaacttttggctgcaatatagtacaaagaagttagtcatgtgatggaaacatcaatagtacaaaaagttttataatcaagatggtacatagaagagaatgtgtgaatgataaatgggtaagcaaatatctgtcatagaatttgataaaaaaaatgtaaataaatcttcaaatattgagaccaagaatgtagattcagcataatagcagacagggtcacaagcttacatttgacagcccaccaaataatgcaaaagaaaaatctgctcgctgatttattagctggaacctcaaagaagctttgccagtttttatataatgtgaattggactcatttgcatacttgtactgaaaaataaggcataacatatcagtatgttgttgtataagttttctccaaattacttcagtgtcaagactaaaccttcataaataccttgattggggcagagcatatgtatggagtctgctcctttggatcatttacaggtgggcaagttgatgagctgacatagtaaagcagaaatacatcagttttcaccaatgtgaagcaatattaacagtacttgcctcattcaaccaaatctcgagtaaatgaaaacagtttacaatcaataagtgaaaaatgtaaattacttgaactttgcaggagaaaagacagctacccaatcatcagcagcaggttcattgtgttccaaatccacagttacccattgggtatcttctccctgtagttgtacaacataaaattcatgcatcatcaactcccaagtctctaaagcccaaaaaactagaaaaatattaaatccaaaaagttctaggataaagtta

SEQ ID NO: 186351 - DNA, 6092 bp, Cannabis indica
atcaatcaaatggaaagaaagaagaaaaagtaaataaagctttattttattctcagtccaaccaacactatttcaatgaatcagaccaagtatcagcttattttcatcaaaccctcccaagtccctcaatcgagggttcaaattttcctttaaacatcaagtgcaaataatatgcacattccatcaaccaagatggatatgtaaatgccaggtgttaccagtaataagactaactgacttatgcttcagtcaaatgtatgtaatcaagatatgcataccttccccacgcccgttcctacaccctcctagagcatgctgtctacttagggtacgtagacgaggcgtacttcatctcctcgcctcgaggcccaacatttagtaggttttgtccggtacagtatctccactaatcatcattcactggaggaacttctattgtctgtttcaagttacaacagttagatacacacacacgtatattgagagagagagagagagagagaggaaagagcgaacaagtaattccgtacattctcttctggtacagctggaggaacatcttgtgcttctaaagccatcattgcccttattttcctggccttgtcaatctttggtagcattgcatacgagtcatatttgcctttttcaatgaatttgtgctataataggaaaaccagagaaagcagcttcgagtcagaattaaagtctaaaatagttcaacatttatagcacatattaataaatcagcaggcatggtacatacaaaacattctgaatagaaatagacttcaactattttcatagtgattaagcatggactattaaagtaattcaaattagcactcacatggacatcttagcatggatactggaatgtatatactgacagcaaagataagataaaaaaacatacatataaaagagagatcacagaaactacaacctacaggactcaaatatatgactggcaagtttttttccttttttttgacctgccagttcggccaggagacctccaaatggccccaaagtttttttgagtgtgtggggattcaatccttggattaccacaagaccaccccttcaggttaggactggtgaatattattcttccaaattcaacttactgttttcttttctttttcatacaccctaaaatcccccaaactcgtttagcattcctaagtttgaaagtgccgcttcccacctaacccacaatatttgggtagcaagaaaactatatacccaatgctatgcaggacctcaagagggactcatgcctaggacttaatggagcaaatcatagacctagtttttttgacttgctcctcttggttcttcttatcctataataatcattaaataagatctccatatagcatgttgtgttacataaaataggatctgcacacttaatacaaagactatcgctaccaaacaaacatagaaagctatagagagtcattttgagcttaccttcaacatctcagacgcagtggggcgtaaacgaggttctttcgttaaacacttagccacaaaatcatgaaacacaagagacctgcaaatgcaaactaccaaaattaaatgctacagtgaagagtgtccgatatgatatgtaagagaagacatcttatatcacaggtgaatagaaattttggagccaaaatgaaataacttacatctcctaatcaaggcatatcatgagaatacccaacttattttaggattaggtctggctcaaatcagatcaaccatatttacaagaatgccatgaaaacatgttacagataatgctcaagacaacgttcatgcatcggagcaaacttgaataaatacaaaggccaagtctcgagtcacattattcttagaagacacctagtgttcattgacatctttgtatcttttctcaatatttattttcactctgtttttgttaggctgcatcttattcatgtacatggactaaaggagcgagctatgaagcccttttataaaataaataaataagagcaagaggaatatggaaaaagaaagtaaacaaaccatttttctttatcctcaagcattggtgctggctcaatggatatcatgaacaaaacctatgataggcgataattgtgttacagaattgaaactaaaatagagtgggggcaataaaagtaacttgcaagaaaaggaaaaaaaacttttgttactaaagtactaaccctcattgggtgcactgcagatctaggaggaagcccctgaaaattaacgagattagaaacttctgcaaattagtactaataaaatcaaaaatgtgaaatattaaggacagaatctcatctcaaaaacataaaacagaggtaatctccatagatatttaaaaacaatgttttattcaccatagcaagtagtattcgttattgtcagcaaactaatttcccagatccaacaaggcaaaattcaaacaagtttttgggtatgttaataagtggggaaaggggtccgaatcgtcagattacataactcccccccagatctgctttataaaattttcttgtgaattgaaaataatttacatcttctctagaaagtaaagtacctctgccatttcaattgcagacacaccaagtgcccatacatcaacctgtaaaagaaacaaattataaaattaaacaaaaagaataaaagggaaaacatcagtcaaagagactgaaggcttcaaaacatgcaacagctcacaggtggagacaaatcgcatgaacaaaaaaatgaagaagacttttgctactcatacaaaaagtaagaaaattctctaaaagaagcagcataaaacacaaaactcaaaaactctcgataccttcccatcatagcgactttcttggataacttctggagccatccaatgtggggtgccaatgaactgaaaacaataagaactaaatgcattaagaaacagtcatcaaccgaaactcactgcttgtattgcctcagaacatagaagcatggacagtgaagcatttaatatatgcaaatcattaatgaccaaaagaaaagtctatgttacgaaacgtaacttattacgatttaaaaaatatttaagaaattgcataccgtgttgcgctttgacatggtccttgttagctgggctgcaacaccaaaatctcctgttcattttccaacaaaaataaagccaaatttagtagtcagttcagtttgttgaagtacacaaaagagcaatagaaaataaccatggagtctagtctattgaaaacactcttgttctagtaaactttgaggagcacgaacaatgtcctataaaactggttgtgaaagaacaacaaaggcttatattgcctaacaaaagcgatagaactttaatccacaaaaagttcaaacaactatatgtctaatatataaatgactagtgaagattactcacccaacttgacatctccctgttcagttagcaaaatattaccccctttgatatctctatgcaccttaaaaattgagtgcaaatatgctagcccctacaaaaaacaaatatgccaaagttacagcattttatgtatagaaaattccaaaagggaaatatagaaggttgagaatgcgtatgagatccacaatagaccatctgaatcagcacaatagaaaatactgagaaggcttaaacaaaagtgtgtccacttaactaatccaagaaatcaagtaaaagcctttctacacaggggaccagaaggtcaattttttgttttcaaccactttcagttttaacttttaagaaaagttccatctgtagtttatataatttcgtctcaaaattatagttttattcatggatcttaccttcaatgcttccctacagatgtatgctatttgaggttcctccaaagattcctcagtaacattcatcaagtcagcaacacttccacccccacagtactccattactatctgccaatacagcgaaaaatagctgtcccaaacttaaaaacattccaggcacataacatagtaaacaaaaaaatagctgttttctttatgagattagacaaagtaaaactttttctacattcttacccaaagatactcttctccttggtagctcccaagataccgaacaacatttggatggctacattgttgcaacatctcgatctctccacggatttcttcatatccctcctcctatagcatatacttaattcaattttccgaaactatacttcgaattggtagtggcacagagtacaaaatgaaagaatagtaataaacaagcaaacaaacatacataccccctcagacaaagatatgactttgatagcaaccaactcagaagttttcaaatccctagccttgtatactgcaccataagaccccttccctgcaaattcaattagcccacaactcttttcagcaaaattatagtgcaaaagcaatacaacttttgattgtttggtattatgtttatgtgatggtatggtttgttttgtatagtattgttttatttggtaactatatacaaaggatctctgcaccacattatgagtaagacatgtttttgtaaaatgctattgtcgtgaatcttaattttgttatattatcaatttttagtatgataatattttgtagtgagactaacaattactcaagcagaagttgtaacaatgaggcggcattagaatggtcctcttcagtttattgctatgatggtggcgttggattggttttttgggcttgaatcttctcttcatttgattgagtcaaactgttagggtttgattatgagttctctaccagaatacgacgcctataaggctcatgaatgagaattacacgcactctagaggtttggataaaagaattttctaaccatttcttcagaagtgtagtatactcttattgttatttttttaatgaaatgtttattgctcaaatacaaaaattgaagaaaactcaaacacagctatggtatcgaatcgagaaaactcaccaagctcattgagcaattcgtatttagtggttggatcttcacgggtaacgctgtcaggaattgaactgcacgaaattttcgtcatcagtcgaggctcttccgacgacccactcctcttcctctgattcccaaaccctaaatcccccactgcctgcatacttgcaacagctctactcattgtggatccaaagccactgccactgccactaccactaccactaccactggtccttctcaccacactcccgctagacgattccctctccccggacttcaccacaaaagtggaaaatccatcgccaccatcctcgtcctcgtcttcatcctcttcctcgtccctctttatagtgctccctcgcttgggaatcggtggaggagggttccctcttcttaccgaagaagacatcgaagacgacgaagaagaacggttccgaggccgattccgatcgctcttgattatcattgtcccgaaatcattttctccatcgtcgtcatcatcgtaatcgattgaggatccaccgccgaagtccttgggaaggcgcttcaggagtggaggaagagaggcgtcgtcatcttcatcttcctcatcgtcgttacctttgtacaccatcgtcgcgtaaagatcttcttcgctcatagactggcgtcgtggtcgttgtcgttctcggccaattttgtcgttttcttgttcttcatcgtcgtggattactacagtggagtagatatctggcctgggtggaacattccgggaccggcgaaaggttgaatcctgatccatgtcggagctaagctaagagaacgagaaagaagatcgttaaaggtttcagttgaaggccatggattccattggattcgaacaagtgtcgaattggagccagctgttcctgactattgggcctcgggttccattgtttgggccgaattaaatccaagctcaccaccccagtaacccttcgggtcagtcccaacccggaataaactctccataacccagctcgattcacaattccaatttaatgtaataatttttaagaaatatcgataatctatctagaagtactaaatacaaactaagggtgttcatcaaatcactcatatcgcacaaactgtatgt

SEQ ID NO: 186352 - DNA, 1542 bp, Cannabis indica
gtgagtgagtgtgagaaaaggggccttggaaacaagttctgactctcacacacatacaaacacatgcaccatttcctcctttgtgattgtaattatgggttcacataattccatgccatgcatgtgtccatcattattcaatactacatctcttccctactttttttttcttctgtgtccatcccaaaatgggtccccttatttctttccatgtatgctttgtcccaataaatgcccatcaaattggtcctactttttttcccactgcctttcttttcctagtggctcatcatggccaatccaagatttgtggtcactttgtttcacttacatacaatacaactatgctgactctgtggtgatgagattatagggaaagaaatagtctacttttttttattttgttcccaactattatgaaatccatgacactatttagttcttattcaattttccaaataccactttttgttttatagacaaaaatcttgaagaaacaaaatcatattagattaggtggaacaaatgaatgttttttttatatatgttgtttaggagggtgtgtgtgtcatcaaataaattattgccattttcacatgctttggatcacaatgaaactctagtctagactctctctatagagtatctatttatgaatttaataatgtctattccaaggtatctttacactatcatattatataaaactttattttttattttcaaaaataaaattacacatttggccaaattttagttgaaaattttattttttctgttgaagtaagaaagacaaatacacccatactattttggtcttatccattaaagccaaacatggaatttcctctcatacaccaaaagtgacctaagataatagtgaataaataaagaataaaaaaacaatgtacttgggaaaatgggatttagttgaactaaactattataggtcagttaaaataaccttatctactagttttgtacttcacatgggtacggataggaagtaatgaagaaaaagaaatataaaaatgttgtgtatatatgaatgaagtgaaaatgaaagagaaaggtgtgtggtggtgggatttgatccaagaaaaaatgtatttttttaagtatagatagatagatagataatagatataagatgggtaaagggaatataattaaaatagatgagagaaaggaaaggagtgaggagagagtagtttgcatagtgcattgcatgtgtgacagaaacaagagagtctggtgtggtgttgtggctgtgatgaaagagagccccaaatgcccaacacataaaatctttcatacaatcccaatgaccaaatcaccggctggtttccctcttggaaacaccaccaccctcctcaccctttccttcctcccccaccatcttattaaatattatttttactttattatatatatatttacattttcttttcttttagatccacctcactcactttcataaacaacaccttttctttttagtattattattttacactataataaagaaatactaaaagatat

SEQ ID NO: 186353 - DNA, 2108 bp, Cannabis indica
aaaatctaatctttcaaacaaattctttttcttctctctctcccaatgctcaaacaaaagtttccagctttcctggtgaaagcatagctgtcaccagctttaggctcttcctagtaattgctcacgcgtactcccttactctctccataccttattgcctttaatatatcatttctttctatatatatacctctctccttaaaccctcttccactcactcactcattcactcactaaattctctatattcttctctctatttcaaaatggggttttcattttcaaatgggctttcaacaattgttcttctacttgcttttttagtctctatagtctctgcaaactttcaccaagattttgacataacttggggtgataatagggctaaagtgttcaaacaaggccaacttctttctctttctcttgatagagtttctggctctggttttgtctccaaaaaagaatacatgtttggtagaattgatatgcagctcaagcttgtagctggaaattctgctggaactgtcactgcctattatgtatgtgttttgattaaaaagttcaaaactttattgttagtttttgtgttttttgtgataaagatcatattttttataatggggtttgcttgttttagttaatcaaatgtgaaagttatcaactttactggctaattgtatgtatagaatctatagatatagttacactaactatacattctacatgagagtttttcatgtgaagaggtttgatttgattgcttggtgatcacggttcatttggtcatattttcttgtgacatatatacctatatatatatatatatatacactttataccccacaataaagaaagaaaactcaagaggactttggtttatctcttatgagttttgacaaaatctactttgtcttttagttgatgttttagcatgtgggacattctgatatgtctttttcagggtggtgtttctttcaagattttattatactaataataataaagatgagctaaattgtaaaatgtttgttgttgttgttatttgtagctttcttcacaagggcctactcatgatgaaatagattttgaatttttgggaaatgttactggtgaaccatacatattacacaccaatgtgttcactcaaggcaaaggaaacagagaacaacaattctatctatggtttgaccccacaagaaacttccacacttactctgttatctggaaaccccaacacattatgtaagtatatatatacatatatttacatgtatattatttttacattgagcttgttttctttcatgtgttttacttacatgtatatatattatctttacatataatgatataaagcaattgaacttgttttgtttcatgggttttgcttagtttatagataaattagttcaaaattgtaactttctactaattagttagtaagatcacatgtatatacacatacttacatgtatattatctatatatgtacctacaaacagagcaattaaacttgttttcttcaatgggttttgcttagtttataagcaagctagttcaaaattgtacctttctactaattagttagaacacttgaatatatacacatacttacatgtatataatctatatatacacataatacatacaaagcaattgaacttgttttctctcatgggttttgcttaatttataagtaaaccacttaaaaattgtacatttatactaaattagtaactacacacaatacagcttgctttcttttatgggttttgcttggtttctaataaagattatatctttttaacatacattgcttatttttttgtgggcagtttcttggttgacaatactcccataagggtattcaaaaatgctgaaaaagttggtgttccattcccaaaaactcaacctatgaaaatttactcaagtctttggaatgctgatgattgggccacaagaggtggattgatcaaaactgattggtcaaaggcaccctttacagcttactacagaaatttcagtttcaaggacttgaaatcatcttcaaactcattgtcttcttctgataattcagtttggcaaaccaatggacttgatggccctgc

SEQ ID NO: 186354 - DNA, 1600 bp, Cannabis indica
agttctttttgaatagctcttcaaactttctgagaaaacaagatgcaatcttgtcctggtcactaatccaatcttccccaggtccaggtttaatacttggataaagttccttcgtctccgaacgatcgtggaagccataaagaacttggtacacttatctccttcggccatccattggactcgcgatttttgtttccaatgaatctcttctctaagtagtgcttccgataacttattcttcgcatcttcaatactcggtgacattatctgggtgatgacattcggcgaacttcaagttaaaagtggcctcttgaacctgatttttgaggtgacaaaattgagatttattccactgtttgagttttctacttgtggctttaacctttctgtagaaattggtcattggattggcatggaggtgtcttgaccaagcttctttaacaacccaaaaacaacgggggtcacgagcccacatattctcatatttaaatgaccgccttttggcattcactcccccggaggtgtcaaggagaatggggcgatgactccgaagcagccagatgatgaacaatagcattagggaacatgatacgccaatcaatggaagccagtccacggtccagacgagccctcttaacaccccgccttgggacgaactatttctacctttagaccatgtgtatcccagtccttggaatcccaagtctactaacccagcccgattaaccattcgacgaaaatcaaaagcgtagcgggaagagttaccttgattagcatagttgacacattcggagtcttttaacgtaccattcatatcaccaatcataaggaggggttcctggcaatttaatgtgaaatctcccacttttaaccaaaatgcttctttatcagtaccatgaggggggccatacatgcctaataagtgccacgggtttccgggaaggtcagaggagatgacacaggagatgttatttttattagagtcacggatggtgcagtcaactccctgcaaccaacaaattccaaacccacccaagtatcccacaggggcaacataatgagaattagcaaatttaagtttggagcaagttcttacaaatctatcttcagttagtcgagtttctgaaatcaacaccatctcaggattgtggaggcgaacaagggccgccaattgtcgaactgtcgtggtattcccgagaccacggcagttccaagatagaatcttcatggccccactggaggctcttccgggccagcctccatagccccaaaacaaaaatccagattggaattttcctcattagctctcagttcctcagtcactgtgggatctagctctgtaatcttacaattgctcctggggatgctctgtttctccacgacgacaaagtggttactgagatttatcttaagatcaaactcctttccttcccaactgtgattgacagtgaaagagcttccactcggcctcggactcttttttgtccatttgaaaaattttggagagggggatagatcacattgcttcttcggggggccttccccttctcttttgaggagtaggctcattgggaacaatgtttttcctccccctcggtcg

SEQ ID NO: 186355 - DNA, 2305 bp, Cannabis indica
gtttgagctgtatcttcatgatgatcctttagagtaggcttatatagattacttttttttttttcaaaagccacagaaaataaggttctttgtatttcttgcatctctcttcgatttaaaatttgaactttggccttttgtacctgtttgcatggaaggagatttctagaatctgatgatggctttatggagtcacggtgtttttatgtgtgctttgttttgctatactctttaatgtgcccaatgccattcaataaatctgtattgctgtttttgcagatttaaaggagcttgatttgactggaaatctgctatcagactggaaggtctgtactgaaattaccatgttaatctttcttttataaatattcttgttttgcatgtactcagtgcctcttaaaatatttctcaaattgctgtactcatttgaacttacatttctgccctacaaaatagtaatttttatatcataatttactattgcttttttagaaatataaaaataaaaaggcagggtttttataattaaattcattgtaaggttatctacagtctgcacaattgcttttagggatttcttgaatacattttttttaaacagaaaattcatctaaagttattagaatacctgcttccatgatgtagcatattggtaattttgatcactaatttaagtggtgaaaaagtagtagaaaagaagaaaaaatggcagcagggatttagctttttcaccttgcctatgtaatagatacataagaaaaggattttgtcaaatttgtagactagtagttttcttttcttaaaacttgatcactgttggcatattaaaaaagattccttttcatttttgttcaatccttctaagaacaatagggactataaaatcaattggtcctttagtaactccttcattttacttcacagatttagtatatggttcccccatcaatctcatatcataaaagtttggtgttcttagcatttatgttttctgaatgtgctaccatttagcattttttctgttagttttatcaaactggttgtggacctcactcattttgtcttgttttcatcctcacttgagtgtttacatttctttgcgatttcacaaaactattctttgcttatattgcattggttattctccaactttatacatcattgattggaattgattaactgttctccaaatctgaattgatattttcttgcaggatgttggcactatctgtaaagagttaccaatgcttcaagccctcaatttgtcctacaatttaatggcgccagacattgttgagctgccacaattaaaaaacatacgcattttagttctgaatcatacaggtgtaaactgacaaaggtattctttctactagatttcgccttttatttttggcttctcgaggactcttagcaaattagtgtggagagggaacagagtctggagtggctaaacaactgtgcttggacttgataagaaaggccaaagcacctcttgttttaccaaacaaatattaataatgtttttaatataagctgaattctgacagctctcaacctaatcatttttttctttctcttgaactctgcaaaattacagtcttttcttgcaaagcttttttcccttattttcttctatttatttgctacatatatttttttttgttacgaattttccctgtttatgttatcttcttactaattgttacttaatgttgcaggttgaaattttaaaaacttcactgccagcaattgaagagttgcatctaatgggaaatagcataagcacaatagatgtatgcatcttacattcttcctgatcaatattctttcatattataaataataaaaataaaaagtatcattggcatttgtttatctagattaacgcatgttattgttatcttgaaactaaacattacaactttttttgccattcaatgttatggctttgtgaatatattaactttacattagaacctcaggtgaatgggatattttttaagaaagaaaaaaaagaagtaactctgataatgtgaaagctagacccttaagatccaaatacaacatttattaaactgaaattattctcgtcaatagaacctttagcatgttggtgtttgtgtacaatatgaaagaagtataaaagtactctcacaaggatatcagtaacatttaccattgcatggaatccaaaacatgctacttggtgatttcaaaactagtaattcattttaacagaaaaaaagtttctttttttatcttggttcttcctgaatatttctttggttcctttttttttttt

SEQ ID NO: 186356 - DNA, 4576 bp, Cannabis indica
tggttgcagaggaatcgaagcgaacgaggtggagctctcgaaagccgcagctcgatcgatacagtgtaagaataaagatcgatgagagaagtggaaagaggagtagaggtgttggcactgaccgaggcaccggagattgtcttaaaagttgtcgttcctccgagtgaaccttagacgaagagagccgagtcgggtcaggtcgaacgtagcaaaaagagtggcccagaccctcatctagtgggtcggaatccaaaaccgacaagtcatgtttccgacgagcttctccaccgccggtgaagcaaacgctaaacttcccaaagccgttgcccatctcgaaaccaaataaacaaaaaaacaactatatatgaaaacctatttagtttagctgtaagaacaactaggaccaataattcatggcctatttttttttttttcttcagagtgccagaaagaaaaggaagaagcagaagaagatgaggaagcagaagtggaagatgagtatagagagagagaaaaagagggaggcgttgacttttgagcttatatttgtttgtttgtttttttttttaatatttgagcctatatttttgaatgtaggaaaaaacattttttaagaaaaagattttcgattctaaacgaaaaaaaatatattgggagccgttgactaaggtgaggcaattaagtaaagtttgggtttaagttttgattagtaatagaacagtgattttacgaagtttgaaagagcgtggaaatcacgcttctttgcaagtggtcaggacattcgtgggcgcacaacgggtgtgagtgacgagactatacgaacgtatctttccgtgtgcatttgattatggatatacgcgcttagtaagcgcgtattgataaacggtaaaaaatagtttctattaaaactctggtaaggagccaaaagtcaaaagaagaaaaagccaataaatatgcgtggaaaagcgtgccacactcaccgttggatgggtttattagaagcaaaggttgactgacacctggcagcccattattgcctccgcgtaattgttttattttttgtcaactcgaggtttttcgactaatctttcttgcctcagcttggcttgacttttttaaatgtcttttaagtataaataattgaatttatttcatttgaaatttttgataatttcttttcaatttgtatttttttagtttgttaaatcatatgtgggtggggtggttgaggattcctaattaataattatgctacattaactaatatgagaagctttaagagtttatgcatgatgcttgaccaatatagacttgtctttttgttgactttatacatattataagtacgttccctataaataaccaaaggaagaaaaagaaataagagaaaaaagtggatgaggaataatgccatgcgattcaaaaattcaaaccaatgagctaagttttgaataaatttttttaggaaaaattctactttattcatttaaagtaatcgtgcattttcatttagaaaattaagttgctctgtttacacattttttttttttaatgaaaaaggtatatttcaaaagaataagtttactctcttttaattaattttatttgaagacttacatcactaagaaaatacaaattagtaaaaatagttttttttttttttagtagtagagaacaaattagcaataggtggccttttgtattttacctcaaaaaaaaaagaaaaaacatattttcatttcaagttttcatcctttgcaagggaaatcaaatgtagaccgtgtacctaagaaaattcatatattatctcatacaaaaaatagtaatgacataatgaacgaaaagtcaaccaagtgttaatatttattttggagtacgatagttgtaaatttttttatttgttcttcatatacatcaattagactttccatagtacagcacttttgttaagaatgttgacttaatgctacagtacataaagtatttttttccttttcttaaaagagagagaatattaggaaggtttttttatgctaattatttgatatgaagtcattatcagcttggcttcttaatgagtatatattttatctaatctattcgatctttttttattaccacgatataacgtcggtatgggggaggaagcttaatcaagaaaaaacaatgtaacaatttactaacatcgtatatgtaagtgtcaattttgaataagtagttacggcaatttataacatcacattgtcttctttttcttttttttttagaagatatcatacattgttgtgattagtcattttcgtagattgacgactaaagttcagcccaaagcaaaactagttaatagttcgtttgtttagcaaacatttatcttattatagagggaagtaatcaggtgatattgccatattgattattatctatttcaaatgatattatcaattttgaacctaagttctaatagatttatttttttcgcaccttctcaaaaaaatctcataagaattgagatattatcattctttatatcctcatgatttttctaatttcaaaccaatgtaactttggttgcatatacccaacaattattttgaggtgtttattgtgcgggtggtgtggattgtaatatttttttcaaactaaaccgcatatgtagtttttgtaatttttcaaaccacaactgcaccgcgaaaatgcgatatgatgctatgtaattttaggagtttgcactatcatcattatcaaacattataataaaaatttaaaactcaatctagtaacaattgaaaaaaaaaatatatcttattaaaattttaacataacaatatatataataatcatcaaattattatattgaattgtcaccaaaaaataatataatatacacatatattatgtatatttgttgttttatgtaaaaagaataaaaattatattgtataaattggtaaccttataatatatagtacggtatgggttgaaccacaattattaaatttaaaatctcaaactgcactgcacatcatcgcgcgatttggcaaaaaagcaaaccatgaccacaccgcaaaggatttcaaaccgcattttttatgcagtgcaatgcggtgcggtacgcgtggtttgtgcggtgtgggcgatttataaacacccctacctcaaacaaacaaatgaccacattgcctcccctcaaacaatcttctatctgtccactctccatcaattagtactgtatacttctctccaatacgttggagtacgcaccttacatggagcaccaccactacctcgagagttcgtgctctttctcagaccaacacatatttgttaactctgaaacttccaaggttacatggacatcaatatttgacacgtggcaagaaggatgacgtcacgaagttgagtagacccaagtcatagtagtcaacctaggaggggaccctagccctgcgcccaggttgacttcgggagctccgagatggaagttgagacttcaatagcttgaatccaactcactatcttttagtattatgcaccatgaagacatggagcaacctaattcaagcccaagttatgaaattacacgaacctgcaatccaaaagccaacctacgcacgtagggtttcacccagcacccaagttgacattctaaactaggattttagtttcttggaccgtcttagtgtaaatggtcaaacattgcattgtgaaatcaactagacataccacgaacatatttgaggtattatagtcagattcaaagtaagtttatttttaagcgcctagggccccggtgcctgggcgccccagtgcccaggttgataatttatcaatttgggtaacttctgtttgtttttttggtactaaattgggtacgtggagaaagacttcgtattatttgattatcattataccatagctcaatggatccccaaatgtgtatacattaaatcaaaacataaaatacaagataagaacatatacttcttgatgactattagtgtatcctcaaaaattctcgtgtgttatatatttttggttgattagaaactcacaccatagtcttccaaatcgatccaccacacaggaggaatagtgtgggctattaggataaagtgtataatgtgtttttgtttaattttaaacactttagcaagaacaatttaagagggaaaacaattttcttttctcctatatgtatttcaaaaatagcagttgaaaagctcctgttaatttcgaaaattatgttatgaaaggtgttaacacagattttgttaacctatgataagccttttcgtaataaatttaacacaaaattaataagagattaataaagtatataattataacacaagatatttttatgtggttttacagttaaatctgcatactccacgagtctatcttattcaagatatttctgagtatttaatacaatatacaattgatcgtagttttttatttctctccaagactttccgtccctttttctatctgcccctatttataggaatataggttgacagttatttacatttaaattcaaaataaataaccgttttaatgaaacgtggttaat
